United States Patent Application Publication US 2014/0057251 A1 - sequence listing, part 72

SEQ ID NO: 113238 - DNA, 5779 bp, Cannabis sativa
  modified_base (42)..(49): a, c, t, g, unknown or other
tagttatgtgaaaaaaaatatattttttcataaatattaaannnnnnnntattaaaaagtaaccaattcaaaataactgatccactacatttttgcggattggattgaattggatttgagctattgtgtagatcggattggttccaaaaaataaaatccgcacttagtgcggatcaataatgcactatgagaaaaatagtgcggattggattggatgaacacccttagctaagtgaactagtgtagtatatagaacatggttattgaattaaatgtcaatacttaccatgtgaaaattgttatgaaaagtggttttgttttaaaaaaaaaaacaagtagtatttagtttctgatcacattatgcgactatttaataaaatgatgtgacattattttaaatgacgtgtcatgccatttggcatccagagtgttagaaaataaagagctacctaccgaacttctaatagtgggagaaagtaattttactggcaaaattttaaattaggtattaaactacaactgagtaataaatttaaatatttatgccaaattactcttaaaattaatacaagattaacagcaaaaaatattataattattatcagaacaatataatccgacaaagtattcataaaaagctaatgatattatattaacaggatggcactgtgtaaattgggtgtggttctttttcttcggatgaagtctataggtgtgttatgacttttattgggatgaacagaaattaatatttttacttcttttcaaaccacaaataaaagccttttactccaaaaacaaataaaaatacttataatgctgtcttactcaccactcctatttctgactttttgcttcttaattttctccaattgtataatttcttcactttccaatttacctactttttttctttgtcttgggaagaaggtatatatacatacttcaacttggttaactggttgtctgtctagtttcttgatatactcctacattttatgtggattttataagataattatgttttattaatttactatcattctctggtaacataattatgttttaattagacgtgtgaattattaatataaaattttgaattaaaaaataatataataatagtacaaaatagattgtccaaaacaattcaatataatactgccccaaatataatattaactatatgacaattttatacttgttattttattggtttggatgggaatggaaatcttttacttataccatgagtttcgaataatggccattgaaccccagagaagagaaagtggtgggcctcgtgttcctttagtaggttagggcaggggcattatgggactttcctcacctagttgaaattccaccactgatctctctaattttcctccctcaaacttgtaataatttgcaaaattccccttaaatatatttctattttccaccactgatctctctattgcatgccaaatcatgttttatagtcaagaaaagtatggttgtgacttgtgagtagtcgcaatctttgtacgtactacgtatagctagcttgttattttttgaaatatatatatgttttgtgtgtaattttcttatttatttacgtatatatttgctatatatatagtggcttaggtgagttgccccaggaaataatcacttataataaacttattttttacttgttattctctcaatgtatatttatacatatgtgtagggaatccatccaaaagaaatagaataaaacaaaagagcacgcatgagaaaatatacgaaatatataccaaaatgatcttttataaatcgctagtttttgtccgatgaattttatcttacgtaaacgaataatatcgtgaataagacaataaactaatcaacgtttaatatgtaattatattaaagttagtggcagtggacacaaatatcccatgcatgcattaattaataatgtatcattaaaaaagtgggaaaaattagaggcttaataaaggtgtctattttggaagttaataatgaacattttaatagcatggctagtggtaattaatggcaaatatattcatgtatttcttttttccttcttaatcatttttttctttttgagtttctttattccttttaattattttctgctgatatatataaataaggcaaataaagaagtctagctatatggaagataaaacaagcgaagggacagatcgaacaaaacatatgaagtgagactatatatatttatatatgcaaatcccatgctgacctctacaaaaacaagcattacaaaacacataatatataatggaccccttttttaaccttttctgtcatatatatatatatatacattttattttatgatatgcatatgcaatgcaatatacaatacatttttttttaattaaatttatttatattgttgttgtcttattctcactataatgggtacaacgtggagcctcatcaaccaaaaaatgaatcgtcgaccaacattatgcatgccgtgagaaaataaataaataaagaaagaaaagaaaagaaaaggaaatattctcttttaaaaaaaagtacgataaagaaactaaagaagaaaaaccatagcttagcttaatggacaaactaagaatcatatcaacgtgttgatggggggcttcttaataatattgaccttgacaacacaataacagaatttttatatgaataaaaatttaatatatttatatatatatatatggaagtggcaagaccactatatagtattgtttttcaaaattaaacaaattaatataataagctgatctgggatgtatattaattgaagaatttgtgagcgtggggattttgtcttattatatattttcaattgtcatggtttgattttgttcagaaaaagtgaccaaacaatataccatgggcatgaggtaataaattttgatcaaaggaaagaattaatggtattgctaattaattaagattaaggtgacgtatatatataatatacttggttggttccggcattgattctaagcaataacgtacgctagctgccatgtttcagagaatatatattattgtttgcagtactagaaagaaaactgatactatagttaaattattaattaatatttatcatcagccaattacaaaacaaataaacaatattataatctggatatatatatattctttgatatttttaccaagtctttcacatgacgccatgccatatatacaaatatatatatatatatatatatataaatgtttcctttgatgatagatttaaagcattaactctttctacattcgataacattcacaaaattctttgatagaaattaagctacaaagtttaaggagagttaataaccaaaataacaataatggtttatcgatcgtaccagtttataaaaaacaacaatatataaattatagtacgtagtaattagatcaatagtgaatcaatggctcaaaaagaattatgggactcatctattctcagttaatggtacaataggaggttgtgaaaaatgagtgggactttaaagccatttaccaatttccattaattttctcatccctacactccaaaatgcacatagactcgtagtcataaattgtctaagaaataaggcactgtaaaaaaaaaactaaaaaaaaattctaattataataaagtgattttataatacactctcttaaaaaggagcgcactaattgatgtattcttacttatccggcatttagaaaaaagaaattattttaatttttttatatttatttacgttatagttatttaagatatcctacaaaattttgagaaattcggaataatttacaatataataaaagcggattcaaataatttattttacatgcgtataaaataaaatagtcacgagtgcaataaaatttttgaatattattttcggtgtgttacttttttccaataagatatcttaaatagttataacgtacatgaccataagaaaaaatttaactaaaaaattattttaaatgctaaaacaaataaagatatattaataaatcttaaaaaaatttaagttaaaaaattttaagggagtgaattgtagaattttctatttaagttttgcttgaaattttgatggttgattttgggtatatgagatgtggacgggaaggtggtttgcaattggtggttacaatttgtggggtatgactcttcttaaaaagagaaagaaataaaatatatattgtggggggttattctttcatgaactgagtcagactcataccacaaatttgatataaaatctcttttatatttattttcttaattagaagtgttgtagggttccactccactacttgcttgctcttcacctaataataatagtaataattgataataaaattagtaataaatggtttctgttaacactctttgtcctctattgactttacaaaaaagaaagtactgatatcctccaattacttcactcacttatatttgtagggcaaaaaaagtagaaaggtcagacctattatttaatatggcaaaactaaatagagaaaaatgatgtttaaaaagttatcctaaataatgatatgtgccagacataatgaatcaaagccccatactaattaattatttggcaagaaaatttgaagacttatataattaagttgccaattaattttttttatgagatgccactttttctacacaaaactgaatttctgaaaagtaaataagtttatctgaattaatatatgtatataaaaacatttgcatgtaaagttagaaaagtatctgcatatgaacctgatcttactaggaatgaaaaaattattaaaagaaaacctaaaatagcattgcgttttagttggggtattgaatttagtgtaggctacagaggttttaataattacttggatgtttaaacttgtaagttattagctatctagtgtattgttctttcacctatttaaacgcacattcatataatgtagagaaacagtaaaaggcatgtttagcacacttgtgagatttaatattgctaattttggtttaatttaatattgtgtctcacttgttttatttttaataaatattagaaaaaaattactaatcaattatagagcatcatttcatcataatgtgctagacatattttatagagccatattttattgtgcgtaataatgctctataatgtatggtggggtagggtggaattactttttagcaaataaaattttattttcaacattaatttttaaaatttattgctctaaatatttgtaaaatattattcattgctcttaatatattttattaattattttgaattttaattttttttatatatattaatatatatattatatgtttgaaatatattaaaatataaaaataaaaaaaaaataaaagtggagttttgataatgcatattttaatgaatagaataaataaattgataagagtctctaaggtgagaaccactagaatatttttattttatttacttttaattattttttaattttatactctctttgttttttaaggttttatataaatacttttttctttacatttttacataaaaaatagtattttatgttaattttttatatattattttttaaaaatctcttaatctccagacactaagagcttgtttggctgtgttttcagttttcagtttttaatattgcatttttaaaagtgagaatagaaaactgttttttgtcattttaaaaatttaatggtgtttggcacaaatttttaaaa

SEQ ID NO: 113239 - DNA, 4101 bp, Cannabis sativa
  modified_base (725)..(727): a, c, t, g, unknown or other
  modified_base (823)..(827): a, c, t, g, unknown or other
ggggaaaacaaaaaaaatgtcatacataacaaattatgttaagtataagtttagggaaaaaattataaggtaatgtaagcatattaattcaaatttcccactcctaattcatttttttattaagtagtgtctattgattggaatgctccgatcggaagagtaaatataaatacattatgcttttttcaaaagaaaaaaaaatataaatttttatacatataaagagaaatattaaaataatttttcgaaagtattatattactattaatataattaagtatcaagtctctcgtataatttaatataaaattttttaaacaatattattaacaaattgtaaaatattatctttaagtggtgttagatacaatagtacccaataacaatattaatctatagactttggtaattattatttatgtaaatatccaatacgaacttctattctatctaccataaattttatactaaggaaagccaagtgttaggtagaattggttggttggtgacttggtattagatagtttcggtttacaatcaacgttaagagaatttttcaaagcaatttatattttttaatgtattgaaagctctcattgcatttataatttaggaaaattctataatgtattcccttaaaaggaatacaccgatatatttctatccgttttagtatctaaaataattctttagtaaaattttttctcatggtcatgtaaattatnnntatttaagacatcctacaaaatttgaagaaattcagaaaagtttaacacgctgaaaactgcattcaaacagtatgttgcacgcgtgactattttannnnntacgcgtgtaaaatagattgtttaaacattattttttatattgtaaattattctaaatttcttaaaattttgtaaaatatcttaaatagctataatgttatgaatatgaagaaaaaaaattagactaatttttttttctaagatgccgaaacaagtagagggtacatcagtacattctttttaaagaggtatattgtagaatcatcctataatttatatatttaattataattagttcgttcaaagcaatttatttatttaatttttattcattaaaaaatatatcataaaataaatatatgaaatactaaagatataaataaaacaccaaaatatatataaaaaaaaatgttttgaagtgtaaaaataaaaaaatcccaaattattatttagtgacaatcaataaaagtatatatatatgtgaaaatttttaattattgtgaaaaatcaaactaatttaaaatgaattaataaacaattagcaatgacaaaattaaccaaacatagtttaagaattggaagaataacaaagtataacagagacgataaaaccacaaataaacaatgcaagaaaactgtaaaatcaacaccaagaattatcctggttcaagttcgatagattgatgtgatctatggctctactttagttttggaacacaatcgaaacttcctttattgatagagtaaaaacacatgtacaatacagttgagagcgattctctatttagattctctcaaggtattttctctctaacgctcttccttaagaagtttcttcatctacagtagcttctcctttacaaaactcaaacccaatcatctattttctcagtacctctccctctacctctcaatcaaaactctctctcaaagaacttgcgtactttgcttccaaagaaatcccaaaggtggtgaattcaaacaactaagtagttaatttgattaagacttaaccgacttaactgactccttacaatgagatctccaagtcagctcttggcatcgagctcttttcagacatgtatcacgcttccaggacggacatcccaaactcatgaagcgcaatttagaaggacgtcccagataggcacaaagcctactggaacagactatccataaccccttcctataggaaacaactagccttccaaaactactttttggaggatgactagcttttcacaagacttatttcgaatggacaaggtagcctttcaaaactcatttttagatgacggcaaaatttccacaagacttctttcggatggacaaggtagccttctggaactcctttccagatgacaactagctttcctgaagactcgacttgtgaccttttcatttggaggaactataccacaaattctacctagttcctttaaattaaaagccatggtgatgaagaaagtatgtatccatcatggttggtgttctagctatctcagtgtgctaattttttagattgatcaagtttaggtaatgctagaacttattaactgttaggaccatagtcccaacatcagatggattatcttctgatctgaccttctctaattcaaccagtccttcttctattttttctctaatctaatagagccttatgtctatatgcttgctctttttcatgataacctgagttcttgtaaagatggatggatagatgactagctatccgagtacacaattactcctctttttatctatttcagttcatggaaaatccctcgaagcgataatacttccttgaatgcttctaaggtagccataaactctacttctattgtggaaagggaaaccacgaattgtaactcggctttctagcaaatacagttccagtttgtcatgaacatgtgtcatgtaggttgtggctaatcttcaggtatctctattcgatgcataatcaacatccacgaaccctttgaattctagtttttctttatcttcctcataggtcagaccataatcccatatgcctttaagtaccttaataaccatttgaaggcatttcaatattcaatgttcggattggacatgaaccgacttaggattcttagagcatgagcaatgttcggtctggtgctcaccattacatacattaagcatcctaacaccactgcataaggtacatctttcatttcctctaactctttagcactagtagtacattgttcttttgacaggacgaactgtctacccaatggtatggatgtactctttgcatcttccatgttgaacttttgtatagctttcttgatgtatctagattgcttcaagctcattgttcctttcttcttgttccttagaactttaataccaaggatcttctgaaccggtcctacctctttcatctcaaattctctcttgagtttggatttgatatactcttgatcactgattggtctttgctcatgatgagcatgtcatccacaaagagcagtaagaacacggctgtagatgactttagattttcatagtataaacagtgatcataggcaaatgatgtgaacccaattttttgtatgtaggtatcaaaccttttattctattatcttggagattattttaagccatataaggacctattgagcttgcataccaattcaacttgttgacgcggtttttcatcaaaggatataagaacatcgtaatcaagcaagatgaacacaagcaatagttaatcaaagtaaaaaaatttgtgaaagaaaatttgacgaagatcatgagattttttataattgttcaccccctttcagcagtaataggctagtcatcttagagtgttattgatctccatgcttgaggagagttctccaaagttatgttctttaagagttcaatcctcaagtgagtttttagaatgatagagtgggagctcaagagaattatttcatgagaatcaaaatcgaggtccctttacaagtgacttcactctccttatataggttttcaacaagaatttaagatctcttaacctaagaaacacctaaatatggttgggctaggttttaaatacaaaatcacatttcaaaataaatatctttaaaaaaagataaaaattccacatgttgacatatttctatcacgggtaacacatgtttaggccatgttgttggtaggtcacgagaagcacgagctgctaaggtgaggaccttcccttggacattgatgacaagcatgctaaagccctccttgggccgatgtgatggatatgtgaggccccctgggccgaggctgttgggttttatgccctaaataaaactctgtttcaatgtaa

SEQ ID NO: 113240 - DNA, 6984 bp, Cannabis sativa
  modified_base (6676)..(6679): a, c, t, g, unknown or other
  modified_base (6775)..(6797): a, c, t, g, unknown or other
  modified_base (6898)..(6902): a, c, t, g, unknown or other
aaacaataaagttgtcatatattagaaatattggtaagtataaatttagggaaatttttttaaggtaatgtaagcataaaaatttaaatttcccttttcaatatgttttggtatttttaagtatagaacaaaaatagcaattttacaaagtaaaacaaatgtgggtatgacatttgagtatcgtcttttattttggcttaattgttgatgattgtacttttggcttgtctaactgatgcatttatttgtcttgctaaacgatatgcaaaaaaatatttctagctatatagcgagagcatcttattttcattcaagatttattagtgtggagactactcctctctctgagatgtgagctctggtattgaataatatctttatttaataaaagcatcttgttattaaaagaaatgtgattttaaaacaatttaaaatatatctatatttctattatatttatgcaaacttaaaagctttttggaaaaattatactatagcagtaccatttttttcctataacaagtggtaattctatgacggttagaaatcctattatccgtaagaagaaagatgagataagttatgcaattccacgtctcctgacaaaggttaagtgtgatgatattaagaattagtttatattggactacacaattgaacagagcttaaataaattgatgggtattacctatattaacaagatgtatcttcttttcggtagcccatcacttgagaaatctaaagataaacgtgtttgacctagaacaatcttagtatgggtgacctcatgagaaattttctcaagaaatgtgtaagtgaggaaaaagcatgctggaaagactcatgttagtttgtagggtcaatcattccacaaagcagccaaagtgacgtacccgtgtatactatgtaggtatggaactacacaaatgaagtggggacattacaaatagtattagagtttgacccaactagaagtgtggtcgaggagaacgttgaaccccataagagggtaattgtgacagttagaaatctcgttatctgtaagggaaaagactgggtaagttgtacaatcgtatatcgccttaagaaggtcaagtatgatgattttaagattgtacaggtatgggactacactgtttaaaagagcttagatgaattgatggatactacctatatcaacaagatgcatcttttttcagtagcccgtcaattaagaactttcaaaattaagcatgttgacctggagcaatcttcagatgggtgacctcttgagaaatttttctaggaaatgtgcgagcaatgacaaaacatgttggaaagactcgtgttagtttgcagggctagtcgtcattctaggtagcagccaaaatcacgtacctgtatatattagtatgggactacacagctgaaacgtgggcattacaatttctattttcaacacttaaaaaaaatattatatctctaattttcttttgtgtagaatgtagttacagtggagaatttatttattttacaaaaatttagaataatttattctaaaaaaaaaagagttcaaacatttaattacacatatatttttatatatatgcaattgattattttaaattttgtttttaatattataaattattttaaatttgctaaaaataagtgaagacctaatataactataatgtatctcgacatataaaaaatagtgttagaattatttataatattgtacgtgacactccttttataattgctctcactttttttttttagaaaaaaaaaatataatatttcaattgatgaaacacacatattttttttttattaacatggatggaacacacatattattagaaaagtttgggttaccatgcttaattataaagcatggatccaaattaatcgatccattaaacacataattcaaatatgttattattctacctaaatcaaaaaaatactccttattttaatttccttcattctctctcatcttcctctcattctctctgccccctctcccatataagaccacctaaactcaccaccaccactcacctctcattcttttgctctttgtttgggcgattcccaaactataagtatatagtttatttttaacagatctacacatttgtgctagtgttttgttgtttttttgcccaaaaatttgattttagaattttttacatcttctacatttttttccaacttttgtgataatttacaatatttaattagcgatgaatttgtaaatagaccaaatttgaggctagaaatgaagtttagcgatgcttttgtaatttatttccaatacgaaactagacaatgcaaagcacatcacataatatcgtgaaaacctgagtgtgatttagtgatgtttagcaacatgtttcatttttagtctcataacacaaatacattgcaaaatcatcactaaacattgctaaattcgtaaacatttattattttagtcaaacatctcaaaacatcgctaaaattaattcctaacttcagatatagtctatcattgtatatatatcactaaatctcataaattatcgcaaaagactagactactagaaaaaaaaaaaaacatagaaaatgcaaaaaaatcaaaatctaatctttgggcaaaaattcaacaaaatataaacacaaatgtgtcgatctgttaaaaacaaattatatacattagtttaggaattgctcaaatagggagtaatagaatgagaggtgcacggtggtaagcggagcgcggtggtaagtttaggtagtcttttacaagagggagagagaatgagagaaacaggaagagaagaaagaattgaagaagttgaaatgaaagaagttgaaatgaaaggagtatttttaggttttgatgaaataataatatatttgtattaatatgtttaatgagtggattaactagagtgatactttacatctaagcatgtaactcaaatttcactattatattatatcaaattatcaatgtcctaagtaatgtaagcatatctctctccgcacactaagaacaattttgatcaaagcaccgcgttttttttaatgacaagatagtgggttcgtactattaaaatattcaagcgtagaaactagaatgtcactatataaataatatatattatcttccaatataaaaatatatacattttttttcaaaaaattaaaagtctttgtaaagaaacgttttatgacatatatgagaagcaggtgtcatccctcagctgtttttggtctcaactcaaacattcattcccactttttgttcgtattcatattcattatatgtctgcaccactcctttccttcctttcttgaactagtcttagtccactccacgcctgccttctagttcttccctcttgttcatattctatttcttatcagtcaccacaattcgaaaatgtcttcctctcttttaatttatcagaactaggaaggaagaattgattattagaatttattgtatttgaatagagagggggagaggagaaggcccgttggagaggcagagatgattgaaaggacacatgttattgtgggcatagtttgctttggtattttcttaacccttttcatcttgatattatggcgaaggtatttccataaaagtaacaaggaaagtcttgatttaacaaccagaacagatagacttcaatctgggatcgtcaggctacaccaacaagaggattttcatcatcaatttgaatttgatagcaaaagaactggaaattattacatgtttcgacgagggatttctgggaaacctctgtttagttggtctgattatccatctttgatcactgatgccgttgaaaatggatggtcaagattcgctttcacaggttatatgtcttctccttcgactagatcaaggatattggggttgtgcacggttggtgatctcaaaagagaagtagagcccgaaacgagttgggaaatatgtcaggaatcggccgattttatgcagaaaataaggctaaatcctgggatgacaaaatcttatttgaacgcaagcaaaccatctatggcggctgcctctgtgatcagaacagctctgcctttaccgggtcctcctttggggaactcctctttccctcaagaggcttatttcgagatcaccatcttactttgtcgaagcagtgatgatgaaatccagtccattgaaaaagtcaaagaaggtgagaagaccaaactcatacaagaaaattctaacgctaataaagcaacttcggaatcgctactccatgttagcagtactaacagagttaacaagattgaggacttgaagcttggcggtgttagagatgacggaatagtaggtagtgacgccgttatgttgtctgttggtctcaccgccggtggttctcttcctttgaaactccccggaagctattctggaagcattggcttcaactctgacggttctgtctacgttgacggtaattcattaataccctttcccttttttcttgtggaaatttcttagctttgaatgctgtgttataatattgagaaaaaaaaaaaaactcaatcctagtctatggtttctaagtttgtggaccaagccaatagacttttactaaatcaatattaacatatggagattaataaggaaaaaggaaatgttgaaacttgtacaatgaaattaattagtcttttggtccaccaacattaaaaatatcccaacataagtaacagtgggcattttcttaaaaaaaaatcaggtataaaactggcgtttgaatcagacaaagctgaatggggaagagtagacaaggtaatcggatgtgggtttgatcctagacagaagaaagtatacttcaccgttgattccgaggtaatccacctaattcattgcaaatcagaagagtttgggggtcccctatatccgactatagctgcaaacggtgacgttttggttctagtcaactttggacaaagtgtgtttaaatatgggccagccaatgcccaacggacacccaacccatgtttcgttggctcagtagtgaattcgcctgcggcggccataggctacgaagacagtaaagagctcttctcaatgggaagaatcgactcgcagtggcttaatcggtatacccctcgaggtaccccgaattcagctgggaatccgaacagggctctggatttcgacgaggagtctgaggcggacttgtttgaaatcgtcttggatagttgcggaaggtccccaaacctagtgtcgtagatacataaaatcatgtcgtttaacaaataatatcccaaggtgagcttttcattttatttaattacaaacagtcctttacctactaatctcagctcaattttacacgaaatagacaaagcttcatagttcatagacatacacactgttcactcaatcagtaatgaatgcaataaggcatacaatatgcacttttctcatcatatgcagttattcttttctctttcctttccctatgtatttgcaataaatttagtttgttacactttatcacgacaactcaaaagttaaaataggataaataaaaatatggcatgcaaagatgtaagataataaataataaataaataaaggagaaattgaaataagtccttacttaatattggtgccaaatcttttatttgatagagtcaaagagtgagacaacggtgatcgtgccaaaaaggatgtttaatttgatggactgcatgtttttgggcgtacaaggtttgactcttaaaatagtcgcaaaacctctaaacaccgagacaccccatatatatttgtgtgtgtgttcaagacaagtgcatgcatcaataccaactctcatgtatgtgatcattgcaacaaaaatattatataaaacacacctaatccacatccatatacgcaacaaaccaaacaaaacacatttgacaactactaatattgatctcccattatgtcactttcattgcggttagtttgttacatctcaaattcaactagtcattttcgtaattagagaactatcattattgtattggtgatgaacttaattaacattagataataatgtttctatcctaaattttaactaatttttatcgtatagtcttttgctccgttaattattaccacttgtaaatgttgtatcttcttaattttttttgtacgtgtaaaaagtttttagttaatattaaatttgacttaacagattaggagttagtgagatttagaaagatagtgttgtacttagtctacttgtagttggtttaattttcggttacagttttagttattttataacttgttagtagctgctagtgtaaaaagcatatctatagtaattcatacattaattcaataagagaattctcattcttttaatcttcttttgcacttatcaaattaagatggtatcagagccataatgctactcgttgctacatgaattgtaagatgaagaagggtgtccatgtacgatctcatgtattgcacatgattgagctaatgcatgaggcaaagacacatggggctatcattgacgacaagactaaagtgtctatgatctttgagtcactttctccttgcttcaaggctttcaccacacactatgtgatgaataaactagagttcaatttagaatctatagtggcgcaaggagaaattactaagggaatttacttggtaaattcnnnntctacttattagaagctcggttgtataggcccatggtctcctcactagttgagataatactgcttgaaaatccagttaattggttttaattaatcnnnnnnnnnnnnnnnnnnnnnnnatgtcttatttatgaattttcactcagcaaggggcttatttatgaattttcactcatcatggactttgtattctaattaataaataatataaatgataatnnnnnttgataattaattataattataaatacttttggtatttataagtttgaaattagaaaatatggtattattgaaagaagaata

SEQ ID NO: 113241 - DNA, 5152 bp, Cannabis sativa
  modified_base (70)..(71): a, c, t, g, unknown or other
  modified_base (1044)..(1045): a, c, t, g, unknown or other
taaggctaaataaaaaaaggaatcgttaaaccaagaatcgttaaaccaagaattgccgttagataggcanntttaatatataaagatatttctttcctattcttattctttttttgtttttttcttattcttattcttattttttgaatgtttgttttgtgctgtcttattatccgataacattaattagttaaaaaatataatctaatcaaatgtatagtatttcgttaactataaataataattaattaccagataagacaggttgaacaccattaagaacaagagtgacagctaagaaaggacagagatcagagacagcctcggccaccgtgtcaccgccggtaaaagcatagctgatgacgtggcgaagcgagagcactaagatggcttccgccaccgctatcaggaatgatatcaaattcactactgttactgcgaacgctgctgattttgcatttccagctcctaattcattgctcacccttacactatatatattcattttatgtcttaattattaaatactctttcaacaacagattatataaactataataatttaatgctgctgtaatgtaatccataataaaaaaaatattataaacgactaacctcgcagctgcgttgaagccgacagaaaccatgaacactaagccgtttatggccatgcttcaaaaacaaagaaaaccatccatgcatgaacacttaataattagaataatttatttatttatttgtcaaattcttacatcacaaatagaaaaatatatatatttattatacattaattgttgaattgaatctaatttttgaacacacggaatcaattttccggaagatggtaatcaaatgggaatcgttacttttatttttgcgaatttacttttactgtgtgtatttattatatatgggaataataataaagcaattaatatatatgttgatgtctactgtgtatgttatctgggatcgattcacatgcgctctatttttgtctttatcaaaaacgaaaactcgatcagatatatatatatatatatnnatatatatatataaataagtaatttaagtagaaaataaaagatatttctttttgagtttctaattctctaataattaatattattatttatatatgtaaaaatataacgctgcagtcactccatatatagtatatgatatttttcatgacttatattcttattagtaaataagacaatacattatatggtgaagaatccggaatataaatatttatataaatctagacacataaaagtagatcagtcattctcatgaacatgcttcccactacaatatattaattattttatatttttatatacaattttcccaatcgacgtaatcgtatacaattctgattttgctgcctttagttttgcataactactcaaattatcaatatatattactattattatataatcattttgttacaagaatgtgtgtatactactaaattctataaaaggacaagaatatctcgtttcagaaaaaaaaaatattagctactttattagttcggtaaaattaaacaagtactgcttatcattaatatatggaacaacatttttattttttctaaaaggatcattaatacatgtaatttgagtgtataattatgtgtattgataggaagtcttaatcctatgaaaattatatcaactattccacttgagtttatgttgagtctgttatataaattagtcattttaccagaaaaaagaatatcagtgtcaatttgtagaatctctatattgttaggattcagacaaaagggcccgactaaggcatacattttttttattattattattaataatgcactgtcgtcttttcaatattataatattgattgcagtaaaaataaaataagaaaacgataaagagaaaaataaagaattgatttgaccttgctacgtaccatatgtatgcgagaaaattaaatttatcaataagagtaacattttcaattattgaagatataaattataattaagtataggtagaaaagaaataataaaaattaaactcaaattcttacttcattagatgataataactcaatcattttctttacactcattagataaaaatttcattgtcttatatagttatcttcattgcggtatgaccacatacatgatatgtcaaaatttggtacgcgttgattgaaggccaacatttttattttaattctaatttttcaaaggaaaggccaccatattaaatgtgcaataatttgctcataaagaatgccagtagaaaaaaaaaaaaagtataatttaaaagcacaataagtgtgtatagataatagatcaaaagtgagagaccatgcagaagtccaagtcttttggacaataattttctcttacctaattctccatatgtaaggcatctctaattatattctttattttattttagctaaaacaactaaaatattaaaataatttttattattatttaattattttaataatattttaattttaatttatcaaatataattaattttataaaataatgaaaatactattaaaaaaatttatctacaaagctttttatttaatttttattatagagagctattaaagagacatgttctaactaactactcacctatgcgttttttttttttttaattttttttcttttcacaattgaaatataacaattaattcatatatcagcattgtaatttttcttttttaatgaaaaataataaaatataaatatacttaccaaacggcgatagaatccaaagcaagctgagggttatctagtaagccagtgatgagaaccaaaacctgaaaataccatgtctccaaacaaagcatcaccgccgaagcacctgacaacttgaaaaactcccacagcccagaaaacgcctctacactaaacccattccacgtcatcttacatttatcgcttaccaaaatgtaaccgaattgggccccaacgatgatccaccacgacaacgacaaaaccagagaaattccaataagcccaaagcccaattcgaaggccacggcccaacaagccaccaagtggaaaatcaacgtgaccgccgatatatacgcactgggagtgacgatgctctgagattggagaaacttctgtatcggaaagttgactgcgtaagcgaagatttgtggtattaatccgtacacgaagagagccgcggcggaagccagctcaagcggctcgccaagccaaagcaagagcggttttgataaaacgtaaacgatagttaagggaagaccagttatggtgagaactacagtggctctttgtagatatatcccaagcatatcgtatcttttggccccatatgcttgaccgcataacgtttccaccgcgcttcccatccctaactgtaaatatttattaataataataaaattatataattttataaataaatataattaatattttttttaaatatatgtatatatatatatatataccatgaggccataggcgaagagttggatgccgctgttgccgagggaggaggcggcgagctcgaggttaccgaggtggccggcgtaaatccgagtggagagtgacatggaattattgattaaatagacgaagattgcgggagcagctaagcggaagaggagtttgaattcgatacaggaggcttgccagagacgattggtgagaggcagttcggtgtctgaaagtattttctcgagacgagaatccgacgagtgtgctgatgctgatggtgtaatatgatcagcttgttctatggaacttattagcaaaggagaagtattagtatcgtcatggttttctactgctaattcctcttgattctgatgatgagaacccataatgttgttaatttgggtcgcagaagtggccacagatacaatagaaataaaagaatgaaattaggtgttttgaagtattatatatatttataaagagagagagagagagagagagagagaaagtgagagtactgtaatggaatcagcagtaaattataatatagaatttacaatttcaaaaatacctcctattgggttgtttagaatatataaaagtccataattacttaactataataattcagtaattttttcataaataaagattagagcattgctattcctgtttggcattttaaagtaatgcctttataattaattaaggataatcagatattgaaaccatcacgagaatagcaccatcacactgctattcttgtagtgtttgacaccaagtgcccatttacatttctttaaaactcattcaataattaataattattgcactttttaaagtcaaaacttattgccagaaaaagatcagagactgaattgatcaaaaaatagttatatatatataatatatgaacatgtacttaaattacattttatgctaaaaattatataattattcaaattaaaatatgttaattttagtataagatgtcacatatattaatcattattttttgaaaggaagtcacatacattaatttaaaataaaacaattggccttacaaaaaaaaaatacaacaattggaaatggatttatttattgtatataaatgggataataaattaatgcaatgaaaataaaatgtgcaaatctgttagggtggtgtggtatccgtgtgtggttaataataataataaattaatcataaatgtgttccatagattgattttattttcatgtggcactactttagtcatttgaaaaaaaatcaacgtggctagcttaaaatatgagaatactaaaggcatcactctctatgatgtaatattatagtattgctaggtatttgtgtaattaaatattaaattacatataataattttaaagaatattactaagtaattttaaagtaacacttctactaattattactagtacttaataataatgctgtttaaaagtaaagcaatatagcaagggaatagaagacttactcaaataaataattacttgagcaacaaatgataactcgctaatagaatactaaatattatatccaaatcaacaaaaagtgaggaatcgtagcagagaggccatgaatcacggcatagaagctgaaagatcaaagagaatagatgaggcaataattcaatagcaatatagg

SEQ ID NO: 113242 - DNA, 5892 bp, Cannabis sativa
catacaaagacttagcaaatattcttacaagttatctgatctacgtgtccctgttcgattggcccacgtatattgggtgaaattaggggcaacaaaaatataccaaaataagaaaaaaaaatcaaaacatattttattttaaatatgctaaaataagaaaaaagaatatttttttctatttatatatatttttttaatcaaatcaagatatattttgaacattataaacttatacatacatgtaaactaataatttatctttttatgaacaatgcttacacaaaatattctgtttctactactgaatacctctacacttcaaacaaatattcattctcatcaaatagttgatgtgcatgcaaaaaataaaaacaacaacaactatatatatgtcaataaaagtttttagttgctctaattatttttcctaccactagaagaggaacatttcttaaatatataaaagagcttaataggaaatctatttatatatagtgttatagtgtgaattttttgcctagaaactcgagatcgtgctcctataaaaattaacacgtggaatcacatccctagaggattgatgagctctcaagaagggactcctcgaaaattaaccttacctaaactaaactcgcgagatgatgtgaccaagacagagtctagtctcatcattacacttcgtgtaatataaaattagcaggatcaagaagggtttatacaagtcgtgcatatactgagatatatgcaatgactaagtagccttctcctgtgaccaagtaaagatcgcttctttatataatgaattagtccgaatgacaaagcgtattcgatgactcgatagggactcgcatgtcccatgttgtcgacgcatatgaggtgtccatatatgcgactcagtcagaacgtagacgccttaacatgaggctcattagtcctccttagaaagatagaacgcacccaaggcctgggagtttgtgtgagaatatgaataggcaactgataccctagaggtcacttacgttgctatatttattaaaatagatttaaattgttcttcatttattctttttcgtttattctcatttaatgttgatattaattgtaaaacggttctataaccgattagctctgtgtaacataaaggacatttgctttgtatataaaggagtgatccaacatcgataaactaaacagaaaattctttgtaacagtggactaagcagaccgtgatctgactaaccactatacatctttgtgttcattatatttttccatttttgttctattgtgtgggtagtctcgttcgaatactcgctgttctaagttgagtactcgttattttttctattaaatatttatcatttttatattatttggtattgtccaaattcctccaacaatattggtgccgtttgtgagaaccatcttagcgattttggaggaaaatcatcatagctaccaactagacgaatggaaacagcaccacgggatcctttaatgttggaaccatgaatgttccactcccgggggatggaacaaatctaactgacacaatcatgggaggtgtgggacgaactaatgtcacccctcaacctattcctagaaactgccggtcatattggggaaacattgacaccaacagcgacagtgggtcacttcccacctaccacgcgggtagtagtctctgaaggcattgtccaacttacaacaccatagtacattgccgtgcaggaacagaagcgggctctgcaaggcgaggtcgatgggagaggccaagtcaggacccgacgtccaccccgggtctctaacccacgtttaggcaatccttaggtaaccactacagctagatgtcgtactgaacgtcctaataatgctcgtactagtagggaacatgtaactggacagggaagccttgatctgaatcaacctacacgcgactcgcgtgaaatagaaagctagttgcccctaacgccagtcgtcacactgaaagaagagagagaccacaagaggaggatcctaaacgatggaacccgctaagtcgggcccaactgcgagtagaggtaaacaaagtcgaatctcattcttcttctactaatagtcgctctcctagtatctataccaggtcaggatccgtcgagactcaatgagggggtaggtaccatgtgcccaggggtgatcttcgcgatcatctcaatgagattttcagagcgagatctcaaacccaaggaattgcgatgataacaaggagccccgtgatccccatatggtcaatcaaggcacgcagaatataaaccacctgactaatctagtcaacctgtcgatcgcactagttgcgaccaccgaagtagtgatccctaccaatatagcagtagttgctgccataccagtagtgactcaagccaatcacatgttactaggaagtattgaccaagaaagcctcttgtgggcactaaggatgatcgagcagtagagaaagcccatttacaaacttcatgggacgtcgccctttacaaaataagtgcgataagcaaggctcccaaaaggctttagactatctaaatccctcaaatacaaaggtactactaacccaatcgattatttagataaattgaacatgattatcaaaataggccaggtaccacaattatcaaaatgttgaatactcgctatgactctacaggataatgctcatgattggtttagccaattacctgaggcatcgatatcaacctgggaaacctttgtagacctattattaacgcagttccaagccatgttgacatacaaactgtcatacacaatgttggccaatattaaacaggaagtcgatgagtctttataagattattttaaacgttttaatgctgagataacaaaggtcgagaaggcccccgagtctttgttggtctgtatgttgattacaggtgtcctaccaagaaccaacttttggaaagaattgcaagggcgaagacccgagtcgttggtggaattcttcgctatggaagaaccacataaaagaattgagaattcttggccgagttggaaagaggaaaggagaagcgcgagtctcctgtgccaagattgcgttcctgaagccccaaaggaaagaattccagcggtcgaaaccccagaagacgcagtccatctagtcgacgaagtccaaagcacgccaaatcccccactaaaaaagaaacatccccaaaaaggaaaaggggcccacgttttgtcaattacaccgagttttctattcctcgcgaccatatctatgccattgaggaataaaatggcatttttaggaaattgcctttgatccggggtaatcgtcataagagggaccctaagaaattttgtaagtatcacaaagatattggtcatacaactctagagtgttggttcctttaggacgaaattgaggagttcatcaaacaagaaaaatttggtcaatataagaagaatggagagaatcatccctgagcggatgataacaacaaaacaaatgatgcgactggttctcaagccccttacaatattttaactatcataggaagaccacatgttggtggagactttaggaaagtgcatgagcgctacataaaggaagctaaagaaaaacccctcctaaatgtaactaacctgagtgaacgactagaaaagttattttaaaaagaatacgatgacattaccttcatggagagcgatgcaaggtgggtgcatcacccacatgccgataccttagtggtagtcgctaacattggaggggataatgtacaccgcattctggtcgataatgggagtcaagtcaatctcttaaatttacgggcttttaaatagatggggttgaatgaaaaagacttgcgactagtgatgtcgagcatctatggcctcactagagatacaatcgaactgaagggaatgataaagttaccaataactttagaaacaacacccgttactgccaaatccatggctgattttgtagtaatcaatcaacattcggcctataatgcagtgataggtcatccaattctgaaagagatgaagatagttacttcaatctaccatctcaccatgaaattccccacccccacgggtgtgggatcagtgcgaggagtcgaggaggattcaagagaatgttataatactgcgttaaaaatcgcagaaaagaagaagtcagtaaatgttatttatttgctcaaggctcctctccttcgacatgaattttttagaatcgaagaaataccgcatactgagaaaccagacctagatcctaggatccttgactacaccaacattgcgcaagccgcagaagaaacaatcgatgtacctatcgattcttcttataattcaaaagtattcaaaattagttctaaattgacttttcagtagcaagaaaggcttgtcacttttctcaaacaaaatctggatgtttttgcggggaaacattcagacatggtcaaaataccgcctgaggtcatgtgtcatcgcttgaacatcaaccttgatgcgcgaagagtacgacagaagcgccgtaagatggatcccgtgaggtaccaagtgcttaaggaggaagtagatcgcttactggcatgcgacttcataaaggagtcattttatccaaactggttagctaatcctgttcttgtactaaagcccaatggctcatggcacacgtgcatcgactttacagatttgaataaagcttgtccaaggacaactttcctttacctagcattgaccagcttgttgatgccaccgcaggtcatgaactccttagttttatggatgcgtactcgagatacaatcaaattccgatgtacgaactagaccaggagcatactccttcatcactgatcaaagtttgaactattataaagtaatgccttttggattgataaatgcaagtgcgacgtaccaaagattggttaacatgatgattacagatttactagggaagacaatggaaatgtatgttgcgatatgctcgtaaaatctcaacatgcgaaagactatgtcgctcacttagattctatgtttagaatcctgcgccataataaaatgcgacttaatccgttaaaatgcttttttagagtggggttaggaaaatttcttagttttatggtaaactaacgaggaatcgaggcaaacccagcaaaaataaaagccttggtggagatgcaatctcttaccaagcccaaagaagttcaaagcctaacaagcattgaaaacgcaccttgggcaactcccgatactttccaagccgatgcctagagaagtactgtcaatctacctaacagtgtccgaatacgcgattagctcggtgttaatctgtgaagaccaaggtagacaacatccagtatactatgtaagcaaacacttacttgcatgtcgagactcgctatccacaaatggagcgacttgcatttgcactagtggtcacttctcggaagttgcgaccatattttcaagcacacaacattaaagtactgacaaattatcctttacgacaagtattggccaagcccaatgcatcagggagactactcaaatggtcaattgaattaattcaattttacataagatacaaaccacgatcagttatcaaacgccaagcccttactaattttattcttgagtttctagatgaacagctggctgttataacagaagatcgaattgatccagaggtactgtcaggtgcaggttggaccttgtacgtatatggagcatcaaacagtgagggctcaagtggtgggattatattgacaagtcccaacgaattcaaagtccatgtagctttaaggtttgaattcaccacctccaataatgaagctgaatacaaagctctaatcattggattaaaactgttggattatattttaccaggatcttaga

SEQ ID NO: 113243 - DNA, 3438 bp, Cannabis sativa
  modified_base (32)..(50): a, c, t, g, unknown or other
tagaaagatcatatttagggtgtttaaacaannnnnnnnnnnnnnnnnnnaagatcctggtaaaataaaattccaataggtacaccatggagtgtactgtccgtccagtttatgaaattttctccacgtgtcactcagatggatgccaagtcaccctgtgcagaaatttggataacatttgcccccaagtgcgcgtgggaacttcttgctcgcacatggacttatacggctgctaggcaggtcgaatgggtgacatgtgttcggtcttcgaaccctatctttatccaatgttactcaataaatatttgattgcctctttgatatttagggcatttaatactttcttgatatttagacctcgattggtgtactaacagttattgtatgctgcatgatgtcgtatgtgactcctaacatatgtgatgattacacttttttggggagaaacccaaaatttgaactttggattaccaaaataccccttaagttgcatatatataatgtttcaaaaatttccttatactcttttagccattttactctaaattataccagagcataagaaactttttttcctaaaatcttcaaagatcccatagctcagagctttatttgcgtgtgccgtccaagtatacttgagagcttcaaagtcatgagtaagtattctttcttcttttcaattttctttaagtgcatccattattatttttgatatgttctgtgaaatctagattcttgaacttgttcgtcgacgattgagattaggacacattagggcatttgatttttgactttaacatacacccaagacatcttaggttctcaaatttatagtttcttcccattggtttgcttgaaactatttgaaatgacctattcagggattctaggaactttctcaggtctttgtcattaattaaacctttgatttgggaatttcattattggaatgaaattccttcctttatccttctaaattgatctggtgggcttattagacgtgtttttcccgttcaaaattacattcttttgtctggttcttacatctttgtcttccttcttttgtagatgaaccctggtgaattttggagaggtaaccaccagataggtagtgaccttcttcaacttctttaccagatcaagtctcgactccgtgcagattcatcttcattgagtgacaactcatccatctcgagctttgacgagtgggaggttacaagtgactcatccgagtccccaaatcccaaggtacaacatcatcgctatcccaactaaatcagtggataaggatataatcaattcatttgggaatttaacagaggctggaggcgttatttacctattacttcgacatataaagtccaaactgacgtccctgacacattgctagaaaggtcatcgagagcctttgaagaaacattatgcactagcagaaatttctgtcaccgtcacgaagcacactactaaactaaaccctctgcctcgacaaaaagttatggctaaaataaaagaaacctacaggaaagcttcagataatgaccaacactttgctcggctttttacgatggccggtgtgggacgagctggacctcttaaggaggatattgaagttagcactagggccattgaagtccaagagattgacaaccatggtgatattcgtgcagccacttctcataaatgcgatggaggcgaagtattagaggaagaaaaggaagaagctcctcgggtttttcccttcagaggatataatgaggctgaagagcttgtttctaagtgtggggatgtcttggttctagacctagactacgttgatgaggaagcccgtccccttagaactatggataaaaaagctccttggtgggtttctgtaatgcccttctaaattaggcaccttatcatgttttctaattactatgcaattctttgctactcaaagggtttgttggaaaacatgaataattaaaaattttgtaaatttaattaaactaaaataaataaacacaatacacattttgagatctcgtttgaaaaaattaacaaccgttttccaaaatacatttataacagaagttgtcgcctagcgacaatcaaaataaagttcgattgtccaaagatttgaacattccaggtctaaccacctcgatatgtacaatcttcatctagcccaaacttaatgttgttaaggctttactttgcctttacctacacatacaaacaatatctgttagtcaacaaactcaataagaaaagcataaacataaacacatactagattgtgactaggcacctatacacctaatcacaaccctatcctgcattcaatgtgtaccaactctcaaacattcatacgacaaagcctagaatatatttgttgatatttcaatgcaactctatatacacttcaccaatacacaaatatgctaatttgatggctactcatttccctaacatatatttgttggtatctcagtgcaactctatatatgtacacctcattggtacccttatatgttattttggtggcaactgatatgcacactaaacatgtatatatatatatgcagctattatactaatcttacctcattttcaaatttaggtgtgtcagtcaacttgagtagaaattgttgccaaacaatttatggcactaattcacaatttatataaactggtaagtgaccggctaaatcacttttaaaggaattatttgcgtgcataatctataataaattggtaacaagtttcctgccaactcatgtcccttaatcataataaaaatcaacctaaatatggtggatggcccaccatgtccactaataggtacattcaactataaggcaacaataaacgattcccaactcaaacccaacatactcaaatatcaatgatataaaagaatctggtgcactggtactaaataatattgttgggctttgtgtcctaaataaaattctattttaacgtaatcttatctattaaaatctcaataaagaaacagatttaatttcattacttatttaatgtgttattttgttaatgtgataaatttacaaaacatgaaacaatggtggaagttcatgaaatgagaagaaccttgactctcgccttcgggacaacgttggattcacattttgattgaataaaaggttgctaaaatggtgtccatcttagatgagctgctactctattcaattaatgttatctttgactctcgcctatcgggatactgtatttcattatgttggaaaccttggaaaatactacatatgtttagtttttggtattttccaaacatatttgctttacttgttattttctaatcctcatctagaatacgcctctaggaatgaacttcaaagtgtgaagatgactcctggtcagagtatcacttcacagttgctcatgatgaacatgaatttccagaaagcagctaag

SEQ ID NO: 113244 - DNA, 1182 bp, Cannabis sativa
aacactccaattatagaatcataaaatataagctaaccaatacttttaacgtattcctcaatatatcgctcaaattaaactctaaaatatcgtgactcgtaattttaacaaagtgacaaaaagtacatatcattgtatagctagcaaaacttgattaagaagcttatttagctagggtttgaaaaacaagtagagatataacgatcaacatattatgaagtgtacgttaagtagatggtgatagatttatagttattatttattaatttatgtaattaaatttttcttaatatataattcgtcattgaattccaaacctcacaatctttccaaaatcataactaacctaaatttaaacagcaaaatacagaataccaattaattattgagagacacgtacatgcatgtgttatatatttataatcaaacatgtaaatcttataaagacataatttagttattaaacgtactcagttattgaagtgaagttatcactctataaatatatttcctataaatataaaaggtggcctatgtttttttttggttgatttaacataatatttcatcaatatcttatttaattaaaattagttatattaataaaaacttacacttcatccattaatatttttcatattaaaatttttttagctcaaaattttctttaatgataataataataataaaaaactttaatgataaaatctaattaacatataaaaatgaacaatttcatttcgaaagcaaacacagagacaaaaaaaatagctttttaaatttaaatttttttagcaaaatttaattactttattaaaacctataaaaaaacttttggattaatacacttaaaataaacctttagattaattatgtgtttttgtttatttattatacattaataatttaaacatataattttaatacttggtataatttgctgtttttattttctcaatgcaattttattaatcaaaatagatatgcagtaagcagggccgtgttaaatatttttgaagccctgttctaatttaaatagttggaccctagtaattaaaaaaggtgcaattgtaaacaatattttcaaatattatcatgtactaatatatattttacaaaattaagcaccaaaaaactcaaactaatttattaaaatttttattcacttttgagtgaaatata

SEQ ID NO: 113245 - DNA, 1916 bp, Cannabis sativa
agagagagagagagagagaactcagaacaattacaaaatcaatctcacttgccatttaggaacagatctcctaacaaacgagacagtttatgccacatcagtataagtggctgaattacaccacaagtaataaatacttcttccactttttaactcccaacaactcaaaaaggtgtgtttcttgtatttatagttaaatatcaatttgggtaatgaattcaacttctttttaaggaaccgtatcaaagacaaagtaattcatttcagtgactaattttacaatcctgcaaattaagtatgttctttactctctctgtatgttccatccaactgacttgtaactgtatttttttgtgttaggtgtatcaatggcatcactgactgaactttctttcaactggactggctttgtcagtgcaatgatttcaaacattgcattcacttacagaagtatctattcaaagaaagcaatggtaagatctctaccaaaatggaatttagttacttctctaatcatgagtgacggctgctattactattcaagttggtttatgttttaattttactttccattttcttctcaacagacagaaatggacagtactaatgtgtatgcttatatttccatcattgccctcttcgtttgcattccaccagctttaatagtgagtctacttcttctctcggagacatgtacaagctaagtaaggtattgacattatctggtttggatgataatttggtttgattggatcggattggattggatttcagattgagggacccaaattgttgcaacatggtttcaaagatgctattgcccaagtggggctctacaaatttatgtcagacttattcttgattgggttgttctatcatctatacaatcaggtatatatgttaataataatatgaatttgttattctaactcagtcataggattggataatgtttggtatgtggtaataaattgcagcttgctaccaacaccctggaaagagtggcaccattaacacatgcagttggaaatgtgttgaagcgagtgttcgtgattgggttctccattatagtgttcggtaagcaagcatctgctctcatttggaatccatattcattttctttgagtttttattacttattagtttatgtatatctgactttgatattgatcaatatgattatattacatgatttggtaacaatggcaggcaacaagatctccacgcagactggtattggtactgccatagcaatagctggtgtggctatgtattccttgataaaggcaaaaatggaggaagagaaaaggggaaggtaattgaacattttatttatcagagattgtgattacttgatgtaagatgatgacacgcatatcattactctatccgtattacatttcaattcaaaggatttgcaaggatattactattattagtattgttgttattgttattattattctgtagaaataaagatcaagagtagaataataaattaaaatcatgtttagaaaatgttattgttggaatgaatgatgacaataatcgttgctcatcagagcatgtcagggtttggaatacctggttaaacacctatcgtaggttgacaggagcaagagtgatatctgaccttttattagttctctcttctattagagaaaatatgttctaatagttactactgttgtatgcttttttttcttctaattattccaacaactataataaaaacttaatactttaaaggacgattattttatttttatttttattttagattacaatgaaattagggaaaaaaaaacagaaaaatacaaaacaggaaaaaaaattacaaaaatactatgggccggcccattaaatatttatacagtccacatacaaatatttataaaaatatcacatgcactaag

SEQ ID NO: 113246 - DNA, 4643 bp, Cannabis sativa
ctccggcgacaactcgtccccagttggtgttactgatcctcagcctcaagcggaccttcctcctgctcctgctactgctactccgtcttcttcctctgttcactggaacccattctccaattctttaacatcttcactcaccatcaagcttgatcgatccaattatcttgcttggaaatcacaagtcgttcccacggtcattggtcatgaccttgatgagatactcttcaccagtatcactcctcctcacactcttgttaatggagattccaacccgatgtacctgcaatggcgcaaaaaggaccaactccttctatcttggcttagatcttccatgacagaagccattcttggcactgtctccaactacaatacctcaaatgctgtctggttagcccttgagcaaaagttttcaagccaatccaaagctcgtttgcttcagctcaagggacaattatccaacattcataaaggtactctcaccatctctgactatgtcgataagattaagtcaatttgtgattctttagccattgttggtcattcgatatctgatcttgatctcattcttcatttgctcaatggtctgggaccggagttcgatcccgtggtttctggtatcacttctcgcagggattctctcacacttgaggaagtccaagcactcctcatgtctcatgaaacgcgccttgaacgacacacttcaatgatggacctctccaccaaaatggctgccaatttgaccttcggctcaagaagtggtccttatcgtcatccctttgcctctggcagaatcaacaatggtgatattcaatcaagattgccccctcgcaatcacaatcggcccccttcaaccaatagacctctatgtcagctatgccttaaatatggacacactgcccccatttgtcattataggtttgacaagaattgggtgactcccaaacatccagcacaacagccccaagtgaatcttactgaacaaatcactggttttgatcctcaagctcacctcactcaaaccctttctgattttggtgatgacagtggctggtatgtggacagtggtgccacaaatcatgttgcttttgctatggaaaaccttgattctgctattccctacaatggtcaagagtctgttgctgtaggagatggtaagaagttacctatttctcatattggtacaactaatattccctctatgcactctcatcctttaaagcttaagtctgttttgcatgtcccctctattaccaagaatctagttagtgtttccaaattaactagagataataatgtttttcttgagtttcaccaatcttgttgttttgtcaaggacaaacaatcgggtgctgtcctactcaaaggaactctcaagaatgacttgtaccagttagaagataatcactccaagttttcaaatcactctcttgagtgcaatcttgtcacttcatcttctaattcttgtcctagtactaatatcactactgtagcatctcaaaattcttgctgtaatacaactgctactgcagtttcttcatgtaatcttgctactgccaataaaagtgatttcattttatccaatgtgtccccaactgtccatcatacttctgtacaaaatgatattaatctttggcactgtaaactaggacatccagcacctgctattttaagcaaaattctctcacagtccaatattgcacactcacttaagcaactaaaattttgcaactcttgccaattaggtaaaagtcacaggttaccttttcctctctcctctactcgagcctctcaaccattagaacttgtccatactgatctttggggaccatctcatattgtctccaaagataactacaaatattacatcatctttcttgatgactatagcaggttttcttgggtatttcccttagttcttaaatctcaggcctttgagacattcataagattcaaaagtttagttgagaaacaattcaacttacctattaaggctgttcaagctgatgaagggggtgaatatcgatcatttgagaaatttttaaatgaccaaggtattaaatttcaactctcatgcccacatactcatgaacaaaatggaagactagaaaagaaacatcgacatgtgactgaaattgggttgactctgctggctcattcaggtcttgacatgagttattggtggcatgcctttcagtgtggtgtttactccatcaatagaatgcccacaccagttcttggaaacatcagtccttatgagtgcctcttccagcaacaacccgattacaccattcaaaagccttttggctgctcttgtttccctcatttgaggccatactctcaccataaaatggaatacagatcagaagagtgcatctttcttggctattctccaaaacataagggatatctttgtgaaaatcgtgatggcagactctttgttgctcgaaatgtggtctttaatgagtctcattttccagcctttcacaacaacaacaactcccaggtactatctcctgagccctctaatgttcccactgctcatttttctacagattttgctcaaatacaaactaatgtatctcatactggtgctcctccaactggtgcctctgcccaagcaactgcaactgtcagcccttctgcctctcatgaatctgctactgctgcagcaccaagtaattcctcttctgatccttctagtttgcccaacatgtctcccatcatgtcatcttctcatagcagtgcctttgcttcccaacaacctggttcgaacaacaatgacatcctcactgtgcttcctactgctgctcctcaaagaactcatacaatgatcacaagatctcagcatggtatctataaacctaaagcatatattgctactaaacaccaacttcctgagtctcttatccctcgagaaccaaagtctctcaaggctgctctaagtgacccggcttggaatgcagcaatgaacaaagaggttaaagctctcaaaaataatggcacttggactttggtaccctatcagccccatatgcacttaattgacaacaaatgggtacatcgcatcaagttaaattctgatggaagcattgatagactaaaatcgagattggttgccaaaggataccttcaagcacctgacattaattatgctgaaaccttcagcccagttgtgaagccagttacagtaaggatggtgcttactcttgctattacctttcaatgggaagtcaagcaattagatgtttctaatgcctttttaaatggagttcttcaagaaacagtctacatgcttcaaccgaaaggatttgaagatcctactaagcccaaccatgtttgtcacttacataaggccatttatggcctaaaacaagctccaagagcttggaatgacaaactcaaaaccactcttgtcaattggggattcactgcttctcgggcagattcatctctctatgtttatggttctggccatcaactaatcatcttcttagtatatgttgatgacattctcataacggggcccaacactactcttattactcaactgattcatgacttaaatcgctcatttgagctcaaagatctaggtccaattcactactttcttggagttgaagttcataggacatctgagggaatgtatttgtctcaaagcaaatacatcacagatcttttagtaaaagtccatcttgaaggagttaaaccgtgctcaaatccaaccagcagtgctcataagttgtctcttcatgaaggtcacccttttgaggatcaaacattgtaccgaagtactttaggggccttacagtacttgacacttacccgacctgatgttgcctttataataaacaaactctcacagtttattcatgcccctacaagtgtgcattggaaagcatgtaagcgcctacttaggtacttaaaaggaacacttcatgatggtctgctcctcaaaccagttcctcggctctcacttcaagtctattccgatgccgattgggccagttcattagatgatcgacggtctacgggaggttatgctgtatttcttggctcaaatctcatttcttggtctgccaagaagcaacaggtagttgctagatcatctactgactctgaattcagggcacttgccaatgcagcagctggggtcaagtggttactctcattgctttctgaactgaagtttcaactccaagacacaccaatcatctgggtggacaatcaaggtgcagctgcccttgcagccaatcctatatttcatgcacggtgcaagcacattgaaatagacttacactttgttcgtgatcaaatattgaagaatgagctctctgtcagacatgttcctagcattgatcaagttgctgacattctaaccaagccacttccaaaagaacgatttcactatctcaagggcaaactcaaagtggcttgtaccccttttcgtttgagggaagatgataaccaacaaactgtttgaccgtttttattgtttaaattggttcactacaagaaaaggcatttttaccggcgcagttcgtcaaatgcgccgttaaaggttgtcgagatagagcataatctgaaatcccacttgcatttaggcttcacttttgccggcgcattattgcgccggtgttaaa

SEQ ID NO: 113247 - DNA, 2952 bp, Cannabis sativa
  modified_base (2912)..(2917): a, c, t, g, unknown or other
agatctaagatccgggtaaaataaattccaacaaataatactgctgctatacaagttgtacttgcaacaatttctttcttggtttctaatgaggttaactctgctctaaccttgcctctcccagcagaaggggtttatgcggctttgaagtccatgactggcgatggtagcccaagtttggatgagatgtcggtcatgttttataccaattactggcacattattggtgaagttgtcactcaatctgttctgaaagtccttaatgatggtggagatccttcatcttttaacactactctcgttacgcttattccaaaaatcaaaaagcctcagtcaatgactcatcttcgacctattagtttgtgtaatgtgttgtacaagttggttttcaagaccattgttctaaggatgaagcctcatctatcctagtaatcttgaaatcgcaaagtgcttttttgccatcttgccttattacagacaacgtccttgttgtttttgagctcattcattcccttaaacatctaaagagatgtaaacaaggttattcggctattaaacttaacatgatcaaagcttttaacaaagtagaatggcattttattcaaggaatgatgctcacattgggttttgctccttccctggttgctcttatcatccgatgcatctccaccgtcacttactctttctagctaaatggttcggtttaaggtaatattatcccataatgatatttgagacagggagaccctttatctccttacctattcattatttgtgctgaaggtctttcaagattattataaaatgaggaaaataatggttcacttcatggcttgaagatttctcgtagtgctccattagtttcacacttgttcattgcagatgatagcctcatactttgtcgaggaaaccttaattgttattgtcaagcttccggacaacgcttaaacacatataaatcagttctttccttctcgcctaacacttaacaagcaactaaggattcttttcagcaacatttacatatgctaacccaaccttgtcatgaacgctatttggggctcccttcctattcgagatgagataaaaagttttttttgggagaaataaaagacaagttgtggaatcttctttcggcttgtcaagaaaagttattctcagtaggtggcaaagatattcttcttaatgtagtggctcaagctattcccacatatgctatgagttatttctgactctctaagaaaataattgatcaaatagagaagatgatgaatatattttgctagggttcaaatgcttctggcactagtattcactggaaaacttggaatgctctatgtcattctaagggcaaaggaggcatgggattcaaaagctatgtgcatttcaatcaagctctactagcaaaataagcttgacgaatcctttctaatccatcttcactccttagcagattattaaagcaccgttactttaagaattcatcattcattgatgctgaaagtggctcttatccttcaatgacttggagaggtattgtttggggtaaataacttcttcaacaaggtcttcgatgaaaagttggtaatggcttgaacatcaattgtgctactgatccgtggctgcctagtcacacaatttttaagccctcattctttaaggggtatgttatgaatctcaaagtaggcgccttaattactgaagataaaaaatgcgacttatctcttcttaacagtcttttcttacacatcgatgttatgaagattcaagacatccctttatctatctttcctcatgaagatcagctagtttggcatcatgaatcaaacgatagctacacaatgaaataaggttataaattggctgctagttttgcagattagtcactctcttctggttcacaacaggcagtccaaacgtagaaaaaattatgggcactttctctcccttctaagttcagaattttcttatagaaagttatccatgattgccttcttgttgcagctgctctttttaaaaggcacatcagcgactccccccactgtgttttatgtaatttcgactgtgaaacaagttttcatgctctcattcattgtaagagggcaaaaaaagtatggagaaattcttccttttctcttgagattttgcttactgagactagtaatcttaaagatttattgctcatactttcagaagcctagtctctatcagaagtggatcaattcttttgtatcctttggagcttatggaatgaaagaaataaagagaggcatgtcactaaaccaaaaccaccttaggttcttctctatactgccatttcttttttaggtgaataccattcaactcgttcttctttaagttgttttcacaaagacggttcttcatcttcaagagcttcagttgggatgcccaaatggatgaatcctccttcgggcaagctgaagttaaacacggatgccactgtgaacactatgaatcgcaagtctggttttggggctgttttacgagattcttaaggacaggttatcactgcaatgtcaaaaccttatcttggctactttaaaccagaagtgatgaaagcactagcttttatgtttagtatgcaatggcttaaagatatgaacatacgtattcactacaatgagacagattctcttttaatggtcaaaggattgcaaacttcaaagtttagtgtttctgattttcatagtttgttaaaagatatttctattctcatgtccaatttcccaggtgttatatctcacatgtttttagatctggaaatattgttgcttattctttagcaaaatatgctctctcggtggacactgaacgtatatggatggagaaattgccacctcctctaatgactattgtattataattctttttaatatacagtagaacctctnnnnnngaatactctattcaagaataacctttaatttgtta

SEQ ID NO: 113248 - DNA, 10467 bp, Cannabis sativa
  modified_base (10422)..(10423): a, c, t, g, unknown or other
gcgcccgtgcaccccgcgctacacccacataccctcgcacctgcacatcctcgtgcccgctccccgtgccagtcttctgacaccaacagtctaagcaagaaagtatcagacaagaaaatgatggcacaaggggtatagataatggggacaaagttcatttcatccgaggtacaaaatgaaataggcatttttagtgtaactttggatgtcaggtatatcagatcacctaagagacaacgtcatgtcaggtgtgatagtgattccacatcctatggatgagggatttagtaaggttgtaaagtgtcaagggctcactataaatagagaccttgaattcattgtaaaaggactccagctggtgaataaacattaatacttctaaagataaaaggttgtgagatttttttaagcatttttcaatcaagatctctaaacattattttaaatctttgttatttcgttgacgaatttttaccgtcaacaatttgtatataacaagttgtggaatgaatacatagtcatctgattcactaaaaaaatgatttataataaatgatatatcttaataaaaaatttattttttagtatttaaaatatttttaaattttattaattattttttatttaaataatacacatggtttggtagaatggagtatgggatctcaatctgccaccaaaggtgaaagtatttgtttggcgtatgttccatttagctttatctgtagcaacataatttacctcccaaaaagttcgggtacctctttgctattctcggtgtggagaagaagctgaaactcctgcacatgctctatttttctgttttggtttgactcaagtgtggcattggttggggtgtgttcggtgctccgtcaatgtgcatatgggccaatgcaggaaattctcctattactctttgacaagctatctcgtgaggcttttgaagtgatgatgacaacccattggtggttgtggtatgataggaactcaatattatttggcaataagcagtcaagagtggatattattccagacctagccaataactatctggcagagtttaaggagtatgatcgatgaggccttcatttgggcttgggtgctgcaaatccaggggtaaaccgagatacgcgatggatgccacctcctcttggattcattgctctagtgacaaatgcttcggtaatttcgaggagaggctttgttggattgggggagtgatacgggatgcagagggtgtggtttggttggcatggtcatcatgtgtgttaggtgatttttctgctaatgtggcggagctgcttgccatttgcctggacttgattcttgcgcatcaatttggttttaatatctccattattaatagtgattccactttagaaattcgttggattaataagctttacattaattttagttgtcactctattttttataattagctgctgttggtggtggttcttgtagtgccatttcgcgatcagcgaatagtgtgcctatacactagcaacctctgttactagtttaggagattgtgtttggacggatgtttgtcctcgatttttaagttttttttagatttttcataataaattttgaatttctttcaaaaataaataaataaataatacacatggtaataatgtgtccctactatgttattgtttaaagtgccaaaaaagaattatacatttcgttagtcacattggataaaaactatatgcacaataatataacaataatagttgaggcatttaaaacaccgtgaaaagtttaaaaagcataataaaatggtagtaacagtttggaagcaaaaatccaatttactcatccagtaattacccaaatatatggtcatgcagagaaaattaatattatatattatatattcatagtagtgatatctagctagcacaataacttatataaatatatattatttaaatttgtaagaaataatatatagctttggaaatacataataatcctgtaattaggcctaaagcggctgctgtggcaaagcacatatatatgatatgatatgatgatgatgagtcaaaataagccaccaaatttggggacctctccttcctcctcctttcttaccaatcagcaccacatatatacatgtatatataaatatataaacatatttgtatttatatacattcgaattggtccaaataaataaataagaatatttatgtcggattcttttttttaattttcaatatttattggaccccatatgaaatatacacacagctgcttagtcccacttctctaaataataataattattattattataatttaaacatcatattaatacaaaagaaaaagaacataaaggaataataacacgtttaaaccctgtcaatatcaaacatatataaccagctcatcaactagttctactgtgctatgttttttcttttaattatatgttcttttaaattatatttagttggatggatatacatgcagattcatagatcccagctgcaccaaattgagtcctacatattctgactgtaatccaactatgtcatgctttcatttttttttacttctgccaattgttcattaattaattatttattaaatattattgtgttaacttgtaatgatgtaattgcttctagtgcctcattattctcgtgaaacttttcttattagttagatctattgggtgctcatcattttttcttcatcttagctttttaatttatatatataaatataaacttttccacgtacgcaatcctagccgtccaattaatccctcaattctctatatatactacaacccttttctctattttcttcaacactattagtgaaaagcttctctctcttctctctctctctctctgaaatctgatcatatatatcatatatttctttctttcattaatctcgttcttgatttcaacgtaggagaatggcttgccttaacattttcaaagatcaggtaattaattattattatgcttttgtgatctatatttttttttttttggtaaattttaataatatatacgctatattgtagtgagtttatacaagtgtttatatatatatatatatatatatgtagtacacttatatgaatgtactctatatatccatatatttatgatcataggtttaaagatagctagctcacaatatatgtgatggaattttgagtgtttgcagctaattaatagtatataacgatatacacatatatatcatgctatataatcataatatatatatacgtatatatatattacataataataagcttatacgtatacgacactactaccaaaaaagaaaaagaaagcagaggataattaattgatatatatagtaaataaaaaaaatgatgtaataatattaatcaactatttgcagagatatgatgatattgaagaagtgaagaaacagaagaaggaagagcaaacacttgatggaagtgttgataggcatggccgccctgcaatcagaggccgaagtggttcttggatcgctggtgttctcattcttggtacaacatcctaactattattattattattattattattaattatatgtatatttacattggttacactacgtacgtacgtcccattttcacattattttttatcatatatatttagttggtaagataccaaaaagagatagaggacatatattataacacattctttaatttctagctagagagatctttgatattcatcattttctgtttcttttccccaaatatatatgtatattattaattaatattctattacatctgatcatcacacatatataatctcttatctctctctctctctctctatatatatatataaatataaatattttataaaaatagcacattaataacacaagtgggtggttaatattatatatgagctcatcatataattaaatatgtgatgcatgcactcactttttgttaccatagcacccttttaagatcgatcgttttcggcttatatatgatcaatttgctttcattagacaagaccaactttttgacttgtatttcaacagtttttatcaaataagttagactagattcaatgcatgcttggttgccagttagttacacattttgtgtgtatatatgtatgtgtcttaatggcacacttaagtgactatatgtcaaataagtgtccacacaacaataaaaatgtggtgtccttatcatcgatcttatatatttaattactaataaattataattaattaagtagtagtagtactaatgatatataatacgtatatatatacagtaaatcaaggattggcaacgttggcattctttggggtaggagtgaacttggtgctattcttgacaagggtattgggtcaagacaacgcagaggctgcaaataacgtcagcaagtggacgggaacggtctatcttttctctctagttggtgcttttctcagtgactcttattggggaaggttcaaaacttgtgctatcttccaagccatctttgtccttgtaagtcccacctcctatgtaaatcatcatcttcatcttaattattaattgtatgtatctttcattttgacatttcaactcaataaatatatatatatatatatatatatatatattactctgtggtcaagaatattttctactgtttttttatttatacataaactatatttataaatataaatactatgtaatatatccccactagcttatatatatataaatgtcccggcccctttaaattaatcaaagatgtgactatctttttgtcctcatatatatacgtgtgactagatcctctaatgatcacacgagttattattattatgagaaagtgaccatattatattatattttggaatacccatatataatatatagcatattaattagtcatgaataaaataagaagaaaaaacaaagactatgagtataccataaaaagtaaatggcttttactcagatgggaaaaaaaggcttattggttttctatcttattaattggtttaagtttcatgcgtgcacccaccatatatattggtgtcatatgcagtgtgtgtacattaatagatgtatgtttcttcaaattaagtaggatatatacgtatattgtataattagttgtggaagaaagttaaacacaaataacgagagaatttttgggtttcacaaatgcagggtttggcctcactatcactatcatcgtacttgttcttactcaagcctaaagggtgcggtaataatgaagaaactttatgtggaccccattcaacagttggaatggctttgttctacgtttccatatatatgatagccttaggaaacggagggtaccaacccaacatagccacctttggagctgaccaatttgatgaggaagaccctaaagaaggccactcaaagattgctttcttcagttacttttacttggctttgaaccttggttccctcttttcaaacacaatcttgggttattttgaggataagggactatgggcattgggattttgggcctctactgggtctgctactttagccttggtcttgtttctttgtggtaccccaagatataggcattacactcccaagggcaaccctctttctagggtttgccaagttttgattgctgcggctagaaaatggaaggttaagatgttgccaagtggagagaatctatttgaggaagttacaaataaggactcctctcaaaatggtgctcgaaacattttacacaccgatggtttcaagtaagtctataataaatatgttacaattctaatttatatattgatcatgtaacaataataataattaatgcatagtactaataatttatgttttccttcagatttttggatagggcagcaatcattacagagaaagacctcaaccgaattgagagcaatgctcctcaaaccaatccatggcatctttgcactgtgacacaagtagaggaagttaaatgcatactgagactactccccatttggctatgcacaattctctattccgttgtcttcacacaaatggcctcactctttgttgagcaaggcgcggctatgaaaacaacactctccaacttccacatccctccggcgagcatgtcaagctttgacatcctcagtgtcgccgccttcattttcctgtaccgacgagtcattgatcctcttgcctctcggttcatgaaaaaccctaaaggactcaccgaactccaaagaatgggaataggacttgtgatagccataatggcaatggtttcagctggaattgtggagtgttttaggttgaagtatgcagtaggtggtactagaggatcatcaagccctagttcactaagcatattttggcaagttcctcaatatattcttgtaggagcttcagaagtttttatgtatgtagggcaactagagttctttaatagtcaagctcctgataggttgaagagctttggaagtgcactttgcatgacatctatttcacttggaaactatgtgagtagcttattggtcactattgtcatgaaaatctctactagagataaaatgcctggctggatacctggaaatctcaacaagggtcatttggataggttttactttctcttggcggctttgaccgctgctgatcttgtggtctacattttgtgtgcaaaatggtataagtatacgaaatttgaaggaagaaatggagaagagaatccaaatagtactactatgcttgccactgaacttagagtggtctgatcttgatcgaataatgggggtaaatctatccatgatatttgtaagataaataagtgaaggatggatgttgttgttgggaacttggagggacgtgatggagtgtgtgtaaagagtacatgttagctatgaagctctagagacttaatgggattttagttccatctctcaaagtggagcatatacattgctacggagcatacattgctacctcgtgtgctagatttatatggagatgagccacattcaattttactatgcattatgatttatgttgatgtatgtaactatagcttccatttttgtttcttatttatttgatcaaagatgtaaacctctctcttaattctataagtaattaataaagacaattattagtcatcatcacttcatttctatattttttttgtgagagtgatttgactgtgatgagaacaatgggacggaaggacatctagtagttaaagatatataaaattagaatatgaatttctaaaaacaaagcaacttatataagactaaattatcctaaaaatttagacaaatataacttgagaccacctcaaagaggatagtcaatataacatatgcaccataaataaataaaatttgagagtttaatcaaacataattaatcaaagcccaactgaaaaattaactatttgtccaaaaaaaaaaatacataaaaattcaattagctccaaataaatgataagataacagtaatataaaatattagaaagaaaatccttaaaatttattaaagtaaaaaaacaattaagattcaaacttatctctaaaaatctgtaacaacactttttaagattggatccatgagtaagcagttaagtcaacaaaatatcgcaaattagccaatgcggcacaaactagccaaaaaaatacggcaccaacttgtcaacaaagtagtaaaataaaatcaaatatacaacataaaataatcacaaacaaaaggaacactccatttattttaatatacaaaatgaatttaattgaagagagaaaaattaaaatttaaagttgactaagcaagccaaaaaaaataccacataaaaaaaatgttaatagtaatcctaaaattaggaatgaaaaaaatcaataattgtttactggatttttagccaaccgacgtggagttgtaataaatgagatttaccaaaatcgtaaaaataaatgtaactaacgataccggaatgcgcaataaatgtaaagaaagacaccagaatctaaagaggttcgaccccagatttcggtaataacctactccccttatgttttttaatcagagttgcaaaagtcaagaacagactcttaaatgcaaagaataaaaagtattttttctctaagtgctcaaaatcacggatctcctttccaagtcatgggtgaccccttatatagggaaaaaagtcggtgcttctcgcttcaagagacgcaaccaacgcggagctatctcaaccgtctcgttgatttttggaggtagttgaagtttaatttttatgataatatcctgctatttttgtgtgggttgaaaactgtctttgagcttttcgtgggatttgaacgtatgaaatagtcactaacgatgagggtctcctaagggtgtgacacggtcgttgaccacctttggggatagaagccaatacttgggggtgacacccccgagacccaacctgaagagggtgataattttcatctcggggtgaccccctgagaccccttgtacgttgttagtagtcatactatcgtgtggatatgtccccatatatacctttaagaatgccattatgtctatggtgggagtagtgtcatctaccccttagactaacttggcctataggtccgtggtgattgttcaccccactttatgaaggtgttagttcatcatttttccttcttagaaacacccaccttactcaagctaggggtaagggtgaccgactgacttccattctaatggttatgaacactcttcatgattaacaattaccccaagggtcatgactttatatgttcttcattaatttagccccagtagtttcgtgtcacgtgtttttactcttgacacgtcatcgtcgctaaaatttaggtaaacacttgcctccaagtttctagtggtatgaccatatggtaggaacttttctatgcaatctgggtctcgctttagttgttgacgacttggcgctccagcgccaaaaatactttacttatactaaaattaccttccaaaaacccaaaaaaatacttttcccaaccattacacttttcacattttacaatatatcgcaattataatttttccaagaaaaataaattacaaggaagaaagaaattatttacaagggaataacttacataaaaaaataaataaattgccttttagccccaaatggtagtgggggtttataatagcaattttgaggtaattggtccctttttttttgcaaaaaaagccttatatagatgaagagtaaaaacctttgaaaatcataacattagaaaaattgcaaattttttcgctcttgactaccatttcgggttgggcatatccttcaccattggaggagattttgaagctcttgattgattctttgaagcttggtgtatcatctcttcattgtgggtaagttttcaacactcctatggcaattttttgcatgaaaatcatatttttgtgatatttttgaaacgttttcttgacttttcttgctatggccgaaaatgatatgggtgattgggattttttttatgaaatatgagtgttcgatgcttgggttttgtagtatagatggtgggtaatgtgcttttggctttgatttggtgtaatttggtgaaaaaatgatcaattttgaaaattttggttgtttgtgttcttgaatattgaagaacaccaaaaacattaaataatccaatgttttctctattttttaaattttcattctcattgaattgaaaaaatgtgtttgtggggatgttgcatgttttggaaaaaatacttgatgattatgctttgtgtgtgggttgttgattttgggttaccatgcatccccacaccctgagatacccccattgggggtcggggtacgtaccccgtgtatgggtgttactccatgccctgagtatggggctattaccccgagcataggggtcggggtataccccgaagaaagtttttttttattattttaaccgcgaatagacaagagttgggggtggtcaccccgagaccaccacttggtggtcggggtatacctccccaaggcttgaaggcctccgatgtcacatgccctcaaactcaccccgaggctatgtcccccgagctcggggtgttactctcgagaggggaatcgcggttggaaccccaagatggggctttgagcttcgctaccccgagattgggaacccactcccagatggggttacttaatggtaaggtgtacactaacaccatacaccccgagaccatacaccccgagctacccactcccctttttttacaatcacctcgaggctacaataccctgagatgggggaatgtgggggtaccccaaggttgatttgatttgatatatatttatttaagatatgggattggctgagattggaggtttgacctattgggttttgtgctctaaataaaanncatttcaatataatcagatttccttattaataaagatcagaaat

SEQ ID NO: 113249 - DNA, 6564 bp, Cannabis sativa
  modified_base (6509)..(6518): a, c, t, g, unknown or other
ttttcttaatagctcgtaaacttaattctccatattaaaacctggtatataaataaagaatttctccacatcccttttcataatgtcaaaaaagtaaaaaataaaaaaaaaataattctttgacaatacccttgggtgaaaaagatattaggcacggcatattgttcggagtctgggtggcgttgcgtgtagtcagtgtgtgcgtgcgacaatagtcggtttgtgttagaacgaaacaccaatctaaattctaatgttttctcttttttcttttctttcttaccagtagatttaattagtattcctcaaatatttcttcttctctccaatggcgtcgctgttactacggcggaaagcttctggtacgggagtttctcgctttctgcacggtttgatcccacttctcccgtttcttttcttttttatcattattttgttttaaacaatgagaaaagaacactcaacgagcatttagcttatgttatgttcatttcagattatggtattgcttaaatgattatacaggcttaaggagttggatatgctttcaatgtgtgaattcaaatgtattccccaatatatgataagccaaattgaaactctagataatattcacaatactatatgagatgtttaaagtttttaaaagttccttaataacatatgattgggtaatgtggaatatgtatatgctcttcatttttcatatggtttatggtcagagaattcaaatgattctgttcactaatttattgactagtggaatgggaaaggaaaaaagaaaaaaacaataatgctaaaaaaataaatatgtgtttctccatatttatcacttgctcttgacatgttaggactgcataggatttaaactgggcagtagtatagaatagttgagtttggtactagcttttttattggaaccaagtttgcaaattttcagaatttgataggttcaccatttatatttatatatttttaccttcctactgctttagcaggcattacacaaccagttgctttacatttggagttgaaaagtggagatgttaatagtgtttcaaatgtgttaaggcaattcagtagctttaatcgaaaggagacgtttgaatttacaagctccagcagtagtacctcaaagtttgattttatggacctaacgtaagtatatatgttatcatttatatgtagataaaataaaactgattgtgttgttggctgctcttacacttgttgaatggatatgcaaatatatagtgtgggaacattcttggaatcaaggaatttcgattaaaactaaaatgtcctagatgagaaggtgctttgacttttttcttttctttttgagacaccttctggggtgaattcatgcagtttgtttatcagattttagatacgttcagttttccaatttatgcaaatctgctctctctattttgggtcaaccatgtaatgtgaaattatgaatatgaaaatcaatggagaagtattcttagcttttcttgatttttggatcagtcaagtggcaagtgctctggtcccttatctcccatgtgacactctctcttagtgcctgttattgttgtatatctgtaatcatatcataacacttctactaggcatcaatttaactttgtcctcacttatgttccatgctaaatttcagtcgtcctcatacttggtacccaaatgctcgaaggaagcatcgcaaggttatcttgcacatgggtcccacaaatagtggaaaaacttatcatgctttaaagcgacttgagtcaagtgcttctggtatgatttaaaataaactagaactaaactagtagaactatcataacagagaggaagagaatgatgtaaaatataaactagtaaaattctcatatattttgcttgtctgtctgtagggatatattgtgctcctttgagattgctggcttgggaggtggcaaaacgattgaacaaggcgaaagttacttgcgatctagttacaggacaggagaaagaagaggttgatggtgcaaagcacaaggccgtgacagttgagatggctgatgtaacctcagattatgattgtgcagttattgatgaaattcaggcatgttctgcaattagctttaacattcttatagctgtggctttatgatacttatatcataagtacatgtcatctcttctatttgcttcatatatcttttcgggaacagatgagaacaagtttatgttgatagaaactttgttattaatagttatttgaaaagaaaaaaaaggtatatgtctattaagaaacaatgtgtttgaagtgtgtatatagttgtacattcttttcgtgatatatcggtatgatacttataactacaacggtagtgtacaaagaatatctgttattttcttcatattgttttttggaggggattaaaagaaggttttgctgatggaaacttaaattttgatagatctgaatagaagagaagagtgtattctgacaatggctataaaacaatatacttgaagagtgtatgtaagctgcatatgctccaaacaaataagtacttatgtttccaatgatctttctgtagtctaattaatattttgtcaagcattaaatgcactcacaactaggccaaattttctgtgaaaattatagttagttaatttaaagttttcaacatcaaatgatgtacagtataactaaagatgtgaccccatagcatgatccctaaatctttaaactctaaacttactatttcagatgttgggttgtcggtcaaggggattttcgtttacacgtgcactattaggaatatctgccgatgaacttcacatttgtggagatgcagctgctattcccttaattcaggaaatgcttaaagttaccggtgatcatgtagaggtaacacagtttaaattagttattcttttggcgattaagatcaatttttttgtgaatttttaaatgctacaagattctcccttgcatgagtttcagtagtatgtggatgaaatatattaaaaacattgggacatttaatgactcttccactgtatcatgtccacatccattttgtattgtctactttgcttgatgaagatggaaaatgaaagccaaccaagagatcattttattttgcattattttgatcataatctttgcactatcaatagttctacagttcttcaagttcaaggattagggcacttgtgccacctaaggctagtttaagcggttgaatgtgtgtgtgagtattcagagcttaattcccgttaaggaagatgtgcttatttgatgtggaaactggaaagtgtttgttgattaaggttcgtaccctattgtttgttatgtcatcgtaagtacaagtacaagtattcttttgacaattggaggaatccccgacaatattactgacatagaacctcaagattcttaaccgcttatgtcattttgctatgacttataaacataatgctgtcactttgaggcgactaatgtatatctatgctgtccactatgaggaaaccaattcttatttctaattcgttgctattttttaacctattataggttcaacactatgagagactttcgccattggttccactgaaggttcctctcgggtccttcaataacattagaacaggggattgcattgtatcattttcacgaaagaaaatatatcaattgaaggttagtatttatttattatctttttgtcttcttgcattctcttacaacatgattggacttatcttatttagctagtttcaaccatcttcacttcgtactttttcacttttaattttctcaaatattgttgatgtcctgatttggaggatgaaacatacatctcctatgcaatttgcaaacaatgactacaggttaaaacagccattttattcattagttgattagttctgcatttcatgaaaagcaaatttcatatcttgcttcttacaaagttccgttaacttgtaggctagaatgagatatagatgacccaatttaaaataaataaaagaaactttcatattttgcttcttacaaagtttcgttaacatgtaggctaaaatgagatatgggtgaccgaatttaaaataaataagttgtgatggtcattagggacattgaattttgaattgttgaattgatcctacttcgcgcttgatatatgacagacaatgggagaaccagtagaaggaagacaaaatatgtactttttttctctgtttcattgcttaataaacttaggagttgtgaattaagcccgtcatcttattcatatccaaacctggggtatatacctgtaggattttggttatcaagatggttttctgcatcaatgtatatagtattgtaggatatctatgaacctttgtaaaatagagaagaaaggataaaaactattttagactctctattttgtaaaaattaccaattgagttctctattttggtacatgacaatttagacctcgtgtttttcaaaatagtacaaaatagaccctgaatttagttattgtcgatttctttatacaaccaaagctagcttccaacatgaatagatgcaaaaaagaatataacaagcttggtcataacacttctaggtcatgcaattattaatttttaatttgacgaaaattaagttcaagatcaattttgtactgttttgaaaaacattgagtttgaattgtcatttaacaaaatagagggttcaatcggtaacttttgcaaaatacatgttcaaaatggtatttacccaataagaaatgaaaaatgtaatatgactgccagtgtccatacttttagatgaaagcactgttcttctctcaaatggtgaaaactcagtgaaatatgtttgcccttttatcaacaattctttcagtacagtggaaaaaaggatatgattggaacatgcacgcttccttgtttcaattccttaagagggtttagttagtcctgtccatgactgcactatttctcattctgtaattgcagagggaaaaaaatatgatttcaaactttgtatttgtaatgtgttcatgtttatttgtccttttttggttaaatttcttgttattctgttgtgtttgtgaggagctgttttgccatattagtaaattaaatcttattaatggattgtatcttttcttgtatttctagagacaaatagaaaatgagaggaagcatctttgttctgtagtttatggctcactacctccagaaactcggacaagacaggtgacatcaccccactatgaatattatggcttttgtttacaattaagtcttatgaggatgtatatgtcattagcctataatatgtagaattgtagataatggtcatcagacaaataatgcagcattgaggtccatcgtatgttttctatcagtattcagtccttcctagttgggaattggctaatttaatatctactctaggattgcaggcaacaatgttcaacgatgaaagctctgagtttgatgttcttgtggccagtgacgctgtggggatgggtcttaatctcaacatttcaagaataattttttcaacaatgacaaaatttgatggtatcgaggagcgggagctcacagtgccagagataaagcaaattgcaggtgcattgaagtcaatggatattctgttgcatttttcataatctaagtatttgactagcttcatctcaaaaaaaaagtatttgactagctattttaaaaaattccatcgattctcaaatttcatcttgcttactatttgtcatgaagcttattaggatctttttgcgcattaagtttaatggaataagcaattatgagtgtttatacagaaaatggttttactgggatcttttcctgtaatatgctattcaatgttagtcatgatatttttctttgttattataatgtgcttagttgttacccgggtgaaactgtttgacatatcttatgattcgtctcataaaggtagagctggcaggtatggatcaaaatttcctgttggtgaggtgacttgtatggatgctgagtacctgcctttgcttcattcatctctgaatgctccatcccccacactagaggtaaatttatgactaagctagcctcttcatggaacattcattaggactccagtgcttgtgttcatattaattagatgttcttcattttttctgaattaatgtgattatcataatgcagagagctgggttgtttcctaattttgatctcatatttacatattcacgtttgcatccaaaaagaggcttatatgagatactagtaagttcattgtttatctcttttttaataactatgttgttttattgtcatattagttatacggtatgacagaataggaaagagtaccgtattggaagttaatatttcttaatcattttagggtaaatactattttggaccctgtattttgcaaaagttattaattggatcatctgttttgttaaatgataaaatagactatatattttccaaagtttacaaataggatcctgaactgatttttnnnnnnnnnnaaacttaataataatctgatttagagatgttatgacaaaactggtt

SEQ ID NO: 113250 - DNA, 3044 bp, Cannabis sativa
agcaatattccttttgtttaatctgctgccatctgtcctttgtatccaatggctgtaatcatttgtaaaaaaccttaaatagcaatgaattcactcatgctcattgagctgagatttatcatcatcctttgtatttgcttcactttctcactttggaatgtccctgcaaaacaaattaacctattacttaggattaggagccaattatggaaagcacgccaaatatgtgtttatttttatttttttattttttatggaactctcattcctcaaccatattttcactacttttttttttttggcatgctacttttgctttgattaattaaagaaagtagaaacaatatattttattgcaaaattaccttaaagagacattttgttataattactttgtaaactgcatatgcttggtatatatctgatatatgttgagaatttagttgttgtatgtactcatataatagtatataatatttgatatttgtttgaaatctctgttgcatttatttagatcacagtctatattaaagttagtaaggtatatatttttaagaaaacaattggtatacattgatatataaatttttgtttgtcataaaattaaatttttttaggaaagtatacttttaagaaagaaaatgtaaggttgtaaaatgataaaaatgaaaaagaaagtatcaaaattggctattcttgaaaagttccctaaaaaattgaacctttctctgtcaaggcccatgcccatcgaataataatagcccagctctattagagacaggccttatagtttgagcgacaagagtccaaatctcaagcctctgcagttttgttgatgaaattagtagggagaagttgaaaaatacccattttttttatattaacttaaattaattttcaaataaaatttaatttaaatgtatattttttttatgagtattgtacctaaattaccatcacacactcacatactaagacataatttcaaacgtaatagatttgtattctttgtagatagtgtgtaggtttgtagggaagttggggtaaaattttgattagaaaataataaaaactatcctgaagtgataggagtaaaattggtaaaataattaaaaaaagaaataaacataatagatttaaaaaaaaaaatagaaattaaaaacattaagttaaaagaggtatatgatgtaattttctcaaattagtaagatgtaatgaccacattaaagatccatctaaaattttttgttattattatttaagttttttcttttttagattaatattattttagttatactaatttgctaataaatcacactttttatatacatatattgcggagtactagcgaaccataatattaaattataattggtaaatcataaaaaaaaaaggtacattttattatttaagagagagaaaaaaaacttctgaatttttattagaaaaaagaaagagaagaagaaagtgaaatgtagattttgttttcttgataagataccataaattaccataaccgtaagttacagtccatgcgaacttcctatgattcaatgttctcttaggactatcgtatatgttaatgtaatgttggtacaagtagaaggtatccaatgaaaaatacatgaatataggaaaatatatatttattattaataatatatatattattttacgaaaaaaaacaatagaaacattatgggatgggagtgtgaagaaatgccaaaaagctagcttatcttacacgacacatggtacccaacaaaaaaaatggagtttgtaaagtaaaggtacaattttcaaaacaagaggaagtataaaaagaaaagaagaagaaatttgatttttggtgggctaataaaaccaaaccacaagagaacagaacagagtggtcaataggaaagaagggcagttgaaaggaaggtaattgtatggggccatgccatgcccccattgggtctcttctctcttctcttcttcatcaccacatgtttgtgcttttatccaacaacaacattatgccaattataagatacagctttttcctttctttcttctttaatgtctctactacactctacaactacatcaattatatactcctctcatgcttatatagtttgcaactttaaaacatgtaaatttttagacaactatgttttggtaaatttgagtgctgattttcctaacagtgtattattctaaaactaacatactttttatatgtatggaccccactttttttttatttctaattaagaaaaaaaatccaatataatggggtgggtgggtccctttgggtaacctatgttgttgtatgtggactctcaagtctcaatgctacttttgtttttttgtctaatctattattagctgctctaatccaaccacacaatggttgttagctgccttttcatcgtcattttgctgttctattttgttttgttcttttcatcttttccctttcccaaacgtatttttaatttccacataggatagatttaaaaggggataagcataagctacaagggagtttctttcacataaccttgttctaatagttacccaacacctaatttagggtataatccaattttgaaaactacatatatatacctcccaacaattgtcgttttgttaggacataattatgttgtctatagagtaataactacttaacgctacacttaaatcaattttgtagattgagaacatcaattagtaaggttggtccttgtttttctttatttgtggtgtttgtgcatgtgtaattagtttttctttcagtattagtttgaaaagttagctcactaaccaccttggttagttaatgttgttattctcttagctctattagttagatgcttcttgtaatcttcagccatctaaagctctataaataaaaaggtcacaactctgtttaagggttagagtacattttgttgagtaaactgctagcaaaataaaagaggaacgatattaccgaatgaagaattctgggttgagtcgcggactaagtcgctctctttaagacgttcgcg

SEQ ID NO: 113251 - DNA, 1497 bp, Cannabis sativa
  modified_base (36)..(67): a, c, t, g, unknown or other
tactatgttttagttacaagtaactttttgttgtgnnnnnnnnnnnnnnnnnnnnnnnnnnnnnnnntgttgtgattaaaaaattatcactaaaatagtattttttttagtgtatatttatatttcttttatgtatcgaaataaaacgctcctactatatatagtggaactaaaattattgacacatattataccgattaatatgaattaaagtgactatattatactaattaaatggaatacatacacttataaaaacactcacatggcactagaattctagaaggaaacacataatattattcatgaaaaacaacatttgaaggggctttaaatatgaaattgtgcaattctacaacaatagacacttgttaaagtaagtttatgtatatatttatggaaaggaaaaacaatactattattgaaagcactaatggtaataattttgatgagaaacaatacaaatttgtagatgtgtccccaacatatattccttatgccccctattgtatctataatatctccatgacttccggttagcttgaccaattacacttctttttccaagcttaactaactttattttttgttcttagtaaactatacatgaataagtattttattctttgtcaaaggaaggaatattacactttataaagtcgttttcctattagatagttgtgcaagattctcctagcactgaaaaattaaattatatatattgtttgtcactgcaactacaaacagattctgcttgtcatggaaaattaaagcatgcccaacaccaagtagagggaccaattaattaatattccttatagatctctattcatttttgctaataacaattaacttcattaatcagcttgtctcatattataattatatatactaatatatatatatatatacatatatccttaaagtacgtacagctgagctgagacaatacttgatgagcatgcatgaatatgatgatcgatctgtattccattttcattaaaaaaaaaaagaataagaaaagaaagctaataaaataatgtgaaaaggacgataaggatacatattcaataatataaggaatacaattattgatcatcaaacaatactataaaacaaaattattaatttcttccaatcctaaaaatttgtaaatggacaaaaaactaaatgaaatcagatcaatcgtagatgagagagaagttctccatttatagagtaagcaatacgtgatattttgttgtgaatacttattgttgctgaaggaattttataacactaaaaatagattataataataataataaatatgtaataagtgcgagtactccacccataacaacaagtattcaaaccaggaacacaaatacttaataaaagactgaaaaataatgaacaaaagaggaatataatggttcagtcagatctcggtctgcttagtccactgttgcaaagattctgtctcttttatttcacggcggatcactcctttatata

SEQ ID NO: 113252 - DNA, 3825 bp, Cannabis sativa
ttttgggtagttttggaaaataatggaattaatttgtataaattagtggaaggtataaattttgaaatgggatattttattagggtcaattaatgaaatttccctaacaaaatgtgaaactctatagccacatacctatacgtatctaatattcttttagactaatttagattttgttttcgaataaaataatttccaagtgtgaattgctccaatgacattgaaagctgtcatattaaaaaaaattataaaaagaaaaaaaatttagtttaatgttgagaattatgcgtcacatcacttacttgcattggctcctaaattaattctttccatttttgggatttaattacaaggcatcgaatcgacatttgttacaacaaatatataatcatcatatttggttattaagatggtaacatataacgaaactcagactcataaggttgaacttcaaccatcttgttaatgggagactttgtttctccattcagacattccatcatcaatcttttcaacgacccacaacgtggcaattgactataaatccattccaataacgactccatatcatctgcaaaatcagacatgtaccattcaagaagctttggcacaataatctttttcctgcttgtaattcctattgaagcttccaaatactccacttttgctctctccatttcgttcactatgttatctggtgtataaactcttacagctggtgaggaccaagtgcctcggcatagagcaaaggtcacattaggctcagggtaccccaaaccataggcatttcgcaacaacacttccttttcataagcagggcccttctgattaagtttgaaaaattctttacaagttttgtctttgaaagagtcaaaagaatattattgttgtttagtcaagtaagaagactatatgacttgaaaacttacatgttttgatttggatggataccggagaataaaatgctcaatggctaaagcatttaatattataccacctacatttagtgtagcctgttttataaatgaaacaactattatagtcagcatgatgattatgttttatagagagtgaaaatataagtaacattaccttattcattagttgcagaagcttttcttgtgaggtaggcagcccatgttctaaaaatgcctgaaaatttaaagacagaaaaagtagttattaattactatctttaatattaaaacccaactaactctgttgctttttttattgtttctgtctctttcacattgctgaaggtgtcttacagtacatgcattatgcaggcattataaacattgatccaaaacgctagcttctgtttgtaggccaagaatttcaggtctacaccacacagtttatgcatcaaaaccctgaattttgaagacaaatgaataagaacacaactagttttagacaaatattcaaattctcttaatttgctactttcagaaacttgtaagacaaacctcagttttctaaatccagtcaaacattccgaaaagcgtgtgacatctaaagatgagctcgtgatttgaataaagttcttgtaaggacctacatctcttatatccaaatctggcaatatgccataagggtcagagaatgaagagttgtaattgaaaagaaatgcaggtggtttgcagttgaatgaggtctttcctatgaaccctttcgagttcatacaagaaagagttagttttggtacaattggtgatccttctctatccacagatgtctggtttaactcaacaaaaatgcttattagacacttgagcaactcttctgagagttcatttggtttcataatgtaacttgtattctctactttcccccttcttctccttctcccactatctttccttgttaattcagcaatttctcctgctcaaacacaaaaaatctcttaaacatattaaaaaaaaaaacaaagaaaaagtgttctgttatagacgagcaaggagtttattactgttggaaaatgaagaccgagtatctgatgcagaactcaatgatgctcttctatccccattcactctttcttttcttaaaacttcatagttgtgtgatcttgatcggttgtcatcaagcactgacccaattttggcttcggacaacaaatgattctgttgccacactctcttttgatgccttaaatccaatccactgccttgtgctctctcttggtaaagctgcatagttatctcatcaacttttctttccaacaaataaatctcttcctccaccattactatctcggaaagtagcacctgaatctacatttgatatcatacaaaatttctcaatctgttaaagacagtttccatcttcaaataatatatagatagatatatagttacatatacctgaggtggtagataagtggaaaaactaggatttgaaagcaaaggtccattgagggcataatgcaaaacatttcttagtgtttcctctccttctagttctgcttgcaatgtcttaacctgtaaagtaatcacaattaatgcctatgtctagttcttttttcatgtcaaacttgttctgctattcttagtgactaattcaaagaatgaatgttctttgtttttgttttttggtttaaacaaaaaaatcccaatggaaaataacaggaaataattaacctcttcttcaagagcaagtctcctatgctgctgatcctcacttctttgcatcagaagctcctcaaatttcattgttctgttttaacataaagaagaaagtgtttactattttgaagagaagttgctgagttaaataaagagggcatttcttgttcttattattattattattaagataaaaggaggtggtagaggtgaggtggtagaatcgtgggaaccattaaaggtaggtggaatggaagggaacctaagaaaaggagggaaataggaaaatgaaaaattgtatattcattcactagattagatgaaccgttggaatcaataaatattgttaagatttttctttttttttttttttgataaaaattattaagaatttatagttaatgttttgaggggtcatttaatttgacgtattgctgtggtttttcttttcttcttcacatgaaatatctttcattaaagagtttggatatataaattaagaatttgcaagtgttggggaggtggagacgtgaagcgcatgaacatttaacatacgaacctaaaagcttggaacacttaatgacaaaacaaacacttgagaataaaaataggaaaacttaataataaaaaaaaacattctcgccgtctgtgggaatcgaacccacgaccacgtggttaaaagccacgcgctctaccggctgagctaagacggctacttgaagtaattagtttaatttattgacttaaataaaatgtactctcaaggaaattcttcagcatcggctacacatgtcaaaggtctacatcgattcttaaataaaatgtactctcaaggaaattcttgctcacgcacgacacggaccaggaagacaaggtggatcagttgggccagactcgacttcgggtcttcttcctcttctatgtttatagtttcaaacagggataaaagtttcggtggtcagagcaggcagtccaactaccacaagggtctgagacccttgaacccaatcgggttcttcacgtgcatgggttgtcaacatcacccatgcatgcatatggatgtcgctagggcagaggaaatggggcacaatactcgaggtggctaggccatcgtgcatggccagagtgttagataaattaataataaatccaagattaatttgtatataagatagaacacaataataatatataa

SEQ ID NO: 113253 - DNA, 3513 bp, Cannabis sativa
  modified_base (3356)..(3362): a, c, t, g, unknown or other
ttaactcatggcttaaggggggattgattgcacaaccgctttaagagaacttcctttcccccccccccacagaaaaaacttttcttgccaagaattaagaagtttccaaatgcaatatttaatagagctaaaggcctcactctcattgtagtctgtgtaggaaggaaggcccaaataatgctcatgacatgattgaatcggcatacccaaaatttgatgaaaagcttgttgatctgcaagataagtattaggcgagaaggacataacaaatttgtcagcattgatgagttaactcgatgccttactatataaatccaagatatttttaatgacagcctgagagtgagcatccgttcattaaactagcaagttatcgtcaacaaaaagaagatgagagactttaggggcgtgtcaggtaacaacaaggccagtaagcataccctgatcttcttggtttttgagtagccttgaaaaagcttccgcacatatgaggaaaaagtagggagagagggggtccccctgcctaatgcctcgttgaggtttgagatggccagtaactgcaccattaagaagaaaagaaaagctagtggagctgatgcaatgcataataatatcaaccaactgttgaccaaaacccattttcagcatgacctgcttaacaaattgccattcaaccctgtcaaaggctttgctcatatcaatcttaaaggtagtgtagccaattcgacccctagttttatgtctcaaatagtggagaagtttgtaggccactagaatgttgtcagtaatcattttgttggagataaagccactttggtaaatttgttggagataaaggcactttggtatttagatatgacatgagccagaaacggtttaatctgaaggacaatagctttggagacaagtttgtatagcacattatagaggctaattggcctaaattaagccactgctgtaggattctttgacttttaaaataagggttagcaaggtattattgatgccagaagggttccagccttgttaagaatatcaagaactcccttagtcactagagaacccaccatagacccatgattagtgaaaaacatcacagacatactaggacttttatcagcactcatgttatgaagagcctgaagaacatcctcagaagtatatggtttctgtataatattattcatagcaggcgtgatggtggtgggaataatagcgaaagtatcagcaagagcagcttcattaataccagaagtgccaaaaatagaagcatagtaatcttgaacaatatttgcaattttggtctgatcagttgtgaaagtcccatgagtagtttaaagtttcttaatgcagttgttagcttttcgtccaaaggcttaagagtaaaaatatttggtattggcatcacccgattataatcgagagatgcaagagtgttgctgccagtaagtctcttcttgttctagcaagccatccgaaatgtgttcagattagaaaaataaccagcagaaatgtcattggaatccctgaggctagcaacccaatcctcaaccttagtgatattctttctcatattgccatatttattagcatgacaagattaaagagaggtaaaacaatgctggatattattaacaacatatttaggagaatcatgtctagagttttgccaatgtcaaacaataataacagaacattttgtatctttcagccaaaaggcttcatacttgaagcaagatttgtacttaggcaaggcatgattgttagaaggcatatccgagaaaataatcttaagagctctatggttagaagagtagaaatccaaatgatgcaaagtgttgtaaatgggtaatggtaattccatgatggattgataaaactataatcaagacattctttgatattggcatcaccaggatctttgttagtcaaagtaaagtcatctccatcatgatcacctagataagtttccatacttagtacatgcatggaaattatcaataagactaccatctctagaaataccccaagcttaagattatgggaataaatttcattgaagtcttccaagaccaaccatggatcttgaggagaaacatttgctaaacatctcaagactttccatgtttcagctcgtaaatgtgtttcgggtgccccataaaaactagaaaagtgccatttaatctcattatcacaatgaatatagcaaaaaatatgatccattgaaaaggatagaagtgttacatcaatattatctttccataacaacataagaccatcctcgagccctctcctaagaacttttatcccattaagaaaatttaaaacattgcaaacatgattgatagacccaaccttcaacttagtttccataagaaataaaatttgggaagcttgctgagagttgagaaagtgcagttactggaattcgctcggtttctccaatccctgagcattccaaccaataacattcatggcgagtggtatggttgcggagcaacacccaccaaaccattcgcatcatctgttgcagcatgtggagataaaaattcaggcacaagaacagcagcaaactcagggacttcattattaaaaggttcagatatgatagcgaatttaacatgaataggatcattggtagaggttggttcaacattaatgttttccatgagagatgaaccaatagtttttgtagcaatggcttcattgaaaggttggagacaacatctttttaaaattgagtgaagagaatctccattttggatgattttccttttgtaggtgcgagtgtttgtagtttcacacaagaaacagagggagctgaagtggaggaaaatagagcttttattagaaatcaagtcaacagttttagtggtatgtgtggttatttgggatgagtcatttttagtgttatttgtaatccaaccaggtgcggtagtaagaggagaattgggtgtgaacgtggttgtgttgggagtggtatagtcagtttgttggatatggattgtgagttgggtgcaggaaggggttggctaagcacctggtttatggaacaaggcgagtaagcaagggccaagctacatttctattggtgttgttctaagaacgatccattcttggtttaggcagtgggttccttttcatcaaagagccatatgggagggcaatgttaccacgagaatcctctgcctctaaaaacttcaaacaactcagaaagctgtgtccaagtccattaaacttgtggcagagatcaagttacagtttgtgattaatatctactcattttataattttataatgcatgttacaatttgacaaaattaataatttgtcatacttaattatttaatctaaannnnnnnttatataaaataatataacaaaaattacttttaattttgaacgagacatgtatcatgtaacgtctccgcttcaagcctccattgggcccttacacctacagaatcatggctcttatacacgaatatgtcactctggctgattcatggaatg

SEQ ID NO: 113254 - DNA, 2669 bp, Cannabis sativa
aaaataatttccaacataaacaagctagaggtcccctctccaaaggagatccgttacttctacagtgtcaaggctaatcccatgaggatagataggacaaagctggggttcttccgactagataagtgctcggattcttactgccccgtatgtcaaacggatcgcacccacgacctctaggaatattggttcttatctttcgaatttcctactagcagggtaccatctcgttagttaagcttttaacttccaggtattctaatgatttaccttgagttttgcctactttttaaactctcctaatttctgtactcccactaacatacttgatttggagtagagcttccccctcagagtattaggattgaggagacagtcaagaaagaagccctaaatagggccttttgggaagagcaatcaaaggttggggatctggtgacaactaaactcctccgtaggtttggcttgattacaaaattctatagtattgatatagtcagccttcgaggacagcgccaaacccctaggaaagtgaaggagaagattaccactgacttggcaattataatcattaatgcggccaacaatgatgatgccctaaactttgattgggtgttgcatcgttggtcataagagcattttagcttttgctcgcgggcagccctatagcacttcactaaatcgttgcacccatgtacaagtttctttattagattcctcttcttgccgtttctattttccttataattgtatgacctataattgttcctcttattcactcttattactatttcaagtgcagatacaccagagtccatgatgttgaagtcttggagtaaccagatctcaccggctatggacaaagccagggaatcccaaggaaaaggtaaggggaaaattaagaggactcgaaaaccgcacccccttaacttcctcatcatcagatgtctaggagatcgctcctcccacaaagactggaccaacaacttcaggcctttctactttggctggtggggagaaggactctgacacctctcgcaaggcttctgaggctctctccactctaggagagcaggccccacagtacattccccctctaaaaagaacgatcccagatactacatcaaacacggggggttctgatgacagcttaggcagacttgtctttcccccaaaagggactcctgttaagtctaagcgcaagggatcaaagacttctccaggtcccatcacaaagagggtcaaatctttaatcccagacctaggggcattcgatgtactgttgactagcccgccattgtaacagtagtagcaacaacaacaatagccacaacaacaatagccacaacaacaacgaccacaacaacaataacaacaataagtaccgcaacaacaacagtaacaataacaacaacaacaacaacaacaacatcaacaaccgaaaagagttcaactactgcagcaacatcagactctatcccctcatcaattgcagaatgtgtcgtcgcagtctgccccacacccatctcagtctcctacacttcaacatcttccagggcacacaactcctaggcctgcctctgctaatcaatctcagcacaccattgggggtaggattccttcattgggtttctccttccccataaggccacctgctcttggcaatgactatcctaaaaaggtaggcgtgtccactgccattttgaaaagggaccatgagtgagaataattaaatcttcagaagcgggctacccagttgtcttctatcaagacagctgagattgcagagggaattcgtcagccttcttcctccgacccattgttgcatcttgctatagtaagccataatttggtacctacagtgggcagagccattgccacatatgctgtaaagatgttggataacatgagccttagtgggagtgagcatacatctgagaaatggtatgtgagcagcggtgttgatccatacacattatcggtggctgctaagcaatagggagtacgggtaggtcttaatttcttgaaccattctccctttcgatgaaatttttattaccaaagtgtgtataaccgtttcctattattttcctttccctagatggcattgttcgcagagaggaccactaaagaagtgggtaacatgactattgaacttagccaacttcatgctaaagttcaatccttgtcaataaaaaatgaggccttgccgaaaagtggagcaggtcaaaactcaggctaactccaacataaaaaagactcaggaggactgcaaggccaaactggcggttgaagagaagaatttagacgccaaataccgtgaaatatacttaaaacataagacctaagtcgagagaaaggttgaggagaccatgcgttctcttcaagagaacttggataaggctacggaggaaaaggacagagccgagactagggtggttcttcagtctgaaatgatatccacccaaatttgggagatcaactctctcccaagggatatccaacaaaaggaccaactcattcagggccttcctgacaaatataaacaagagaaggagcgaaaagagtcctggatgaaacacaataagaatccaacgatgtcctggtaggcaagagtcaaagttattcttatttttacatgaaatttacaactacaattaataacagaa

SEQ ID NO: 113255 - DNA, 2862 bp, Cannabis sativa
ttttttttttttttttggtagaagtagtagggtaactatggactacatgttaataatgtgttttggttaattcactttctaagattatcataataatatattttatttattaaaatgtgaaatgtatatttatatatattttgtgaaagtaacttgtctcaaatttggaacatcacttaataaatgagttaggttgggttacatagagttagagtgtgtctaacccataaccaacccataattatatgaccaatcacttttcagcttaatagtcattacctacttttaacataacattttactataacaaatgagttgggttatagtttgtcttatattttgtgcacccctagtctatttgtaagtgtgattcttggaaaaacaagagatggattaagagttagaagcatcgtaattaatttaattttttaacttaatctttttcattaacttgtatattataattatttaaaatatcatacaatattttgaatacactgaaaaataagatttaaatatttggttgcattcgtaactcttttattttatccgtgtgaaaactatttgaacattacattctatatcgtaaattattttgaatttttcaaaaaaaattaagatgtcttaaataacaataacatacacaattataaaaaaaaaagaaaaaaaaaactaaaactttttcttgaatactaaaacagtaaaggatgtttgcgtacatcttttttttaggagtacattataaaaacactaaaaaatttattgttttttacatctaatttttatggcttactaagatcactaaatagattttttttttttttgctgaatcactaaatagatgttacagatgcacgttttctattcactttaatcaaaaggaagccattgtagaagagggaaaaaaaacttagggaggaaataaggtatgaaaattacacttatcaaaaagtaattaattattggcataatcattaaaataacttagaataagaatcacttgaggctagctcaagtagtcataagaagtatgagaaggtgtttgtgaacgtcctagaatcgaattccaaattatataatataatgtatatataaatattttaatcaaaaaaaaaaaaacttgaacaattaatggtaccaaatatcatatattttatacttttgaaattttttaattaaatagataaaaatataatatgtacactttataaaaatattataacataattctccttaaaaatttattgtatgaataaatttaagcatatatatttaaggtcaacttaattaatagaatagttatcattgaattgtcatcaaacaatgactataaacttgtcatcatgaaatttaagaatgtatgtacgaatttgttatacctattttcaagttaaaaatgtaacctcaatccatcctactcttgatacagtttttgtgagtaatttgatgttaacagatggctttggatggcatttggagctgttggataattttttcaatgatagagataaaatggctatcattggtattcctctccagcaaaatttgggtgctagttctttagactggtttcatgatgtgagtggcatttatactgtgaaaagttcttataacctactgtataaattaaaaggttcttggaataccatagcagcttctgaattcttgaacgagctttggaggttgaagattccatcgaaagtgaagagcttgatgtggagagggggaaataattatctacccaccatggtcatgctcattacaaagaaattggttgtcaatagtctatgtccaatttttgctctacatgatgaaacaatactgcacatcttggtaacttattctttggcggcacaatgttgggaaagggtagggattaccactttgataactgccaacatgtcttttttggactggtgtattgcaacatttcaagttgttaacgatgagaaatgatgcatcatagcaactttgtgttgggcaatatggagtgcaagaaatgaaaaagtatggcagaacaagtccacaaatgctccgtttttatatgcattggcggaaagttaccttgcacaatggaaggctactcaatcttcaaatcatgatgaactttagactggtttattaccaggagaaggtgctgagcggtggtgtgtgctcaatcttcaaatcatgatgaatgaactcaaggtgaatgttgacacatctatttttagagaaagccaaggctttggttttggtttggtggcaagaaatgagcatggttttatgttgggaggtgttattaagctacatcatggagtcgttaagccagagctagcggaagctattggcgttagggaggcccttagttggataaagtaaaactggtggcagcctgtggtcctcgaaatcaactgccttgtggtggtacaagcaatatgaaactcctttaagatgaactctttatttggtcaggttattaaagagtgtaaaattttacttgttgatttaaagtatgtttcagcaaatttagtggctcattcgtttgcaagagatattagtttatatcttgattgtaattttagtataggagatgtcccaactgatttgctactttgattggtagcagagtttgaagggttaataaagtttgattagcttttttcaaaaataaaagaggcagaactaggattagatattaagggagccaaacttatgattactaattaattatgtatgttattttctattttaataataaaagtatgaataattagcatttatactccttgaactttcgacattatctaattttacccctaaaatatatggcttgttaaaaattcttcctaaaatataagttacataattatgcccattctg

SEQ ID NO: 113256 - DNA, 3799 bp, Cannabis sativa
  modified_base (3599)..(3599): a, c, t, g, unknown or other
gaaaatttgatgagacccaaccttcagaagtactatactcgtgccaaaattgactgttagcttacctaattcttttcctataataatgtatatagtgatatttaattaccaagatagatacattactggatatctcaactactcatatatccaaataatatgagctgaatcatgatcatgatcttcttaattaaagtgaagagctatatcatcatctgaaacctctctctggtctgcttcgactatacaacgtaagtaatagtagttccacctcttccaatactcttttcattaatcttttcactgtaataaacttttctcagtcttctttcttcttttcgtttaaaaagtttacatacatatagtttcttttgaaaaagaaacctttacacttataccaactatataaatatatattatatataggtgtaaagagtaaattctttaattaacatgtaactcaaataaaaagtttttcattaattatatatatgaattttcagcatgaagggggtcatcaataaccatgcatggtgtgtagagatttatactcgtatgattattaataacttaactttaaaggtgttgattaagttattttttggacactgttcatattcatacttggttttatgttaatactatattaaaaataaaattaccaaaattgaaatcaaagtattattttgtataattttaaagaatactagtacaactaataacttttgtaaaactaaatgaaaaataatatttacctattttatatatcaaattccatatgttagtttcacaaaagttaatacatgcaaaataaacaatatgtaccaatagtaataatgtaattcatatacatgattaaaatgatatgataataaaataattactaatctaattaatctctttgtttatgtacagatactatgtattgaatagagtatagtacttaagtgttaattattattaggtagtaatgcaagtagagaaaaaatcaggtgtatacacgtacgcgtcacaatgggcaatgatctatgcattagcatggtcactaaggcaagacaagcagaatcgtgtagcaatagggagctatctagaggactacagcaacaaggtagagctcgtccaattcaacaccgacacctcggatttcatcaccgatactcgccttttcttcgaccacccttacgctccaacaaacctcatgttcttcccctcagaggacacctcaaatccagaccttttagcctcgtcgggcgactaccttcgcctatggaagatccaccacgatcgaatcgagctcaaatccttacttaacaacaacaaaacaacccaattcaactctgccctaacctcttttgattgggcctcgttcgacactcgcaggatagctgcctcgagtgtcgacacaagctgcaccatttgggatattgagaaggaaattgtggacacacaattggtggcacatgacaaggaagtttacgacatttcttggggtggttacaatgttttcgcgtcagtttctggggacggttcggttagggttttcgatttgagagataaagaaagatccaccattatttatgaaaaccctattgagaattgtgccttgttgagattggaatggaataagtttgatccaagatacatggccacgtttggtatggacagtaataaaattgttgttttggatattagggttccaactactcctttagttgagctttgtaggcataaagggagtgttaatgccatttcttggtctcctccattggggaaacaattgtgttctgttggtgatgattcaagggctttgatttgggatgtggtgggacctagttttcgatccgacggcggtgatgatgatgtggagcctaatatgtggtatgcatcgacggctgagattaatcaagtgcgttggtctcccgtggatttggaatggattgctatttctttcttgaataagttacaactattgaagaattaggatgttattattaattaacaaaaattgtattttatatattaattagcatttgataaaagtcccttatatatgtcatttatagtgataaagtacttgtaatatttattctgttcttaataaattagctcatcgaaattttttcatcttaataatgctatatatatattttgtaagaattaatattaataagttattgcaaataaggttgtaatgaaatgtgtactttgtacacgttttccttataaacatgttcatgtgtaatttttatgggttatgacatgtttatggaaatcacatgcatgtattgtaagagtttttggttgagaaaaataaaaataaaaataagaatgcaatgcaatgcaatgtaataagatttaatatatttttttataggaagcgattttaagggctttcaacgtcaattttaataaaatttgctattgacgttgttctaagcaacaagaagaaaagcattagccgacaatatacagatgagtaactatgccgtactttagttattatcaaataatcgacaacatagggaagaattggggttattttgtacaatgacacctttatggcgtcaactattagcaaataacaaaagctgtaatattttatggcattgattatttgcaaataagtgatgtcgtagagtatttatttttaaaactattgaaaattaaattttatttttcacatatgtttttttgtgtattttttattaatttatttaaattaaatattaattttatataattaaaaattaaattaatcatataactaaatatatgtacattattctaaatacatatattacataaatattttaaaagtactccaaatcttttcaaattattaactaactaaacatagaaaaattaaaaaaaatatgtaagttatccaattaaacatagaaaaataaaaaaaataatgaggaaatgacattgtatacccactttactttgtttgttttaacttttacttttattttcttattctttaagatattcccacttttatagatgatgtctccattatacctcttaggttaatgtaaattatgtgctagacttaagtggagggtgtattgggcaacccactcataaaggtatattttaatgaaatataatatgaaagtatttttgattaatcgatacaaaaaaaatatattccttaacttatcccaaaaaaaaaaattcttatataattcagcatcactgcaagtcttcgtgaatcactgcaagtaattgttctatccactatcgtttggatgggtaatattccaaattttcaagttgtaactagagcttttaattgtttttcaatatatgctacactgcacattaagaaaaaaaattatgctgcgtataagttaaaataagaataattagtaattttgccccttcaagtattaatattgctcttaaaatataagacttgttaagaatccctcctcaacttttacatttatagaaatttagtccttctgttaagttccgtcctattatttagtctaaatactgacatgtctttgtaaattagcaattttaccctataagctttgacaattatcgaatcgtaccccctcaaaataaaaatgagaaagattcaacanttttgttagtaaatcttaaaaaattaatttagatcttaaaaaaaaaattatttagaataattaagaaaattaaaaaagaaattaaaattttaaaactacttaaatgatttaaaaattatttaatttttattaaaaaattcatttagatattaaaaattcaatttttgtaaaaactaaattttacgggaacaaacttgaat

SEQ ID NO: 113257 - DNA, 1305 bp, Cannabis sativa
atatatatttaaaaaaaaataaaaaaaaattgtttaaataattgttaccaaacaattaaacaaacacactctaaattattcactaaaatcacaagtgtaacaaaaactaaagtgttaattatgactaacactaatttagttatgatttgtaatttcaataatattattagttacaagtaatttttgtgaagaaaaaataaactatttaatttgttattaaaatgttatcaccgggttttgtactcccacaatcccactttattaaaattaaatagtggggcattttgaagaaaaaaattacccatgatggatatatacgcacaaattactattttttttcccttacatcataataataataacaataattgtgcgtagggcaaagaatgattcacaaatatgatggttatggtggaggtggagatatatgtcaaataatgttaacaagtggatgaaaaataaatgtgaaattattattttataatatcttcctagagttgccatagtcaaattattgaaccgtatatattaagaatccaatcctctaaactcaaattataataaagagagaaaaaaaaaaaaaaatcatgtggaccacatccacataacaaaattagatactcttgtttgtatacatgtgtatgtatgattatttagtgtacgtatacatttgtaaaaataacgtccatgtctagctatatacattataacagaatttgttgaccccaatagatttttgtttttgaacatttttctcttgtaaaaattctccactaagaaaataattacaaatattctcctataattacattatgctcattttttcaaataatttgtcatcatctactactatgatctaccactaacaagacaaatttaactttattagtgaaagaattacgaagagtacttcaaataaaaaataaatagataaatagtagtttattatataataagttatgctataatgtgtatacaatttttagagataatatttgtatatgtttaatacaatacctttaatatagtgctataaatataagttagactttttgacacgacacgaaattggtacgagtccaaaaaatatgagcacgattaggcacaaaaaataggacgtgggcacgatacggcatgatgctacaaattatcactacacggaattaaaaatatgtccttaaacacgatatgacacgagaagcacataaaatacgacacgtaagcacgaatagacaattccgaaaaatacaacgaaatgtctaagaaatatcacacggcatgttaaaaaactttataatttattat

SEQ ID NO: 113258 - DNA, 6488 bp, Cannabis sativa
  modified_base (32)..(54): a, c, t, g, unknown or other
tccgatctatatttaggatgttaaacaacatnnnnnnnnnnnnnnnnnnnnnnntggtaaaataattccaacagggtctactcctaaaggcgtgggcatgctacttggattcaccgaggtgctcgtttcaagttggctagctgtgtgaccagacttgttacgcctgttgttgtgatgggattcaccacatctgtagtattcatggggattttagttgtgattagaacccgagtggctggatctgcgatctgttggtcttaagggagacccaaagatgcagatgttgtgacaagagttcttcttgtgttcaccatggtgtttgatcagatcatgatatccacgctctcaatgaaagccccaaactattaaccttaaaaagtgatcaaccgataacggggtcatacaaattcgatgcttgccacgtgtgtgcacaaataagaatgaaaatcaataaacaataggatttggtatagaggttcgacccccttatgatagcgggtaatgacctactccccttttagttgtattataccgagggaattactatctagattgctataggtgggatctacaatagtacctttaggattacaatgtatgaatcaatgcttggcaaaactcaagtgttggatagcctagggtaggcatgtgagagaggatgaggaagagagagagagagtttatcagacacttagagtttgaaatcaggtttctagcttagaggaaatttaggtttctagttagaggttaaggccttcatatagacggccttaaacactaggtttacaattcaaatcccttagtatttgtatagtttgttagatatttaaaaagaccaaagtgcccttgattctagatattattcaaccatttgttgggcttttggggcccaattcgcagcccattacttctggccacgtgtagaagtgtctagtaatgcctttagagcactccttggtcggccaggcccctgtggtggccaggttggccggccaaggtgctatccctaggttggtcggcccagggttggccatccatagggttggctagggatcgccagccagctactgagagagagatggtttgtcacttgatccccatttgagtgccgggatcttcactttcccgggtgttgacttgggcttccttttagtgagatgtactgccatatggcactggttctatccacgtaagcatgtcacgtcatgaggatgaaaattgggataacaatatataaatacataattatccaacgcaatatttaatctatataattataaaaataggtcttgatatcaattgatggtttttatggtccatataagagttataaaagtagaagtagttttgataaaaataatttttatctaatatgaaccataaggctaaggatttcaacataatatatatacattaaatctaaactaatgaaagaaagacaacacctcttggccccactctacttccgaataagctttatcagggtggtaatctctactcttccaatcttttcgtgtcactttttgggaggtcgcatccgcgagctttatcattcaaatggtttttgaggtcattcccttgtgaccttgccttctctcttttagccttttcgtacttggcgttaagacacattcaaagatttatagtggaccaactgttgtcagaatattgtcccctggtcccatggtccgggttgacggaatcactgggcagtttttccttccccaaggcctgtgtactcttgcaccagtccctttttgaacaataggacctttctgcgaagaagggcgtccaagcccacgggcattggttgccttcttcacctgtataggtttattggctagagtcacacttatcctaggaggtatgggatccgtagggttatgagggtcaccaaactttgttttccccttatcctatgcaagagttgaggttctagcatcgatagggttttctctgctgcttttgtcgacacactttactaaaggaccatattcagaatcttcttcttctagatctccaaacttagcttggaggcgagccctcattctctacattttttttaaaaaacttctcttgaggggccaaattttcttaggtttcatgcagctctttagacactcaaactacttatgcatgttgctcatagtagtatccatccgtgtagtacttgtgtttgatatattgattgtcgtcttcctcctcatcttcagcatctcgatcttcgttgacttatttgtgataattatctaggtcaccctctcggctgtcaacattggatgcatctccttctctcacattgctcggtcgggtgtgctctggagagaaagggcttacatcttccatgacagagtcgaggccaccctaaggagtctttttctcaattattttttgggtagccaccttggtttcaataacaccgtggcttagatctttctatagctctcaattaaagtacaaaaatatttacaaagatttttggaaactaatcaaataagagcttaaaaaatagtaaatacaataaataggaagacaagaatttttaagtggttcaggcattaatgagccctagtccacaagtcagtattattagtgttaagaggttggtataatattgttacaatagtatttgcaagaaaccctaactctgatctcttgatttctcttgaagaagaagaaagcttagaggaaaatttggcaaagctttggctatcttgtcttttgttccccctttgtatgtaaattacagggtatttataggctaaagtgagtccccaagaaggttttgtgctcgtgcatataagcagctggataataagggaccattaatggtacacgacacgtgtcaccaaaaggtttcaccttgaaaagaagatgccttgacaaaccctcaggcaaaaaggagtgttcagaggtggggcgtgcgcactacaatagtctaaagcagggggcaagatctgatcctgtgttagaaaagtataaccgtcgctggagcgatctgagtttctctcgttggtagtcgtctaacttctaaagggtaatcaatgcccgtgataaactcttcaactattcttccaggtgttgtttgggcataccctaaacatggtctcctccaaatactaaaaggatattaacccttccatgtctcagaagtcattgtaaggcaggaaaatctttgtgtatcctttggtcttaatttgttcctggatccgtgaagcttctctgtgacctagcctaattaggtgggcataattagtgactgttcgaggctgaacttctctttttatgccacatgtcattcatccagaaacatcgataacacattcacacacagttacgcatattgatccactgtatatattgtttgcactggtagaaagtgcactgacatagtgtatcgatctactatcacccagatagaatcgtactaccacgtggtcctcagtaatccagcaagaaatcaatgattatatcctcccatttccatttagaaatcttcaaagactgaagtaaatctcctggcatctcatgttctaccttaaattgctgacaagttagacatttcaatatgtagtcaactatatcacctttcattcctggcctccagtacagtactttcacatctttgtcgttttcggatgtctcattaggcaataagagataatggttactttataaagtaacagtaatagtttgtcttgtcttagcagacaaatacttgacgttaatgaatatttacattgtgttataggttcttgctttcggactaagaatgtgattattttgattgattatatgagcattattagttatatatgtatggttttatgtgatattactttttttttgttgagttttagtgactcacgggtattttgtggtgcagtaaggggaagggctagataagacaacatgagttagaagtcgtccccaacaaatgtgcatatcaactcattcggctcgcagtgccgagttgttagaattttgtttcatggggcttttgatgtatatgtgtattatgttgtaaaactgcaaatagtgtttttttttgtaaaatttcaaaagatgatcttcaactttaaaagtttaaatgctttaaattttatatttcagaataattaataaatttttaattaaatcacaattctatttaaaatgttagtttattattatgaactaatttataatagcacacacttgtggcatccttatgggttaggacgttatagttatattcatgtgttgtggaataagttatttggtgtagtgacataattatttaagacattctgtaatgtttgagcaatttagaataatttttaatataaaaaataatgttgaataatttgtttaacgcatgtataaaataaaagaagtacacgtataacaaattatttgaatattgtttttggtacattaaatttttttagaacttcttagatatttttagaaagtcttaaacaactacattgtagattaaaaaaaaattgaattaaaactatctaaatatggaaagcacaaaaagtgcctcataaatgcattttttacatgaggatgtaccatataattttctaataataaagatatataaatatagggtgattctacaggagacacacaaaattaaacatattgatgtaccaccaaaattttgaaatgtcattggttatattattagagtccagaatattatagtaggttgcagcacatagaatatttttatgataataattatatttacacttatgaataaaaaagtgatgattttcacgtaaaaaaaagtgatgatttttataatatttaagggtgttgaagaggagtttctgctttaagccaggccacctataagtccactcgatgggtatgaatgtgaccaattgtccatcaatttgagaaggcacaagttaagtagcagcagttgcctctttaaagtagttgcgtagtagtgcttgcctcttgtaaataatattttgttgtttgtataaaatgaatcataatgggatctgtacagattgaatgcattagatgcaggacatttttcaatctctattaatacaattgaacacatcttaaaggaaataatctctttgtcaacatctttaaatcacacgctaaaattctttttcatcatcaaccaccactttcattgtccctatggcagtacctctgtgataagctatttttgtggaaatattgaatcagataaaatatagaaacacacaaaagaaaaaaaaattgacttagattaaaacacaaatgaaaaattaaatcactaaatattgaaacatggacacacaaaaagacagagatattgaatttacttgttggagcttgaagctttgttacacctgtagccgtcgttgaggagattgggtcttgggtgggagtcatcaatgggttgctgaaggatagggagacatggagacagagtcacagagaaaaggatggaagtctggaacggagatgtccaaggcgctgggattgagggagaggggaagagaaattcgtcgtcggctgatagtgagggagacgagagatatcgagaggtttatttatttatttaataattttagcataaccaatgactaatcttataataattgagaagttctatgaatgcaccttaatttagcaagtttttatccgctagagcaagtcttacaataacaaaggcttcttttattacttgtcaccaattatattcttagtatattgtacacattgatacacccatttaagaggtgtctattacagaatttttcataaatatatattagaataattaatatttttgttcttggtcttttcacacaatctattcaattttatcgtagagtaagtaacgcgatgaattacaatttataaatgcaagcagactaatacatttttacttttttttttcttatgttaatgattaaaattgaaaataaaatatgaattgttataaaaagaaaaaatctttcattctacattttattaacgtaaaaatgataaacagtatttaatttttattcatttatcaactattaactactatatcactaatttcatgataaaattaatagaaaatgacgaaaatattatattttagtagatattatttacaagtagtagggctgagcattgctcggtttgatagtttttttttctatataaaaatctagaattttgttttttgatttggatttgtgcaatttgtaaactgactgaccaatctagaatttatcttaaaactgaccattttgaatttcggtttgatctatttaaattgcccaaatcgaacttctttttttttctttaaaatatgatctaatttattctgtaagtacattattctacattctataactacaaccatacaaattaattgttcaaaaactaactgtcttactcttttaaatttgttgcccctgattttgtccaaaatacgtggaccaaccggattgagacacgtagactgaaggggtttgacgttgggataattcagc

SEQ ID NO: 113259 - DNA, 1270 bp, Cannabis sativa
ggtttttgactcttactttcgaatgaattttattgtaatggttaattaattataacaacttattaagtgaatgtcagattgacacacaccatgtttctcaaaaaatggcgatcgattgaaggaattaaggttgaagatcttgtatatgcataggcatcaatactaaatacacatcaaaataaacaactttcttttgttctttttattcctcaaattattttccgaacgaaactctcaaacaaattaatagggcaaaagaaataatcaaacaataaaagaaataaaataaaaacatgaaacataaaaatacatttaataggctggagtgggagatgatggtgatttaggttggtaagagctagtagagtagtaaaagggtccaactgagaataattttgtgctggtgtgcttgaggacattgtaggaagaaagaagatgaccatgaataccatcattaatattagttggaatattgcaggattccaatggtgaatgatccaagtaggccttgcattccttgagattccaaatgttattaatatgatctccaataagtgtagatggagataataatgttgcatagaaatacccttttgcatcagatgctccacttaggattgacaatgtttttgtcttgtagccttcttcacactcagctatacatattatcttagccacagctcctgcaacaagatatattaatttatacatataaaatatatatatttgatccatgcatgtaaacaattaagttttgattctgttgtagtttgaataattattctccacccttttgagaaattttgaataatttaaagtgttgaaaatgagttcatattttcatttctatgacgcttacaatagttgagtattttaaattatttagaatttttaaaaaatgtataagaaattaactttaatttaaggctaattagaatttttgtttcttgaactttgacatgtatcaaattatgtttctgaatttttctggccgttaaaattactcctgaactattaagattgttggatttaaagacttttgttcaatttcattcaattttaataattcggtgattgtctatccatgtactaaatcatactcctcaaactttgatatttaccaaatcacgcccctctaattttaacatgtgtcaaatcatgttccatgaactttaatccatgttagacttttcttactaatattggacaaaagtccttaattctaacaatctcaatagctcaagggaaatttttaactgtcagaaaaatt

SEQ ID NO: 113260 - DNA, 6294 bp, Cannabis sativa
  modified_base (56)..(66): a, c, t, g, unknown or other
  modified_base (2588)..(2615): a, c, t, g, unknown or other
aaggtccattttgtcatttaacaaaacacagggtctaatctgtaacttttgcaaannnnnnnnnnnaaaatggtatttaccctattatgttcaaattgctgtacttagagatttttttgggtataaaagtggtttcagatttagattaaaaaaagacttcaaatgtagtctttgttcgtaagagaagatggtcaatacaataaatgagaagggaaccattgataaatttatataaaaaaaaattattaaattaattattagttatatgaagaaatacaaaagaaaaatattgtacattaaagtggcgcttgattaaaggtaatgaaatgaaatataatgaaaatgaaataattttcattttattttttatttggttgcatagtattggaataacatttcaataaaataattttctatcattttacttaaatgattattttattttaaaaaagaagaaataaccattctaatgcaaaattagagaaattgtaataattttttttttatgtattttaaatttgattccatttctattctcattcctatatttttattctttccaactattacctaaattcacaaaatatggttcaaaaatagacaaaaaaaactcaaaaaaaaacaaatatagatataaaaaagaaaagtcacataacattaaaatatattttaactagtagagcatatattataactggaaaatgttaattagagcattaataccaaatcattaattataatacaaaaacaactagattaaagttcatatcataaccaaacaatagacagaccatactactcgattttcatcattgtcaacatattcactcaataagagattgtttcaaaaatcagaatttgatctcatggtatattctgctacaagctgagcaaaagatgatgctttgttctctagcaatctttctggagagtcgaattcctcgataaggcctaagcaaaaaagaaaaggaaaatagttgaaagaatgagaaaatagaggataaacaccaagaaggtaaaatattaagtgattagaatgcagttgcattagtatggtaccatgactaagaagtagaaccatgtcactgtcaagaacagaagtaattcgatgtgcgattgtaatgactgtacaatcagagaagtgttgtcgaagtgtttgttgtattagattgtctgtagcagtgtcgacggatgctgtagcttcatcaagaacaagtactttacttttcttgagtagaactcggcccaggcaaatgagttgtctctgtcccatactccaattctctccattctctgtaactgcaagtagaggccacatgaacataaatgtgaggctttccatgaaaaactaagaatgcgttgatgttaatgagtgtcatctaaacaaacctgcagaatcaagcttcccttccttcttccttacttcatctccaagttggcacttatctagagcctgaaacatgtaatggagagacaataaacataatgtaagatcaaaaagtttctgactacaataaattgaatagaaaagaaaccaaaatgtcccacctcccatattttttcatctgtgtactcttcgagtggatccaagttgctccttacagtcccttcaaacatggtaggatcttgaggaatgatgcttagccttgaccttaagtcatgcagtccaatggaagatatgttgatgccatctatcacaatctgaccagcagccgggtcaacaattctgaaaagtgtttgtatgagagttgattttccactgcctgttcttcctacgatgctcgttttgagtcctccaggaaaagtgcatgttagacctcgcaacacaagtggcatgtggggggcatatcgaacctacaatatgtcccttaattagaaaacagaaagctaaataacagtttcgttgtagtaacaagcagaatactggttcatacttgtagatcatgaatattgacttctccatgtgatggccatgaaggatctggccgatttgattctatcacaagaggaggctcacttgggatgctagagtattgaagtattctctcaactgagattattttgttctccatttggcaaagattccatataacccaagcttgtaacatattcaaattaagtccatatgtgacagctaaccccgcaatacctttagtatgaaaatatggatataaactcggtattaacaattgcatttggaaagataaaaagattttcaaatatatccatatggaaatacttacctggatcaatagctccttcaggaacagagatcaacaagatcaaagagaaagcaaatgtaatagcagacaacatatccaagcgaaagcatagccattccattgcaccagcgatgctgaactttggccgggaatatccatccatcaatttcatgtttgtttcctggaatcttaactcttgatcaaagctccttatggttgttgaccctgaaattgtttctgcaaaatgttgaattactggagccttgcaaactccaactaatcgtgccagttctctcgctgaaggtatgtagtattgctgcaattttatcaagaatattagcaaaaataaaaacaacaacaacaacnnnnnnnnnnnnnnnnnnnnnnnnnnnnataataataataataataggatatgcttgtcaatgggaagtatgagacacaaagtatgaataagatgtcacacatgaaggttcaaaagtatacctcataccagatgcaggttgcaataataggtatgaaaacaatgaaaacctgccatgccacctgacacattacgataataattcccaaaagttggatcattgagaaagcaaatgatgcaacttgatatgcaatgttcagatccaccgcactttggtctgtcgaagcctaaccaaaaaaaaaaatgagatttttaagccccatagctgagatggagcgaagcaataaaaatggaaacaagaagcattatgcctcaccctattcagaattcttccacttggagtagaatcaaagaacgacataggagcacgaaaaatgcattcatgcattttattgaagagtaatgtggctgtcttatatgaggttgttgccaaaagtgtagatctcataagaacacataaagagcttccaatggctaatataacatatacaactataagtgtggtgttatcaacaagaggcttttcatctgccgaagcaggacttgcccatgccatccaatagttgcttccgatttgaaggccctgaaataaaacttgtgcaagcagtataagaggcacaagagctcctccatatgctgttgtgatgtatttccaataaactgaaaaaccaacttgtcccttctccctttcttcctcttgaacaagctgccctttcggttcattgctttttggttcttctttcttcattaactcacttgcaccgcctgatttttcatcactctcgatgatacattctttttcttctttaactccctctttggcattaagtgctgacaatgcttccttgtgtgctcccacaagttccataaaatctgtcccggaattgagaatgtcaatgtacttaccagcttgcgtaatccttccatctttcatgacctattgagtacgaaaaagaaaacatatgaattttctatgctaatatgatatcacaaagaaatgtccatgcccacaactcacttaccagtataagatcagcagcaggtaagaattcaacttgatgagtaacataaacaattgttttcgaactcaacatacccaatatgcattcctgttaacaaagatgtaaaatactcaatttgttaatattgaaagaagtgtttgtataacaaaaatgtaaaaaacaaatcacatatctagattaccctgaagagatgagagcctgtgtgagcatccacagcactgaaaggatcatcaaacaaatagatatcagcatcttggtataaggctcgtgcaatttgtatcctctgcttttgtccaccgctcaaattgattcctctctccccaatgactgtctgatcaccaaatgaaaggatttcaaggtccttcttcaaggaacatgcttcaagaaccatgtcatacctttctctatccatctctttaccaaacaaaatattctcttctatcttgccactctgaatccatggtgactgggagacataagctgttgtcccacacaacttaagggttcctgagatttttggaatttctcctaggatgcatgaaagcaagcttgacttgcccgagccaacagtgccacaaatagcaactctcataccatggaacactttgaaattaatatctttcactgtaggattttgggaagttatatcccaagagaagttaccatcaactatttcaatggctgcatcagaagtaccccttggaagcctttcaataacatcagcctgcaagtcatcaagacgaagaaaagctgatattctatcaatagaaacctttgtttgtgctatcattgaaatcgtgtctggaagactgtagataggttcttgaagaatcctgaatgttgcaagtgcagacaagattttcccagaatcaagagggacccctaaaaggatgcaagtaccgaaagtgatcaccgaaacaaatgtcggggcgccccagaagacaaatgaggtcatagctgaagtgtaaagatattttctcaagcatcctgcctcagatttcctaagctccacaatcttggatagaaacttcatctcccacccttgtaacttgagaatcctcatgttcctcaatacctcagacgttgccttcattctagtatcttttgatgtcatcaatttttgttgataattctcttgcaatttccccaaaggaatgtttgccaacataactagaatagtggcaacaaaggtggagattgcagcaagaccaagatttttatacaaaatcaccaaggccaatccaacttgtataatgaccatccatggatcatgtatgtaccagctgaaatcaccaattctttcagcatcaacagtcatgaaattgatgatctccccgctggtgtggccctgctttgactgacatgaaagagtcaaacccttgttatagatcatagcaacaagtgctgctcggatccttactccaattagctgtgccctaaaaaaccagtgcctctgcgagaggcactctacaatcttagcaacaaaaaatgcagacaccaaaataattccctcatttttgaactcccttctcccattaaggtattgaacaaatgtgtcaataagatatggaccaacataagaagccagtgaatacagaagcacaaatagtgctgtcaaaagaatctctccccaagctgtgaacatcaaagctgtcactaacttaagtgaggtaactctattaattgacccgcaatctgactcaatcctattccttaaagttggaaaactcccaactacactatctctagtatcaagctgaggaatatcctcaaggtctatggctttcttattgccagctgaaattagaggagctatccaagagaaagtaagaagactgaaaagcccagcttcagaataaggagttacagttgcatctcctatggagttatttgacactacaccattaccattcaaaaggggttcttcaagagtggtatcatcaccttctctctttccccagaaccccacatatatgaaaaacagaccagaaataacagacacaacatcagaaacaaaggactgaacagctacggaaacttgttttttgtatagaacagagtctacaataaggcaatagcaagaaacgaataagaagaaaacccaccaaactctcaataaaaatggaaaccttgactgaccagaagtagaaaatttagtgtgcaagtaaacagagactacaccccaagcaagtgtcctcatggctaaatccaaaagggtcactaagttttcatcagaccaaccattcctatacctgtagaagtagctcaataaacacaacactagattaaatgcagaaagacccaaacaaaccattaaagttggtttataacacaaacatctggctttcttaaccctctcttcccgaagactccccttgaatttctggctaatccatgacgcaaacaacaagaataacaaaacaaaatgcaatgaacccgaaaacccacgaaggaaaatgggtttcatgagaaaattagcacttgggtacatttttaatgtatagaagttagagaaaaatgaggacatgacctctgttgatgaactcaaaaactccatggtctttggagcttctggctttgagtgaagatatttcgtttctaatatggaatatatatatatatatat

SEQ ID NO: 113261 - DNA, 2871 bp, Cannabis sativa
tttatctttgattagaataaagttataaaaggaaatctatttttagaaatgtacaaaatatttcattaaaacttgaaataacttttttttgttatttttttttctttcaaacaagctttctagggaaaatgattttgactttgataagctttttcttctcataacttacaagtcacacaccaatggttgaaatccttcttagaaatctttattcacaatgaattagaacattacaatcacaagctttggagaggcttctttcctattcccaattcgagaggcttagggctctccacaaaaatgagtctacactctagttttttcctcacctctcaaaatgatctctcacccttatatatccctactgtacataacagtcacatcagtctaaatgacaaatatacactttgccgtcctttgatacctgaatttgacttggggcttatctgacttacttccttataatcacaaaaaatactttctaaaatttatctaaacactctccaaagtagcttttaagctctggaagcacttttgaagcgatgctaaacaggccctatgcctagctgtcctaattataatatctaattgattgttagaggctgtgttgtataagatttagttgggtagttagagtcgtgtattttggggttggggctgctaagtttatccaatctagtgtgtatcacataacagaaaggaacaaataattctccagaaaaaatgatgcactgttcctttctcaacacttttacttgtattatttcactcgttaatgcaagttatatttcttataaaaatttgtcgatttaattccttagtatgtgagattaagacaaaatcttgtactttagttttcttatatgaaagtttagtaagtatgccttcattttgatgacatgcttcataatgcaaacaagcatctttttatttttatttactcacaaacaatgtaattatctcagtgtcataatggtagatgaggctcatgaaaggtctatttcgactgatattctgttgggtctcttgaaaaaggtactttatatttatgtgtataatttcttgccatgtatatttcttgtatcattgatagtttaagtaacaaaaacagacaatataatcattttcaatgcttgtgtgattgtcataggccttggttatgtagtgtatgtgttagttttgtttatatggtgctttagtttgctgtattttatgcttgcatttttggatgtcaaacaattttgatagttttttattttatcaacgcatctatttttcttaaaagaacacacatgcacacacaatatacaacgatatctttgtcttagggctctttctattatgacactttctaaatcctaaaattctagattcaacgaagacgacctgagttgcgtttggttatctcttctgccacaattgaagcaaagtccatgtcttcattctttaccaggtttgtaagaattatctgatcactgttaaatattatttcttccttttgatttttgttggaatattaccagttactacactttttttccccatcaagtgtagaattttcaagctattttgttttcatgatccacgtgaatacagtgtatcttaaatcctagtcctttttacgtctgttcagtgtactgtggatttcttttcatggctcataatcaatttaatttggtagcatccacaaaggtctatttaacctgtttatgggggatgatttgaggtctagaattgaatgctaacgtttgtgtacatagaagtatgtcttaaatcttttttgggcaatgcttagtatagatttacaagcatttgttaaagtaagatataattatttagttttcttctaaagcaaaaggcgtcggcaaatggaagatgagactgtcggactaaagatggagcctgcaatcctatcggtggaggtattgtttaagagaacatgacatctcttgtctcacgcaaaagttaaacaaccttattttatggagaaggttattaagtgatatgatatcagattgttatacagagactgagatgccaccacgtctgccttgcttttagggtaggggctttacagtacaaatccaatatgttgaggagcctgtttctaattacatccaagctgctgtttcaacaatattgttgattaatgatcaggtaccttaaattcaggttcttgagacactatagtgggtctacattttattaggagaccacaatcattttcgtggcaatttttcttcttgtgataggaattattcacaaaattcactgtttttgttgcttaggagccaatgggagatattctggtgtttcttactggtcaagatgatattgattctgctgtgcacttgcttcatgaagatattcaaaaccgtagtaaaaactcttcaggtaactagtcatgctgtagtcagtggattatagtggatagtgggatgagtattcttttgaagcatcaatttcaaaggttgctttcaatgttatagatttgtacattgtatacttaatttcagggttgctcattttgcctctatactctggtcttccacgagctgaacaggttagttatacattgtgtttttatctaactggattaaactgtatttctttttggaaagataattatggactttgcttttcttgcttttaggagcttgtgtttgctcctgctcctagagggaagaggaaagtagtgatatcaactaatattgctgagacatctttaaccttggaggtaagatatttccttaaggaatgttcattgaacataatgaagtcttggttggagtgaaactacttgttatcatctgccataagtgaggactctcaacatatttgggataaggtcactcgtgcatgtgacctttg

SEQ ID NO: 113262 - DNA, 2789 bp, Cannabis sativa
ttttaattgttctgtattgttgttatacggttgttttataaaataataatatttttgtaaaagaattcgtataacagtaaaattataaatttttactcaaaatctaatatttgtgtataaaagtccttataatatatgtatgattaaattaaatacatacatgggtatattttattagaccactatatgagtaaaattaaaagatagttgagtcatcatggactctctatacaatccaatataataaacattctcatataatttatgtccactaaatgacataattaatatatttttttaatttattttgttgcctaatttgtcaccattatttcaacatatatagttatataattaggatgacttgttagtgatgactatcatggactttcctgcattggaggccacaaaatgggatttcatttttggagggggttttaatattaaacaaacattaacaatattagatattaatatatatatataaattaatatattacattatttctttttgcattacactataattaaattattatttctaattaataaaagaaatattatttattactactagattattactctcttttctccatgaaacattagtttattcaagaaaacaattggtttattcattgcatgttcaattattcaacttctctttaaagaaactttaaatgaatattatatatttatatatatatataaatgttttcaagtttcaactttcaatgtcaatggagaaaagtggattaaattgaaattgaaacaaaaaattaattaataaattgatccaaaaattaagaaactacataatttatttagtaaaaacaaaaattgcaaaattatcaagatcctattctatatatatccttttcagtgtcctctattggtaactagtaaaaaaattaaataaagaaaattggttatatattgttgggtataggactaagctatggtatccaatacaaatggatccattaaatcagtcaatgaatacaacaaattataacaatgatgatgcttgtcaagccctctatcactttccatatcataacataacatttggaagtcttcacattttaaaggtaatattattattattattattattagaagacaaaaaaaattcaaaataaaataataataagaaaataattaattacaatattacaaaataataattattattttttttgataggagggatgagatgacaaattaggttttggataaagtaaaagcttttaagttttaatttgatatatttatataaaaatatattgcagtctttatctgttttgattaataaattcatcaaagggatattagaaacagccaactcactaatcaacatatgaaagtttaaaaactgcatgaaatcagaatcttatcaaggtgatttattattgtttaagcaaaaaaaaaatatatatatttttatatatattttcataatgtagtgagtgagtgagagaaagagtgttaggtacaaattaataagacccaaaataagtttaatatatggtgaaatttgtgtttttgaaactcctcaattgtttaaaagaaaatgccaaagaggattgaaagagataactagccaacaaaaacatttatatatttgtataaaagaatgcatggatgttgttttttcattgttacacttacactatttttgtaatttataaaatttataggaatatttttataaacatctaaaaatgatagaatttttacaatacagatatacaatattttttctttttacaaaatcatcgttttctcattgttttcaaaataatattatttttacgttggtgttacgggaaaacatgaacacaacattgtttttttttttaaaaaaaaaaaatacaagtgaaaaacttgtaaaagaaaaaatccgtaaaatataaagaaatgtaattttaagtactttcggtaaatttcctaatggtatataaaaagccctgaaattgtattataacatacaaattttacggtcccattgatttatatatatagagtaatttgcgatataaatactaaagtttaactttcggttgcaaataaatacctaaatttaattttcgatggtaataatacctaagttataattctggaatttctataagtacttagatgttaagtgttaaataaattgccacgtgagaatctctaattagttcaggtcattaaatttttgtttttttaagaaaaataattcaaatgtaccaataagaaaatgacacatggataatgacttgatatttaatggttaggtacctaaagttttagaaatataacttaggtattattaccgctaaaaattaaacttatgtatttatttgtaatcgagaattaaacttaaatatttataccgcaaattactcatatatatgtgtggatgatgggattccattgatgagtcaattctaaatttctaatagacttattggagggtttcattggtgtgcatcgagtagaaattgaacctacgaattcaccaattataatttaggcactttaactattcaaccattaatgcttagcggggatcttcgtacatggtgaataaccaaaataatctaattgaaatgaaacttttagggtaaatcaatacaatttaaggggacttaattttaatgaaaggacatcaattcaaataatttttgaattgagagggatcaagaattctcactatttcttagatttaaaaagttattttaatagaaaaaattaaatatatatatatatgagaaaataagtaaggataacttgttatgaca

SEQ ID NO: 113263 - DNA, 2113 bp, Cannabis sativa
tggaattagatgtagaagaaaaaatatattattcaagaaaaattatcatatatatataaaatgaatgggttactgtttagttttgaggtagaatctccttatcttatctcaaattctaacaatatcaaaatcaaaagagagtgaacattgaattcattacttgatgggctgcagcaacttttctcaaataaggaacatttgcaatgggaccaaccgggaaacgacggtggactagaccatcgtgcacaaacatgtaagccatcccaaacagagtaattcctaatccctgtaatgccaaacacatacttatttcaccctaatactacagtaactacactactaattatttttctcatttagaagaaactttcatagtaattaaattaattgtaactaaactaataattaaaactcacagcaccaaaagagagtccaggaagaagaccagtgttgaagaaaccgtaatacaaaagagcaatggcagggaccgcgttgattatggcaaacacatcgttgtgctcaaaaggtccatctctagctctgtggtgcgactgaagaaaagagaatcgatttaagcacaaccccaaaaaatttgaacaacttttaagtcttaaccaatcactatactacactactcaagaggacaacctcgtgcatatgccacaatgaagcgtgccacagtgctctatgggcccaccttgcccagaattccatgccaagctgaaataaaaaaacaattgcgtgttgttgtaaaatatttttattgattgatgaaataattattgaatatgaaagataatcaaaagagcttacagcagaaccaatagctaggaaaatggtaaccaacatttcagcaactgggaattcgccaccctgaaatcgaaaatataaacaaaatcccattttcgaaaacggaaaaacagatattcgaattttgaaaataaacatgaaaatataatattcacctgcatttgccatgaaaatctaaaataaacggctgtaatggcagccgaagaaactcctaggctggacagaactgcagcaacaagataagtatatctctcaattttctttcttgccaatctatcatttgatattcttggaactataatttcagcttcggacttggattcgtctaattttatcgtatttaaatcatgggaaacctgcatggcgtgatgatcctctgttttcttgttcaaaacaacgataattattcccttgccctgttttctcgaataagtataacttgttcgattgagattggatttttgagctaagaacgagaaggagtttgatttcgagatgggtttcggagatggaatgaactttcttccgaaactgtatgttaaaggtccagaaccggtcaaaacgccggcagccatggacttaactcgaagctcgagtcaactcgattattataaagtgtcagagatttttctgaataatagaaaatttcgatggaaacaaaaatctaccggagaaaaagatatttggggcttcgaaatcaaattattgtgaatattttatttatacagatcctgaggtgttttttcagaccatcattgttgtccaaaattttctcttagtgaagtaatgttttcttcaccgagcttttagccaaatcacttaaatatcaaattctataattttctcaatcatataaatcaaatcccacacgcataagaactctgaacaagctatataatggtggagatatttaaggaaagtaatgtttgaaattcttatgcttctgtccattgacttgtacttgttcggcgtgctcgatctactcgaagttggataatagacgttaaaggttcaaccttaacacgtttaactcttacgcaatctgaacggaacttataatattggaattaattagatttactaattaataaatcttatcgcaaattttcgttaactatatttgagcctaaattgtaatagatttgcacatataacaaaaacatgtaaagaaaaaataagaacacaaagagtctgtttggttgtgtattcagttttcagtttttaaaattctgttttcaaaagtaagaatagaaaataattttttgtcattttaaaaatttaagggtaaataacattttggacc

SEQ ID NO: 113264 - DNA, 1985 bp, Cannabis sativa
ctcgtgtgagtttggatattataattttaagccatttcctttcatcctcttttggtagaaaaaacaattgaaccggaaatattctttctcataaacttggtagacttaatgaattgcaggaagctggcggtgaagtgaaggcagaaggtgctgcttttcaaggatctggattggcagtaagttgtttaatcctaatagaaccacttcaaatctggtaaaattaatgagcttattattctcttcgtgatccttgaatatgtatttttccccgttttgcagtacaagagcttctgtagaacttattcaacttcgtctgcagcaatttctaacaatgatgaaaaaactactcgcaatgtccttcgtcccctatcacctcatcttcctgtttaccagccccaactcagttcaatgctttcaatcttcaatagaatatccggttcttacctaacagctttagtattgttcaactatctctctgttaaaatcgggtgggtgagcttcaccagtgcttatttctaccaatttatgttctactcatcaaagctcttcccaatatctgtcgagattgcagcattagctctgtcctaccatgtgatcatcgggattcaacatttagtaaagagggcttgatttgataatgctgtggcgaactccaggtgcgaaatttatgtctttgtctcgtatggtcgagcaggagtgctgtggctatgtttgctgtttcacaggttgaatatcaaaccaaataaattgaaccggggtgaggacctctttttatggctgtttaattaccagtaaattaggagaatttagagtgacaatgttttgagcattttgttttaatttccaccaatgtgtgatacattacatcatctgtgaacattccctttgtagaccaataaaaatggttcgaggttcatacggttttgaaatttaggaggtcataggaaatagaaaaataattttaggggcttatttaggaaaaaaaaaatatggtattttttaaaattaataaaaacaatatgtaattttaatagtgaattttttttgagctcttggactaagtggggcctagacacataatagggatcaacttagtgagttaatagacttttggctttgtttagttatatgtacttttatatgctcaaatccttcacttgaaaaaattaaagaggaagctttgagagtttagcactttgcatgttaagatatgctattggtttttatcgctaaaaaacaataatgtatctaaatttgttatttggattgagaaaactcattttgaagttaggattaggagttgggcataaatcgatccaatgactattgactaattcaattatatatgactatgaaacattagatatgtaattgtggtcggattgaattggatgttatttttgaatatttaattggatcagattggatgctggatgaagtgtttaaaaattcaatacatctaacattcaattgaattaattattagaaatatcttttaaagtatttatatatttagcttatgacactttaatattcaatgacctacaattactaaaatgattacattatttgggttaaacttctaataatataccaatacatgtgagctcattgagaatattaatccaacaaagtacatattggataactttgaggaaaaaccaaaaagaaaataattatggtctaactatgcacatacacaaaatttaaaaactggattagaaaaaacttaattttaatagcgagatatggttgggaagtacaaatccgaaaacttgaaactcgttaaaacccactcgatgtgtacccctactttatatgcttttggagagcaaaacaacaagtcattcattatacaaacgacatgtcgtaacatcaaacttgtaagctgaaagatactagttatttggctcgtttacatttatccatgaaaacgacttgtcgtatatatactagggctgtacatcggtcggtttagtcggttt

SEQ ID NO: 113265 - DNA, 977 bp, Cannabis sativa
  modified_base (722)..(723): a, c, t, g, unknown or other
  modified_base (791)..(796): a, c, t, g, unknown or other
tttgtctgtgagcttgagaatcaattcttcttgtgtggctcactaacagtagaatcatccacctaggttaggaaatgtactctacgtgtcacctagatggacgccacattattttttagaaacttggatatcatttgcccataagtctgcacaggatctttttggttgcacatggacttcctcgaccacgaagctgatatctggtgtttgtcacattttttcacatgggcctttgaaatttcaatcattgtcggccaaaagtaaccttgccttagtattttcttagataaactttgcctcccaaaatgatttccacaaaagccttcatgaacttcagttaagagtcatctagcttctttatttgtcacacatctcaacaatggcatggagagatttcttctgcacatcacaccatccactactatgtaccttgcaacctttatcatcatttttcaagcttcattcttgttgctcggaagttctccaatattaggataggctaatatatatgggagtcatccactttggtgtattatctatcatcttgattccctccgtgcatgtgatactgggccctttaaaaaaattgtatcgggactaagttttccttgtctattactgtgttgcttgctagtcgtgctaatgcatcagctgctacattttcttcccttggaattttcttaatggtgtactgttagggtttgtgccctaaataaaacccnnttcaatataattagatttactaaataataaaagatcaaaaattgtttatgttgcatggttcacatgannnnnntcatgattatatttaatatataaactattaagtccataacatatatatttgttcatgattatagtatcgtcagcacagtgcaatataatcatgatcatatgttcaaaacttcaattcccatgattttctcaattcattggatttagaccaacatgataatcagcgagaaggtatacttaca

SEQ ID NO: 113266 - DNA, 4352 bp, Cannabis sativa
  modified_base (4165)..(4183): a, c, t, g, unknown or other
tgtaacatatatttaatcaatctcttattctaatccttgtattattttacaatagagttgtaatgtatcttgatttttcttccattgtaattatatctctaacactcttaacgttttcaaataaaaatctctctccaactctataactccctccctctcaaacacactctcactccggccacaacccacgactcataaaccaaacccctccctctcgatttctctctctttcactatggcgaactcacccacacctacccccaaatgagcattctatacccaaccacgagaagaatcgaccacaaagacccacaagaaataccgaagccccaaaaccgatacctagtccttccgtccacaaccatttttaccattgtttacgtggataacaagacccgagccacccacccatgattctcacaagatttggtaagtttgtatttatttatttattttgtttgtttttgagtgattctttcatttttttttaggttttgtattaaaaacttgtgttggttttgttgattatggttgagattaagaaaacttgttcaattttatgttgatttttttgtgtttgggtttaaattttgatgatgcatattcaattccatagtttttctcaatttatcgacatttttcaacattgatagcaatatttgttgatatcccctaatggcgtatgtgttctgtttactttatcagtttatatgaattttgcgacgtctagtgatattcgtggcaatattccatgatatcgttctaatgtctttatgcataatgacaatcagcgacatatagcaatatgttctgcgacgtcttacgacatgttcaataacaacataacacaacatattgtcaaagttgctttacaattaaacagatgtcgtgaaaatattgctaaactagattcgctatttttatgacttctcacgacatatttaagacacagtttgtgatatgaatttttttagtttttaatatgtttgcttataatttttgcagagggcttctaaacttaaacttccagcttctcaacatttcacaagatgtcttacctatcagggttcaaataggtttaaagatatcaagaccaagtttaaggagcttgagttgattggtacgattaaggctatcccttttgggtatttatgggaagctagagtgttgactttttctagggcattggttcacaacctactcttacggaaggtgaaagctgataatgaaaaggaagatggggtatggtttcatgtggacaaacatgacatgagattcgggtagatagcgtttggacttattactggcttacctatgggtagtgcccatatagaggaagaaatagaagccaagtccaatgactgtctagtcaggacgtatttcgaatggaagagttctatgtagttggatttactgttgctctaactggaaaggtgggaagtaaaagatgatgtgtacaagcttggacttattgctttttattgaaggtgtgttgatatcgaaagaggacattgcccaagtttggtccaacatgttaaaatttgttgtcaacgaccttgacttcttcttaaagtatttgtggggcgagtgtgcttttcataagttaatgtagtgaataaggatatacaacattacaaagataatgttgacaaaaagaagggggagaaagttactcatcagacaaagtatattgttagtggatatgtacctgccattcagttatgagcatatgaagccacagagaaagtgaaaaaaaagtgtgttaaatgcagcgaaaccaagttttccataatggtaaattagaaaatcccaaagggccaacagaaacaggatgtaaaggcgagcgacatcgcacaattgttcaacactagagtatgtttctcttttatttttcatggtgttgtagtttttctcttttttttgttattttttatacgttttagtgatatcttgcaacataaaacgatatagatttgcgacgtggtgttgtagatttttcattaaaaatgttattttaaacactgacttagttatttgcgacgtgttttgcagcatattgtaattttattagcgacatggtgttgtagattttatttataattatgtttaattgttgttttaaatgtcgtcttagttattcatgacatgtttgcgacatattgcgattttatcagcgatgtggtgttgtagatttaatttataattttgtttaaatgctgacttagttatacacgacgtgtttgcgacatattgcgattttattagcgacggtgttgtagattttttgttgttctcgacatattgctaatcttgcgacatgtcgcacttttatagcgacatagtttgcatttatttgcgatatattttatggaattttgtgacattttttaatttttgtccttttgttttttttttacaaatggtcataaagaagtgcttgttttcctaggcagtgaagaggaatatttcatgtccattaataagggtaaatttcttctttattttgagatggacatcgatcagacggtgaacgacgatagtacacaggattctatgtttcaaacacaagccaagacaattaatgaggtcatgacaaagacaaattttgttccaccaccaccagctccagaaccaaatgagttttctaattcaatcgctctttctgccgcagccaacacatccaacgataatgacctaacaaagaggttgaataaacttgaggcccaacaagctgcctttatattgttgtagatagagttcttgaataactatctcaatatgaggcgatcctttttggaaaatcaaaaagagctgaaagagactttcatggctcaaatggccaatttgatggcattattaaaggcgaaggaaggaaaaccataaccatcccaagtagcagatgaccaagtagaaaatgaccgatcagatgatcaatgtgtggagagtgactatgaagatgtgttcccataagattgggaaccaaatgataatgtggcactttctactcccacggatacagttatcacgactattggtgatacacaatcacaagatgatgtcctactcctgcttagacccccggaaggggtaccatttgtgagaaagaggaagttgcctcgctattttaagactacactgaggaaaagaagaagatgtgacttcttccaaagaacgtagatccggaaagaccaactgactgtaaattgctacgtacgtttaagaggtggtttcttggggacattttgaatagtcgtcctaggaatctgcacactggtgttggtgatgtcaagttcttcacgaagtttttgctgattggggaatggttggacagtatactacactcaataaagaatagtgtttaagacttttttgttgtctgttaggtttttgcgacacttttgcgaatttttacgacatatactacacttaatattgaatatagtgtttaggaattttttgttgcctgagagcttttagcgacattttcataacatttttcgtgacatatacaacactcaatattgactatagtgtttagaattttcatgacatgtcacgacatgtagcaatatagtttgcgacaactagcgatttgatttgtgacaccttgcgatattatctatttgttgcaatattcaaaataaatttttccgaacaacattataaaactctttatccctaccactgacagtattttaaggttgcaattcaggaccatagacctataattctaagttccaataaagtaaattatttattgagtctcattaactaaataatcctgtttattaattccatgattactccattataaatatggaaatgaactcttagtaattatataattatatttattgagttttactgcagtgtctattgatataattaattctagtgatttgccctccttgtgttggttcgtaattagttttggtcaaaatactattttacctttctaattactactttatcttttagtaccattaattcacttgtagaagtataatttagatcccatctaaatttgcatgtaactttccagttccaaaattaatacataatagaaatcaatattcgatccgttaggaatgttaggattccttaattgtagatcgtgttcccaaccatccacattattatattcctaaaatagaagttgtaagannnnnnnnnnnnnnnnnnntttaacgagtgaatcaaagaaacttataacatgaacatgagttcatgattactcaaaatttaggtcaatctattattgattatctttatgatatgaattaggtatttatggtaaatagtaagtttgataaagacaactttattcttatcggtcattgtcatatataatc

SEQ ID NO: 113267 - DNA, 1311 bp, Cannabis sativa
ttacaaacttaattaagttattattgttattattactaatttataaattattatgatgtaattgaatgaaaaagtaatttaaaaactaaataaaaatgataaatggaaatagcaaagaattagaaagaaacttcatataagatgccacctagaatgctttgtgcattcctttatatagatatatagatcctatatcttaatagatttaatttataaattttattttttataaatgacatttaatagaaagaaaaagaaaacaatgattcataaaagggcaattcagtcataataaaaaaattattcatcagattttaaccaaaggtaccattttttactgctttttataatagaggatattattaataatagaacgtactaaactgacattttaataaaacacagggtacccaaagagtccgaacccttttttttattagaataagtgggcttgagttagtttttttttattattattttgttcttgcctttattgaattcttatgttacaatcctttctctcgatttatccctctttcctttggttcccatgctattcgtctacacctctgtctaagattccgtcgacatcaacaaagccacccaaagaactgggagaaccccaaaatctcgaaacccattctctgagcaaccgacgagcccaatccgagccactaacttcaccctgtcctaatcaagagcccataaatcgaccctaaaaatcacacctaatccttctttctctccgtctaacccaccggaccgcgaatccctccccctctcttgctccttttctattcctctttgccaaatcttcgagaacccaccaccaaatcccaaactctcctttctctctcgatctccatctgaaaacccaccgtcagattctaagaggattgtgttgagaaagtcaaccgccccaagctcttctctaagcttaattttcttttttctaaaaaaatatgtttgaaatgtataaatattgtgagattgttatgagttttttttttcttttaaaggaagattgtttaaatttggcaaatttcctctgagtgtttcgtatttgttttgggataattttcaaactatgatattaatagcataaaattgagagagtttaaaatatgacaatttttttgaattaaggtgacattttaagcatagaaacataatttccctttatattttatttggtatgaatataattcaaggaaaatggcggcaaaacccccaatactttcgttttggtttcattaaacccctaaaatccaaatttctgcgggtaaacctcaaaaccaggaaactgttagc

SEQ ID NO: 113268 - DNA, 1089 bp, Cannabis sativa
  modified_base (1054)..(1063): a, c, t, g, unknown or other
ttgatcgaacaactcttaacatatattaaacttgtaatgccttactcgtataaccttattcatatactcaattaattcatgtattgcatgcatagatatagaaacttaagggtaatgacgctaattcacatttttaactaaggattttacataatatagaagtgcgccactacgttatactatatgtgcaaggttcaatttcttacctgaaagctaaagtatgaggagaatttccattctacaggtgatctcgagcaagtgtcggtattcctagtcacaatcttaaatttatacaaaatagggttaattctaaaattatatttaataaatattcactattatgactccaactctagaccaagtaatagagctcgtcacaagcttaccaacgatataaaaaatgcccaaaacggagttcagaataaaaagttatggtcaaaataagtttacaaaaatttggaccaaaagggaattaacacgcgagagtgccgctacgtatctcttacagggaagatcccctgttttcgagactcatgggcaccgcgacgaccaaaaacatggccgcggtgcctaggtttaaaacctagaaaactcaaatattaccatttcaaaattgcaccaattcaaatccaactttcacatatgttaacatattggctcacaaacccaatataaagtataaatatgtataatcaccatcacaatatatacatgcctaaacacacatatttcactaagctcaaaattacaaaattcatgatatcaaactcaaagaaaactaagtagaatttatgctcaaagtcaccaaatttatagccattaatcaactagaatttaccaaccctaactcaactcaaaacccaaattatcacaacaagaaatttggttccatccatagaataacactataattcaaattcaaaaatcggtccctcttaatactaattactataggtgtcccatagcaatactactactcattcagtaattactagattgtacattagccaaaaagaatatatagggacacgattttgtcccgtgatgtactttnnnnnnnnnnattccgtggtacattaaatgggtctc

SEQ ID NO: 113269 - DNA, 2708 bp, Cannabis sativa
  modified_base (2606)..(2608): a, c, t, g, unknown or other
tagaaaaggagaagaaagaagaacatgggaagaacgggagaagaagaacatcagaagaaagaagaaaaagaaaaagggaaaagaatgtacacgtagacgtaggttatcagaaggtttttgtggatgtaggttctattacaaacttacagtatagctatatttttttgaatggacagtaaaactatattaaaaacaactatttattaatttataaatttattaattattcaattactatatatttatatattatttatttataactagtgagatattgtggcttattatttaatcatttaattgtaattttgaggtttaaaaactttttaaaataattaatagaaaatgatagaccgccaactttgttttaatggtatactagatcaagatgtctaactttgttgtaaaaataataagcaacttatttatttcttatgtctactgttatatttgaattttaaaagtaccaaaatgtagaattccaatgtccttttgatttaaaataaatatatattaacattagtattttgcttgattaataaatattagaggtcctaaaagtgtagttcgtcatataaacaatgtaaattgtattacgggtgcaacgctcaccatcttcgaaatcgttttcgacgatatttggctaaacttgcttgctgcagcagcagtcaaacaaacaaaatttatatgtttacacttcttgggtcttgttaacaaaaattatatgtcctcttcttccccttctcgtcttgccaacaacagccagaagaaaatggctacactacaacaaaattgtacaacaacaatccaacagtggtgtagcctatgtaaattcatatatagatatatatatatatacatattaattgtaattataatgttagaatgttgtattttataaactataaagaaagaaagtattcttttaattgaaaaataaaataaatgttctaatttccaataatgaaacttatatgtcattttcattgtcttatggttacaaaaactcaacaccttcatgattttttcattttttctgaaacagaaaaaagaaagaaaaaaatgttacatgtgtgcttacaatttagtatataaagtttcatataagtatgaacttgaattcaagattaatgagttgttggaggcaaggcgagagacaatgaataaagctcgagtagaagagaagatgtcctacattgagtgggttgatcatgctatgagaagtaacagattcgtcgagattataatttcgattcaagagaaattaaaggatattttgaggcagttttgtgtggaaatgtgtgaactcatgtttggttcaaccaaatttcgatgttacttatggttagaaacacattcttaagagagactaacagtccaaagctagtaaatgttgagaaaagtcttgatgagtgtctgaaacaagttgaagaatttggatacaaaattgtaggaaagatgggggctctttaattagtaccatcaatgttcattcttgtgcataggaagattgaaagcaaaagacaaattgaacaagaggctgagtagtactttggtatctaatagtactcaagatggtagctcttcacatattcaatcccaagagtcagcaagtgaaagtgctggtgttaaagaggaagaaaaggatttaagtgcgttgtaatgtagctcttctgagtacgaattcataagtattgcaagtcccgacaagtgaaagagttgttacagagggagaaaaggatttgagcgcgttggaattcagttcgaatacagattcacaagcattgtaagtccaagaatctggtgttatagagtgagaaaaggatttgagcgcattggaattcagctcttcgagtacagattcgcaagaatcaacaagtgaaagtgttgatgttaaggatgatggaaacactcttcaagtaaaaattcacaggctgtgcaaccagaagaatcaactaaagatgaacatcaagtgttcaagaaagaaaaagatgatgttgtttgtcctaaaagagaaatcatttaggcttaagttaaaaccattaactactacaattactaaagctgaagttaaaaccattaagaataagagattttcaagctcattgtccaactgatgaaccactattatctaagaagaaacactaagtttaactggttgaggaatggaaaagatgataaatttgagatagaaagtgctactgattcagaggagtttagagtgaggaacatgtccaaaatggaaaacaagatttcaggttttgattgaggaaagacaaaaaggcgatcgagcatgctcaaaatgaagagaagaggagttacttgatgtggtttgaacttcatactaggactaatcacaaaagagtcaatcagattacactaaggaaatctcattggagatatatatgaaaatgccatacatcttcatgagaagcttgttcatcaaatgtgtaagctgattttcacctttgaaatttatgggacaggtaagaaaatggaatgacttaaaacaacacatattactattaagctactgctactgcaagagcaggatgatattggttgttggaattattttaccaggatcttagtgttgggttttatgnnntaaataaaactctgtttcaatgtaatccagattattcaatatcaatcaagaaacagaagtattttttattcatttaagtatgttttggttcaccttatca

SEQ ID NO: 113270 - DNA, 4661 bp, Cannabis sativa
  modified_base (323)..(329): a, c, t, g, unknown or other
aaagagcaacccatgaaaaaaaaaacggtcggcaaaaaaaaatatgaaattacaaacataccctttaaaattgggctgaatacacaatatgggatttaaaatttaatttacaaatatatacctttacatttggataaatgccacaaaagtgtggaaaagttaaaaaagccatatttatcaaacttttttgtagaatcccgtatttggtgtaatttttactttttattttagcgagctagtcaatttttattataaaaattaaatgggctccctatatgcatctaggcccaaagcaaatatataggcacaggcacacactgatnnnnnnngatcctatcatgttactagatttatacatagatgaaagaagattacaaaatttacctgtaacaaattattaagcagatagctcgcatgcatcgaataggggacgcgtgttagcgatttgtgaaatatatctcatatatctccaaggttgccaatcacaaaacaatccccacattgatgagatggattcgtgtcttcaataaaggcaatgagcctaagtctcccattttcttcattgtaattatagaaataaattacgttcccattaaacttcaatctaagagtaaaatgctattataagagctttcgaaaggaataagttattcttattcatattctcacaagtcaatacaatagaaaggagagtaggctactgcgtactaactataaggggttgaacctctataaaggctagtgttttctcttctttatactattcgctttttgttatttaatcattctcaatcgctttaatttgactcaatgtcgttatctaaaaacgagatcaatatatctaactattagtatttttcttagagtaaatctttccttttcttttgtattaatataatttcgaaataacatatattattttataattcttgttttttattttaatgtttattatcatattatttacatttcaaaagaatttttcagatttttataagacaagtctttcttatctctatttcctttattgttgtctccggattaatttagtcttattataaatcttttcttagattttgtttttcttatgccatcaatttcttatttaaagaaagttcaattactttgttcgcctcatatgttataattatagtttttaagtatatatgatagtaagaccatgctgattttttgaactaattttttttgatgattttgatgccttttatacattttgtgctacttttatagcttaccgctaattatttagagtatatttgttgtatggtcaatgaataatggaagtgtttcattttatactcatgacttctacaaataatttttcaaatttgacaaataagtgtttcaagtcttgaattataatatggattgttttaccgtctttattgatattatctatttttttattaaattgtgtggtaatagagttttacttattgttattctgtcggtcagcttttggaaatacctactgttacagagactttgccaagtttattttaatatataatctatttaagagttgttatcttctaactattgagaatttcttatattagtttttaatatcatttgcagggagttaattcactttttaatcttatttcaatgttacaagttgaagctcttttggtgtactgtttgaggaagttataaattaattaatttttattggtgtcatacagctattagtgtaattaagtagcaagtctcatataaattaaaaaaataatttttaagaaatattgctaaccaatcgtaaaatatcacttacaaaaaaaatgttggacaccaatagcaatgttcgttatgcaatatttcgtgatcatacttttattcaaagtttttttttttttttaagaattcatttatgcaaagttcattctcctatatatggctgttcttttattgcaaaaatgaaaaatctatttctgtttgcattaagcatcattgcttgttctttttgatcacattttatgaatttgcttgtttttcctatttttaatgctacaacgtacatatacatagatattacattagttataatttatattttctatgatgcaaaataaatttatacattacctaacttatagcagaaattcatcattaatgcgtcatttaaaaaaaaaaaaaaatgagtcgtcaatgcacaatagttttcaaatttattctttatgaataacttttttttttttttttgggtataaatgaataacttcaaactctctattcagatcaaaattgaacgatgtatacaaagtaaaggaaagaaaaaaagtgaaaagggaaaggaaaaaaaaaagtatgtacccacgaacatcagatagattgggaacgtggtcttggtgggcaagaatatagtgttggtcagccttgggagaaagaaaatggaaccattaaaatgaaggataaagccaagataaaagctactaaagttgttctaccagaatgtcaaacatagatatgttgttatgaaaaggatcaaattatttgttaaaaaaaaatcggaccatacatatatttattaataattttattagcagatttaactatgttatttaaatggaaaaaattaaatttaataaaaatacatatgaaaaattattttgaagtatcacgatatgtgattcttaaatgaaactactataaatgttggggttggatgcatttgtctcaacgtatgcagtgttgcccagatacgtttacttttagaaaactactcagtgcgataagattgaaattacagtttgattaaatgagtttttgcgtattcaaaatattaacaaacagtgaaatggttcttgtacataaatggttattccagttatctaatagccattaattaaagcttgccaaaacttgtgatatatatgtatacatatatatataatgaatttggtaatgtaaacttatatattaacagctttttttcttctttcagtgcttttcatgagacaatgtggacgagtttttgatgtaaatattggtactagtacgaatatattgggaaaacaatatattttgtatagattaacttaattaatgtatacattgtttatttgtttattctataaaattggcagatgaagggatttttatgtaagtggaagacaatattacaaaaggctacgtaaggtgtggaatctctttttgctaagagaattatttctttatgtgaagttgagatggggagggcaaaaggagatttaaaaccaacaaagagaaaaagagaaaaagctacaaattaaagaaactttagtgaggcataaaaatctatctcctctcaatatataaataatgaagatgagatttgttaaagcacactctgccacaacgattgaatatatatatatatatatatttatacatattatatagtcttcgaatatggtgtgtatgtacactatgtgctagatgaaatgaatctgtagacataaccatcctaaattaaattcatcataaaatggattgttaaaaatgaccaggaatgagagatagtgtacctccagccaatgatgcatgcaaagttcttctaagctcttacgtactatagctttcttctatagtgatttgattgaataaatgtgagctatgagaacttataagattttctatcaaattttttggcacaattcattattagaatatttttacaatcaataagaaaataaattttgattagtagaataatgatgacaattaattaaaatatttagtcaattaataaaaatactgacattgatatacatagaaaatttttactatatatagcaggacctctaaaaaaaatcacattagtgaggtgttattattcaaatgaaatattgacacgtggaataaattttgtgtgtgagtagtaggtgataattttacatatataaaaattaaataaaaaataaaacattaattttgttttttctttttcttcctaacattttttttctcacttctttctaaccatctccatagctctttcttgctcaaagaaaatggcgggtactttttctgttgggttcaaactatattccactctttaaattctctcattctactattttcttcccataactcgacctctctatttcccgccactttttcggcgttttactccatcttccaccttggacttgctttttctctgtagtctctggctaagaaaggaccaagtcagaaatcgttgagagctggaactccaagagccttggagatttcaaattgaagttgaagatcgcagatattacaggtggatcccaagaggagttggagaaattgggagagactatggtagtgaaggcgtgttcagattgttcatgtttggacgccttctttccagatgaagttgttattggaacttattttaccaagatcaagatttactaacatgtctgtttgattataaattataatctaacaccctaaatatgaattcctaatacgataaattaaataaacacatataaagtttagaaaaccttacattgatagcagcaggataatatgactccttctgtgtagatctctagcccttaattcctttctgtcacaaagcattatcaagatgttaacctagatcttctctcctttcgtttggttaaccaccgtgttccgcactatgattgagtacttgtcttgctatg

SEQ ID NO: 113271 - DNA, 3602 bp, Cannabis sativa
  modified_base (3429)..(3437): a, c, t, g, unknown or other
tagtatataataagacgatgtctaacttaactataaaatattagtacgtgagtatataatatttactttggatataaattattactccttctgtgaatatattgttctacatacatataagttaattcctgaaagtttaaatgtagtaaataaatgaattttatttagtgactgaccagtctcgaaaaaaaaaataaaaaaagtggtgagtaattaaatcgatggcctatatatattacaagaaagactgactgacagattttttatggtataacaagcgtataatatagtactctcttatcctctttttttttttatcatgataagatcaaaacgatcaatatattttttttttgataacgcaaaacgatcaatttggatcgttgtaacttgtaaatactgtattaaaggaacaatccagattttacgaataaaaagaagaaaaaggatcatgccgtaatatataggaattgaagagggtaacttttaacgagcattatgtgctctttataaaagaagcacagtttagttgcctgcaaatattttgattgaacttgtcaagttgtcagatattagacatatggttttatgagtttatgtattgtagctaagctaaattattgcacaagttctatttctatgatttataaatgatttttatgttttatttttgaataattagtaattttgtcctttaaatttttaataatacagattttatactctaaaatatacaatttgttaagaatcttgtgaactgttacatatttagtcattgtgttagcttccgtcatattattttacttaagtgatgacgtatttttgttaattagatattttatcccctaaacttatttgacaactatcaaatcatatattctaagaataaaattgaaaaagatttaatattatttctcttaataaatcttaaaaaattaatttagatcttaaaaaaaataatttcaataattaagaaaattaataaagaaattaaaatttttaaactaattaagtaatttaaatttttttatttattatgaaaaaattcatttagatataaaaaaatatattaaaattttatttttgtaaaaattaaattttacaagaacaaattgagtctatttttttcctccgaaaatctaaatttgtttaactaaacataatctttttctagtttaatttctagattttttataaaataattttatatttttattgaattttcgattattttttaagacatgagtttataaatatgaataaatttaattattttttaaaaaatttagtttgtttaaactatttattggattgtcaataattttagtttgattttataagatacctatttttaaataaaataaaatttgaaaagattttattaaaaaataatttaggtttttttaaaataaattagatgctttataaataattcaatattttaataagtttttttaataatttttattaattttcttagaattaatagaatattattaattttcttagaatgaatagaatataataatttttaaaattatttttttttttgataaaagagaccaaattttatcttaattaaagtttagagagtaaaaatactaatttttaactgtaaaaaaaaaaaatagaacctaataagagtaacaattatataactattatattttaacaaaattttttaacatactatatatttcaggaaatgtttatttttcaaaggattgtacatcaaaatatttgacatttttttattttgaaatgaaaaatatttaaggttataattctctaaataataggtggttttggctgaaaggacaatatataaatattattgggcggggtatcgaaagtaacagaacggatcacacgtctctgcaatctgattgcgccacgtaaacgatccttactgtgctttcactgacactgagtaacagatatgtttcaagtacatatacagaagtgtatttcttttctctgttccaatatttgttgttttttctttaacaaaataattaattaatgagtttgcaggaaaatttgttgaataattcgtatggataggtagggaggaaactccgacttcatacttgtacagtgggtgttttccacgtgtacataaagaaaaggctttggtttcccatatctctaacccgatactctatctctatgtgaacagaggtggcaactatcgagctaaagacttgagaatgggaagcacgaagctacattgtttcttttaatgaaacacaaaagaaaagatattaaaaaaagtttgatataatcaatgaaatacgaaaagtggagccatgtatatacaaatacttaattgtagagggagggggaccatatgtttgttttccttttgggctgtatatgaggggaccattgtgaaaaaaaaaaaaaaaaaaaatcttatgcgtactacaagtattcgcagggtaaattaataaattataaattagtttcactcttgacgaattttagagcaaaaggaatttatgtttcttttaatgaaacataggaaaagaattttaaaaaagaaagatgaggaaagatattaaaaaaaaagcttaattgggggaccgaatgtgtaattaatattggttgcagtttggtagtgaaagaggaccatgaactatttttactttatttataaactaggaaacaaagctgggttttgcgtttggttatattttgtttaataatactgtttttttttttaaagatgaaataacaacttcattgaaatgttagcattcaaagtataagaaggcttttaaatcagcccaagcattatgctcaaaaatactacaactaggaaaaaatcgagagtgccttgcaacaacatgagcaactcgatttgctgatcgtctaataaaaaagagatttacattgtgtaaagaggataacagaatttgacaatcttgattaacaagtccaaaggtagagttcatcttttgattgttgcgaatactttggacagtgaccatgctatctgtctcaatctgtatattctgccattttctatttttcacccaactgagagcttgcttgataccaatggcttcaatagtttcagcagaaaaatcacctccttggtaacaagtttttgcctcaattagcttgccttgactatcgcgagccacaattccaaagttgtatgagttttcttgtgcaaaaagggcagcatcaacattgaccttgatgttgtttttgattcaggtttagtccaaagttgagtgttacgtgcatgccaagatggcacgttacaagctaagtgatgctcacaagtttgccaagtggtggtcaagtagtggcgcatgctggtggcatgctggtgctttgtttgtatgcagtggcattttttgtaaatattttcaatattgtccggatcgggaggggacttggtattcgccatttatttgnnnnnnnnnatagaatggtgcaatcggtttggaaaaactttgtgatttggtttactgtttggctgtatgtctacaaagtcaaattcatgtatgttcctggtagaagggtaaaagctcagaatgctctttgagggggtaccctagtgtcagctctcccccaccccttgcaccttg

SEQ ID NO: 113272 - DNA, 6709 bp, Cannabis sativa
  modified_base (818)..(818): a, c, t, g, unknown or other
  modified_base (924)..(935): a, c, t, g, unknown or other
atttttaactacacttataaattaaggggcatcatagtatagtgtcataagtacagggacttaaaaaagctaattattctaattaatatatacataagttacctacgggtatcgatgtaatgagagtagaagttaattattttctagggtttgtaaaatccaaaggtgtgtaatcctaaaggcatgtcttaccacgacttttgttcttggtcaaaatagacaaaggattatgatctttatggagccaccatacctgtccacctcttgttattttctaggctcattaatcttgtcattcacatccatttctcattggtatttgctctgtctctgtctctctctcatcgtgtctcgtatttatggcaaataaaattggtggttggaactacaagagcacaacaataggtgacgtctacttctctgtgtgggtgaatgtgtccttttattttcaagcaaaataatagtccgaaattattgggcaaaaattcaacgacacattaatattaatatatagctaattgaacagaagtagaaagagaaaaaaaaaacacaataacagctcagtatgtatatagattagcaaagtacgtagtattagcctaggtatctatcagccatacatacgtgataataaattcttcaatattcgtgtagtttatgtaaactacaaaacataatcttagcaacatgagctttctaccgctaaacccaaccaaaatgataatcaagactagccgtaggtataggcgggctaggtccgtgtgcctaagactcactcattttaagaattcaaataaaaatatacatatttttttaanaatttttaaaaatatcatttatctctattgtaaggacccaaaaaactttttttgccaatatcctatttcaatttaaggtcggccctaataataataataataatannnnnnnnnnnnataataataataataggaaaattatgactaatagtacataatcaaaacaactacattttaaacaatcaaataattcgcaatgataaaattaacaaatcgaaaacaaatggaaaaatagaggcaaacagagtatgaaaaactagaaacaataaatgcagaaaataagaaatcaacaccaaaatatatattggctcaagtccgatagattgatgtgatctatggctctactccagttctggaacaccactaaatcttctttattgattgacaaatatagttacattaaagtcgaaaaaaattctctgtggagttctctcaaagtgtttcaactctcacactcttacccaagaatcttcttcatctacagaagattcttcatacaaaacccaaacccaatctctctcttttctcagtacctctctctctacctctcagtctcattctctctctgactctcaatctcaatctgaaccgtcttcagtttgtcatattctaatgcttaagtgttggtggtatttataagcttaagattaagatcctaaagtcggtggttgcaagaatcgatggttgttaagttagttagtcagttcctaacttaaccaactctccctttcagcgtgatctccacgtcagcatcagtctaagtgcatccgggaataaatacgagctaccgggatcacggaccaaaggcacttcgctgatgaagcttccggataggatagaaccagctggagtcgacattcgaaactaccttccatggataataaccttctcggaagaataattagctatccaagactcctttccaaaggagggctagctatcttgaagactgaactcggagtggacatgatagtcatccagcaactctcttccgaactcaattatcattccacaagacaccttttgagatggaaaagttagctatctaggaacaacattcgggagacacttaactttctaggaataaattttgaagaccttttcatttggaagaactatactacaaatttgacctagttacttcaaattaaaggtatgacgatgatgaagaaagaaagtagctatcacgggtgctatttcaggaatcttagtatgctaacttctgaaattgatcaagttcaagcaatgcttgaacttgtttactgtcaagaccttagtcccaacatcaacaagattatcttccattctgatattctctaaattaacaagtccttcttctatcttctctctaatctagtagaagctaatatctatatgcttgctcttttcatgataaaccaggttcttacaaagatggatggacgactgactatctgaaaacacagtcactctcccttagatttgtttcaactcctgaagaaatccccaaagccataaagcttccttgaaggcttctgtagtcaccataaattatgcttccatggtgggaagagcaaccacggactgtaactgggctttcaagcttatacagttccagtttgtcaagaaaacgtaagaagtggttaattttctagtatctctattcgatgcgtagtccacgttcacaaacccttttaactctaattctactattgttttccaagggttagactataatcccaagtgcccttcaaatatctcaataactattttagggcctttcaatgttcaatgcccgaataggacatgaaccggcttaggatgcttaaagcgtgagctatatccagtctcgtgctcacctctaatagaccatatcagggggccattaatgatgtggtggcaaaggtgaaacatactattttggaggacatcaatcatgagctccttaaaccgttcacaaaagatgacattactgaagttgtgttctcccttagcccccttaaggcgcccggaagagatggtctcccagcgtttctcttccaaaaagtactgggagaccacaaaagaggatgttatgaaagtgtgcttaaacatccttaatcaggatttcccaatggagcatctaaatgacactctcattgcgctcatcccaaaaactgacaaacctaagaagatggaagaattcagacccattagtctatgcaatgtggtgtacaagataatctccaaatgcttggccaaccgtctaaaaactagtttgcatgagacaatctcggagttctaaagcgcctttgttggaggtcgtatgatacatgacaacgccattgtgggctttgaaggcatccattgtatgaagcgcaatagatttcgtaatgggacaaaggtggccttcaaactggatatgtcgaaagcttacgacatagtggaatggaattttgtcaaggcggtaatgcataaaatggggtttgctgatcagtgggttcataagatctaccagtgtatctcatcagtgtctttctcagttttgctgaatggaaaacccacgcgtaaattcattcccaaccagggccttcgacaaggagacccgctatcacctttcctatttgtttttatgctgaagctctatccaatcttattctggatgcggaagatcagggacatattcatgggttatagtttgggaggggtcatctctcggtgtctcacctcttttttacggatgatagtttgatatttgtggaagcaaaccgtgaggagtgcaatcagattaaaaagatccttactagctacgaagttgcatcaggccagactatcaatttcgaaaaattagagatgtgttttgggaagacggttaacgaggctacgaagaaggaatgtatttatgtatttagatttaaggcagtggagtattttcataagtatctaggaatcccaatctttgttggaaggaggaaatgtgagttgtttgatgctattaaaaaaagagtgtggaataaagttcgtgggtggaagagaagtctattttcggcggcatgtaaagaagtgctaattaaagtagttattcaggcaattcctggctacactatggggtctttcggctcccaaaaaaaaaaattcatgagcttcatggtatggcagcccatttctgatgggggtcatctaaaaagaagaagaaaactcattggggatcttgggacaaaatgtgtgcacctaaggagaaagggggaaccgggttcaaagactttgagcttttcaacaaagtcctcttggctaaacaagtgtggcacatactaaggaatcctaactcactggtgggaagggtcttaaagaacaactatttttcccattccaacatccttgatgctaagaaagggtcttcggcatcctcggtatggagggctcttctttggggtagagagattattgtgaagggagctagatggagagttgggtcaggggaagatattgatattgttaaggataggtggctgcctagacccttaagtttcaaaccacttatcaaccctgatatacctacgaataccaaagtggttgaccttcgccttgctaacggagaatgggatgtggaatatattaggagaatcttttgtgaggatgatgcaaacctaattctagggattcaatttggctctttggagagggaggagtacgtgatatggcacttttcaaagaatggggagtataatgttcggagcgggtacactacagctatgaaagagagaattactgaagagaactcgaacacaaaaagcagtgagagatggtggaaacacctttggaacttgagagttctgccaaaagtcaaacaatttttgtggaaagtgagccataagtggctcccaaccaacagtgttttgttttgtaagggtatggaagtcgatcaaaattgttagcggtgtagaggaatgaaaagtgaggaaacaatcaatcatgctctatggaggtgtttgtctgtcaaagaagtttgaaaaaactgtggcttatacaagagtatcaagaaatgggagaacccagacttgcaaatcttcttctcgaccttaaaggaaaatatttcaagcagagacttcgatctttttatgatagtgtcgtggcagctttggtatattagaaacttgtcgctacacaataacttctcccctaaatatggagatgttattgaagtagctacaaacattcttgatgaataccgaagacataatggaaatactaagaagtcccatatacaacaggaagcgaatatgcagcgctggacgcctcctgaggacggaaagcttataataaatgttgatgctgctatcgacacttcgaatagaagcagcggggttggggagttgttcgagatcatcttggcaggtgtgtgcgttcatatcacaggttttggcataattccttatctccctttgtggctgagcttaaggtaacaaaagaagccatcttgatcgccagagatacaggtattaacgaattttacatccattctgattgccagaatgcgattgttgttgtctgcagcaggaacatagtgggaggggacgatgtttttctggtcaacaacatcaaataaggccttgcttcgagtagatgtttagggatcaaatatgtacctagtctatgtaataagatggcacattgtattgctaagaatgccttactcgttaaggattctattatgtgggatggagattttccttcagttgcctatcatgccttcatggctgatttggccttcccctaagctctgtatcacggttccattttcaaaaatatatatatatatatatatttagcattgtgctccaatacaaaattacaaaatttaataaaaaatctaatattttaagtaataaaaaaatattatatataatctaccatttaataatgtagttaaatatactaataaaataatataaaagaccaaaaataatgtatttatgataatacatcatgcaatatttgtcaaatttaacaatatttatcatataacaaatttgtatcattttttttcacatttttaaaatatatttttaatgagttatattttaactttactaatttacttctacgtgttcttttttttagagtagttagcaactataatcgagaaggagcggggaagggaacaggagctaagagaaaggaacacaattgttccagaggacctcttcattagttcctaacgatcggtgagcaatgttatgttcaagagtgttatggatgcgaggaatgaagcaggtggatgcatcaggaaagtgagataaagaggaaatgatctgccaaactctatcagaaagagccgagaagttgtgctgcctttggcctattttcttaattagcagttgacagtcggagataatcaacccaatggagaatttaaccattgtacaccatcttaaagctcttaagagagcttcgacttcagcaaagattggctgtgttcgagagacagtcgagaagtgaaaacctgctatgatttggtcgttatggtcttgaactacaaccccaaaaccttacttattagtgtgactctgaacagctgcatcaacactgagcttgtaaaaaccagggggagcttggaaagcgtcttcagtgatgtctgtagaggagctaccttgttaaaacttgagatctggaaggactttggattgagcttcattatattcctgcaagtaagaattaataaagtattatatatcttgaaagtttggcttcttatctgcaaaaatagtcttgttacgattattctatataacccataagataccataaaaagtgtaaagttcttgtttagtaaacttttcaaaacctctcaaaatatattctttaatatcacactctttgttacacttataaaagtaaaaaaaaaaaaaaaaaaaacttgtatttatcccaca

SEQ ID NO: 113273 - DNA, 2670 bp, Cannabis sativa
attacttccaattacacaattacagtgtaattacatggtcagacaaacatgtcaaattgtgtaattaccttcaattacacacaaatccaattacattgtgcctttccaaacgctaagtttaaaaaataacgttgcccatctaataacatttatctaatttatcttctagtgcttttgagttctatttgcacccaataaaataataaatacaccctattattaaaaagagtaatttgcggcataaatacctaagtctaacttccagttgtaaataaagatcttaacttagctgcatatcactctaaataatttaaagtaaataattatttatgagtaattaaatgtttaaataattaagattatttggaccaataaacacatgtcacatgtacacaagtgtacacagtgacagtgccatgtggtatttaacaattaaaattaaaagattcaaatgtgcaaacagaagtaaacgtatgtaagatagcattgccaccaaaaaaatagataaagggatgaaaatataagagagtttgacaacaaatttctctattttaaattatcagctactataatataatttaaaaaatacttaattaattactaagatgttacaaataagttagaagtaaaaatatatctcgaattatatgatgaaaataattttttttatgtaaaggtaactaattggtttcttatcacactattaataatcaaatgctacttttaaaaatgcaagaaaataaaaaatatgaaaaatgtccgatacgtctaaaaaacgtcagatttaactgacgtaatacgtcacaaatagtaataactagtaatgccattattgtaaattaaataaaatgaaatatatattattttaaaatttcctgttaaataatttcaatatttatttctcttgcatgattgaactgtggtagataaaaaatttaaaataccaccatatttacataaatatataatttaaaacttgtaaatgctaataaactgatgagataggaaatgtgcatctacaaatgaaagttctaataaaatttcatcgcaaaccatcacaaaatcatcattaaacgtcattaccatgtcaagcattgttaagttcaatgttttacaagctttgaaaaaaaaatatatcaaagttttataaaatttcagaattttaaatatgaaaaaagatcgagaagaaccaacaaatgtattcaagatcttaatattaatgttttaagtagatattcataggagtttaaattttggattttagtttgaatcattaaaacattttttgtaaagtgtttcaatggtgatgagaagtgacagcatcaatggtgaaaacgatgttcatggtgatggcgatttgagttggtgctttgtcgccatcatgatagagtgcttaagagagatgcttaataaatgctgatatactttatatgtgcgccaatacaaaaatgtaaaaattgataaaattatctgcataaaaaattgtaaaaattgagttatatttaaatctaatttttgtatatgtgcgctaatacaaaaatgtaaaaattgatataaaattaatttaccattaatattaattcaatatttattgaagatataataaaagcaatatttttttttgagtgtaaaagtaataatttttcatttaaggcatatacttaaaataataataaaataatcaaaatcacatagtggtaaaaagcattgctaacagtaaagaattattacaaagtattaataatgtctagcattatttataggtaacctcttataattagttagcaatattttataataattattcaattaaattatatgaaatttgatacttaattaaaccaataataatataacacatttaggtggtgctagtaatttttattgtttctcatttaatagtaatttataaaaattattaaattaaaatatgtaagatccaatatttaattaattcaataataataatatgacatcagtatagtgcttagacatcataatctcctttagtatgtatcaatagtaaataaagctccaaatatacatcatgctatatcttttgttcaatgtagatgctctaaaatacataacataaagcatcaagttttccgaagacaaacattgcatgtattttgtagtgaagtgaggattaaaagtaaagttgtaaccgcctgcattgttaggtgatttctaaaatgatacgggacaattcttcagtttctaaatagtgaagaaactacaaatttgccactagtagttctttgtttggatcttggatttgacgataataaaaaaaattcaaaaaaaaaaaacatatatattatattaagaagtctctattagattataatataatatgaaaataaagcacatatgaacattatataatgtggaaaaaattacaaatatatcgaaataatatatgcaatgaaagtaccgaaatacttccagctattaaagtttgagcttgaatccctgcaatagcttcgtatgggaattcaggcttcctctctctctctcaactctttttagatggaattttactattttgaacagaatgagtaaagagctcgggggaccgagaccctatatttataagtgagatactccatcagtatctgcgccacattaattgtcagaatattttgacaattaatttaggaaatcaaa

SEQ ID NO: 113274 - DNA, 1816 bp, Cannabis sativa
  modified_base (1774)..(1776): a, c, t, g, unknown or other
tgcctttactaatccaaattactaaagcggtcattacaaaattagtatgtaaaaaatattattttttaattaaatataaaagagaagtgctaaataaatttttttttacaagagaaaataataatttaccgttggttgcgtgaagatatatttttctataacaaaatgggtaaatctaacaattcattttgtgttaaaaaagaaaattatattttgttaccaaaaaaaaatatagtataaaattggtagctaaaaatattattttcatactaaatataattggtagccagggccgcccctgaaacaaagtggaccaaagggaaaaaaaaatattttgtgcccttatgttagaaaaaatacggtattttttaaaatcagtaaaaaaaaatatataattttaaaagagaaaaaaaataattttgggcccctgggctgagtgggccctaggcacaggtctaacccgcctatgcttagagttgagctgttggtagctaaaagtaaaaaattttttgctattaagaatgttagtagttcaattggttgctaaatacaaatattttactaccaaaacttattagtagctaaaaataatatttgcctactaaaataatttagtggtgaaaatgtttgatcttattttttttagaattggttactaatttctcttaaagtttgatagtaaaaggttattctttggtaccaataaaatttagtattattttattatacgctggtgggatgatggaacgttaaaaaataaagtataattattttccaaaaagcagtggaatgagtgggttatgagtgaaagttgcattaaatagcatggggttctttttttgttcttgctttagtgggctaattttataatataatcatcgtagttattaagagtcattttttagtatttatttacattttatgactgaatatattgattaagttgactactaaatttaatcttaaatatgtgaagatgatgcatgcacgtactttatgtatgtttcatatatatatatatgtttgtttattttcaactcaattattaattaaattgccaaatattgtacaagaaaaaccacaactaccatgaactttttttttcttcttcttctttttgggaaataaataacaaatatgaagttgttgaaaattacttttgcaggaccaaaccttattttaattgggttggctactattattaagacaatagctaaaagatattattggtacttagtaatttttttagtatcataatttaattggtataattaaatattgtatcttatataacttaaaaaaatatttttaaccaatcatagagtgttacttataaaaagtgttaaagtaccattaatattcaataacaatactttattattaattgcattgtattattaattgggttggctatactatttttcttttctaaatccttttttcaaaataactaaataagaaacagaaatgttgttattaaaaattacttttgaaggacgaaaccttattttgattgggttggctactaatattaattgcacagtattattaaatgcaaaacatcctttttagcattttgcttctcatttctttctattatttttttaaattcatataagccaattatttccttatttatgttatgtccgaataactttgcaaaagattttttttttaaatttcacacagaaattcttataacaagagcaacataaatcgcaactaaaattcgtgtagcaacctgcatggaaactatctgtaacaccctaactannntaggcgtattacgtgatttttttaaacgtactgtgcagct

SEQ ID NO: 113275 - DNA, 4133 bp, Cannabis sativa
  modified_base (4094)..(4108): a, c, t, g, unknown or other
gtaccattcttgataggccgaaacatgaaggctatattgggtttttccaaagacaaactttagaagcggattcaacagtgggaagggcacttcttgtccaagacaggtaaagagattcttctaaaaaaaaagtagcacaagctctttcaagttttgctatgtcaattttcttattacctgtggatacatgccaaggtcttgaaggtattatgagaatatttttgtggcaattttctaaggaaaagcaaggtgttaactagataagttggaagaaactttgcaagcataaaaacttgggtggtttggcctttagagatttcaggaactataacttagctatgcttggtaaacaagtacggagattactaatgaatgaatcttctttagtttccaaagtttataaagctagatacttctcaaatagttcttttctcacagctttccttgaaaataatcctagctttattaggaaaaacatatttgaagctaaatatcttattatggtaggtgctcgaattcatattattggcaatggtgcaaaatcaacatcaccacggatccttaactgctcgacttgcaaaactcgtttgtttgctcttctcaccttggttcaaaggataaaaaagtggcaagtctcaataatgttgggacattgatattattggggatttatttgatgaaagagaccgttcagcaggataatggcgatgttcaagcagatggtgatctttggaaagattactcgaaaattaaagtgccaccaaaagttcttcatttttgttggggagctatcacagggtgtctctctactaaacttcatttgcaaatgaagtacattaatgtcaatctcttatgccccttttgcaatactcaggtggaatcaattctgcatgttttagtgagttgtaatttgtctaagtcatgttggaacacatcaattactagtgtcagggtgattaatgtagttcatttcaaagagtggtcctatgttactactcaaggaagaagtgatattgtcattgaagaagtgttgatgatattttggtttatatggaatgctcggaatgatttttttggaatcaaaaggtaaaaacaacaataaatgtagtgttttctacacaaaccttaatcaatggcgatgtactcaacaaagatgaatgtagcctcttctttttcatgatgtaaaagatttagagatagagcactggactaaatctttaaccaatatgcttaaggtaaatgtagatggtgctatatttgatgctacagattcttttggtttcagttttattgttagaaatcgcattggtcagattattgatgctgtctcagtttgtaattcgggccaagtttcacgtgaggttgccgaagtaactgggattaaggaggtccttagctagattaagaacaaaggttgacaaggtgtctcatctcgaaacatattgtcatgtagttgttcaagctattgagagctctgtccaaatactttctgcttttgatcttttggtttaggactgtaaacagctcctggcatagtgtaatatgaatttatgttttgtcaaatattctgctaattacagcgcgttttcttgcgtgacgttattgtaattcgtgaattcgtattttttatgattacatctttccttgtgagttgttagagattataatggctgatttgatttattattaaaatgtttgtttcaaaatcaaatcaatctgttcagaaactctaattgacaaaactgacctcatatatattcttaaaagaaaaactaacaagttttaatatactcatcaaactttttaactgaacattgaacaatgatcttttcctgtatagagattgttgtttgaaatttacttactttataaaataacatatctttattcgagttggtggataataaataatcgatggcttatacgttgtcggttgcatgccaacaaaatagaaattaggaatgatactggtatttatacgtacattattcaagagttaatttgtattaattcgatctaattaattattataataataaagagctaattaattaattagtttaacattatataacaaagtttactttagttatataattcactataattaattagctagttatggctctctatggatacttaaagttctttccatgatgattaggaacttgattgcagacatgacagaccaattatattcatctttagtattttttttctttaccatacaaaaaatatatatatagtgttagattttttttttatttttttaaaaaggaaaaattatgggtggatgatcatcatcttaattattattgattaaataatcaatttgatttaataggctactaataattaataagtttaaggtatccaaaactttccgtccaagtattattaggttgattttgtttaagattatattggtatgatgttctcaaaataattaatataaattggaatactaaaatagaaaatataattatttgaaaacttataataactatgttttagttagatcactattaattaatttatatttactataaataactgttacttttagtgataattttttagtcataacataatttagtcacaacaaattgttttgccacggaccttttaatcacaacataagaataataatttataattagttacagctttttcacttttagtcacaagttttgttgtgattaaaagtaaaattttttgtagtaattatttggttgaatgaaataatctgataaattgttgtaaaaagtaatgtaaaaatattaatatattaaatccataatattaagattataatgtgctgtttggaataagctaatgctagcaagagaatggtaatgtaaaatattactctgtttgttttgagggtttaatcttagaatattattcatttagtaatataactagccttataagaaggtaacaaagctgtttggaatgagctagtattgtttgtttagagggtttaaccttggagtataattccctgggcgtttggcatgaggtgttcaaaataatttgattataagaaatattatgaatgagaatatgattgtaggaaaatatataaactgtgtggctgtgtgtagggtaatatgtaatcacattcccgttaattgaattacactgtttgtttgaatacataattcttatataatattttaaaaattaaaataaaaatagttttttattatatctatttattgttaattatacataaaaataaaataattattcatttaagaaatatatttattaattagtaaatgaaattttttatatattttattactgtgttatttatttttatttgttatgtcatttatgtacatcatccgcataaaatttatgtataatgcatatatatattattgttaataacataaaaaaaaaaaaaactcagttaaaacaaaacaccgatttcacagactatatatatattgtaatatattttgttcataataaatcataatgatgtacataaatgacccctaaaccctaaatttgaacccggacccaaaccctggaccccggactcggactcggaccccagactcggacccacaatccgatccggacccgatacccgagacccagacccgtaattggtataaggatcgagagtgtattaaaaatatattataactttacataatcaattaatacaaattaataccaaatattatattgtattaaataatattaatacaatacaatacaacacaatccaacataatacaatacaatacaagttaataccaaacattgtattgtattaaaggacaaatctagatggtgaatggaaaacatcacagtacataattcaaacaaaaaggtataccattaacatgatcatgatagattaatttgctaaaccaaaagcaaaataaaatgaaaacaaaacttgtcatccagtccagaacagaatatttaattagtttaataatttatatttatacgtacaaaatattattatttaatatttggtcctccgacatattgtatcatgcacatgtaatgtgtaagtgtattgatggaatcatatatacactagaacctctatttaagaatactcnnnnnnnnnnnnnnntctaatttgttataaaaaaatcaag

SEQ ID NO: 113276 - DNA, 3543 bp, Cannabis sativa
  modified_base (585)..(596): a, c, t, g, unknown or other
gaaagtgacattcaatccatattatattaaaaataatcaaaagaattaaataagattgtcttaataattatatttaaataagatagacttaataattatttagtggtaggtttagatgctaatattatccacttatccaacctcatcatcatcatcatcatcatcatcaggtatcaacggcctgaataaattttggttttggacaacactttagagctttcaatactttattattaaagtttattggtgtaattaagtatttaataagataattaatagtagtattagtaatgttggattatacaattatacaactgtgctctttattattataatcttatatatcacagattctgtacttttatttttatttattttattagaaaatgaaaactgggttacacgtaagccatgtttggcgcgtggtatcatctgttttaaggtttggctatacaattacacagttttcagagctttcttttttagggttccttatctttatccatagccgaaattagctcctccttcttcttcatcatcatcttcttcactcaggttcttcttcttctaataataataataatnnnnnnnnnnnnaataataataataataatgcttatgtatatttcttcatttagttggattttataaaaataatttctcagtcactagtggagatttgacaaatcgattcaggaaatgagcttttttttaatacttggatcgtagtttcatggaaatggaaattctattcttcagtaacttttgtttaaatattaattgatgtgttaaatcatttcacgattctgacagaagctgtaacggattctttataagatgtgatgtgccgatccagaaggatttgtattctggcgtttgatatattttagtagctatgtatattttggcatgatttatatctggatattttattttggtttgcttcatcacgggccagggattttgatcgtaatcgatcacttttagttgtttttgaatgatcttatttgattaagcatttttattaatttggattaaggatacgttgtgatttacaggctttagctttctgttcaatagtggattgttccaatcacttattctgtttctttcaaggattataatcacttaacgtactttaggaaagtgatatgcttttatttcattgattcagcactaattatcttatcagatcctggtatttacttatttacagaccattctcacatatatatatatatatatatacaataatattttcatactcctgcattccatatgcatttccacgtttgtagtacgaaatgggtactgcaagaagaaattaaatattgagttgcaataggctctcagccattatattaacaggagcccttattcacaacccaattgattagtattcagatttggagtgtggtctttttaaactcccacaagttcattagcttgtagatgatttaatagtgcaaatacttgtaatatatatttgaatgtagaagtatattgataaagttgttgtgctatgttcttttctattgatctcgcattatagtcttagaaagaagttagggaacatgtatgttattctcctgaatagaaaactatatgatgtgtgctgcaagcaatagagggctttacctttcaggttatgagttttgtttcgcagatgttagttaccacttgttatacctttgtgagaatggaatagaaatttgcatgatggagaagagcttgaaaataaagcctatctatctctctctttctctctgcaggtaacaatgcaaggagtaattcgaggatttttttccaatggaaacgttgtgaaaaatgcagttttgcaacgcatttctcttgtgaatccagtgttgcagcctgccatcctgtcacgttttcaggggactacaactgctcgtatagaagagcatggttttgaaagcacaactatttcagatatcatgaaatcgaagggtaaaggtgctgatggttcttggctatggtgcactacagatgacactgtttatgaggccgttaagtcggtatggacaccattttgatcctttcaattcctacaattaactttatccgtttgagtctgagatgctttctttagcgttttgacttgagcaactctcttctttgcagatgacccagcacaatgttggtgccctggtggtcgtgaaacctggagaggaaaagtcaattgctggaattattacagaaagaggtttgtctactttttttgttgcaccttataacagatatcattcgataaacacttatgctattctgtaaccatgttttaaatctggtgatatagcttgcaaattctgaattaacatattactaatgtttggaagttcaagtttggaattgttaaattttttgatgtcttttgtctgatggtatatttccagattatctgcggaagatcatagtgcagggaagatcatctaagtccactaaggtcggggatatcatgactgaagaggtatagtgcatagaggtttctttgtctatagcagcgattcatagctctctggatttagattttttctttttgtctatggttatcatgcaattgtggctcaaaatgctatgacatgatggctgcagaacaagcttatcactgtcaatccttccaccaaagttttgcgtgcaatgcaactgatgactggtacatttgttcttgatttggaatttctcaattcatgttttcttattttatttctctcaagtaaaagatacatggtctaaatctcgaaattgatattttgtggtagataatcggatcaggcacattccagtgattgatgataagggaatgattggcatggtgtccattggagatgtggtacgagctgtggtgagtgaacataggcaggaacttgaccgcttgaatgcttttattcagggaggttactagatgatgacgacaacgaccatgatgatgatgacaaagatcagacaggttgccctggtttaacagtgaacaataataggaccaggtgcatgtaaataccctttgctctttgcaactcctattctggttcttttcttttcttttcgatgttcatatgctatgacatcaagataccaatgtgggaactaacatggttaataacgagaacttattttctgcttaaatttctggttcctatattggtcatagactcgtaattgtttccctcatctatggtgtttgggatcttggtttttctttgagagtggaattttccatccatcaatttgtttttgttttggttaattttactcatctctttgttataggggggtgtaaaacatctttggtttttcttaaaaaaaaaatcattacattgtcataaagatttaagaacaaaccagtaggtggtggatcaggaagttattatttccttgaaggaatattcaattacaattctgtattatttattcctcactaaacagggattaaatgatgtaaaaaattgaataggactcctagtgttgtaggtctctgttgtgaaaattgtgtacgcaagtatacgcaatcgtaacaagtaataa

SEQ ID NO: 113277 - DNA, 2754 bp, Cannabis sativa
  modified_base (2677)..(2678): a, c, t, g, unknown or other
cgtgttaaaaattatcttaaagttcgttatattaaaaaataaaattattaaaaattgaactcagggtcctatttgtacaatttttaaaaatataaaatctattttgttaaattcatttaacaaaagaaaaaatccaattaataacttttacaaaataccttattattatttttctaatataacatatcaattaagatttttttttttttttgcctaatttgtatatataaagacatccggtacacaaacttgattgtacatcgtatcaagtatatataaatctataatactatatattattagatttgttctatgtccatcttctttgcatcaacgcaaccgaaagggagattcatcagttatggatctctctctcttcaaagtcttctttttattatatatatatatatatgtcatctttcaattaaaataattatttattccttaattagtgtgaatgtatattaattctctatgtgatctatacaatattaatcaaaaattaaaatatagaaagcctagctatttgttataagatcatataataattagctaccgaatcatatatttatattgattataagtttacttcaaggaaatccttttattactatgtactatctcttcacattaattgatgatttttatttattaaatggatcttttcttttaagaaaaaaaacgttatatataataaattacattttttttttacaatacacagctcaatatatatatattaaaggcacaaagaataatacatagtaataaaatttttattgtaatctttgtttttagagaagtttttcaacatatataattgatataattatatatatatcgaattatcgatcatatatactatatagtatcgccagtgaccgttggctatacgaaaggttggttccattccatgttcatcaaattgaaagaaggagaatatgaatatatatgtgttatatattaggagtatatatatagtagtgtcatgatattcataaaataaaagtacgggtcctacacctctctcgctctatatatatataatttattaatcatattgcatgcatgcaatgttaattaacaatctattattcgtttccgtacaatttttatatcatataacgcatgaattagaaaaagtaatctcacaatttcttgataattacttgtcaatcaaaataaatattatatatatatgttttcctgctaacagttacctatatatagttataatagtttatatatattatatatagccgccattttcatcatatgcaagtatgcaacaaagatagtgatgagataaataatcatcgatctattgttttaaaagaacactcaaaaaaatcctcaaactttaaagatgccttaagaagccacgtgccaagctacctaaaagctatattaagttatatatgtatagatttattgtcttctatatatagaataaaatatatttatatatatacattattaacaaaaataaaaaatgaaaagtgttaccggtaagatgagagatttggtgggtggagaatttcaagcgagaatcagtaataaagactgccccaaaaaggaaaatgtcacacgatcacaattaataaataaaataaatgttcatttatcaaaaaaataaataaataaaataaatgttataacaataaaaaatcaatgattgacatattattaaagcatttttaatgatggacaatattaataattgtcaaaatatacataaaataaatattattttattcatttatttttttatcgcgtaaaatttaacacatttttctataaaaattactcaataatatacaactccaaaattattcaccatgatctcatgacatactatattttaattaaattttatagttatatatattctctcaaaaaattaattgataataaactaattttttttaagaaaataaatagtgttacatggctatatatatatattacttattttgggtaataatattcatataaatgttaatataaatacacatatatcaaataccactccataagtaaccccatcaaagatgctcttaagaacttattacttgtcatgtctttctcaatatattatctctctcctatatatgcctacaatttcagtattgtgtttttgaaaggataaataattgtttcccaaagggattctctctttattattcctatgccacacccaagagagtatagagagagagagagagagagagagagagagagagtgatcatatataatttacctttgtttagttcactattttgatttttgtttatttggcaaatgtgccgtcacatctcctactttggtaaagagtttaaaaataaaataaaaataataaaaaggttgaagaggccaggccaggacttgagtggatggaatgggatcagaatatgattttttattattgtttttggaatggattatgattctcctttcccatcactgtcttccatgcatatataaatatatatatatatacatgtacatatatatgagaatcctactggatatagcagtatttgatgattatgatgatcagtgcatggtactttaattaattttcgttttcacattatttgcttgtgtacatatatttgattaggcgtatgtacatctttgagttttgtatctattatatatctttatatattaaanntgcctatctaacggcaattcttggtttaacgggaattcttggtttaacgattcttttattttttttaacccaaaaa

SEQ ID NO: 113278 - DNA, 3299 bp, Cannabis sativa
ataaaaattattaaaatgaggtgtctttaaaaatttttagggtgtaaataaaatttcccatatttttatacttacaataccattaatgtaaattttttaataatttacagtgttaaaaataagtttgaaattttttgaacatacataataaattagaatatcacgaactctgatttcggtactgtaagctattcaaaaattttcaaaaatttacatggatgatattgtaactataacgaatatttatatgaaaaaaattgaaaaaaaaatattttgacatgtgagttcgtggaggttaattaagattttgtaattaattagtactccacatagaataaatagaacttttgtcccctcaactatgacccttgtaaaattttaccctctaaacttttttttattgcagaaatttatcccaaaaaattgttaaaaatatctcccttaagttcaattttgctcatcttttaaaataatttacttatgtgactataagtttcaggtataattgtagtataaaagtttatttatttaataggtttaagctacttaagactagtttggtacgtcgtgttgtattgtattatattgtattgtatttgtattatttaatggcgactaattaggatttttgtctctgaactttgacatgtaccaaatcatgcccctaacttgtaaagtcgttaaaaatgtcccctgaactagtgagattgttgaatttaaggacttttttccaattttagtaaaaaagtcgaacatggatgaaagttcaagggccatgatgtagcatatatcaaagttcgacaatcactgaaattgtaaaattgaataaaattagacaaaagcccttaaatagagaatttttaacgaccaaaaaaatttagaggacatgatttaacacatgtttaagtttaggggataaaaatcttaattagctttattttaatgaatcaaaaatcccaataaaatgatttgctatcattatagacggcaaaaaaaaatgatttttcatttaaaggctaaaaggcacaaataatatcgatttttgtgaggagtaatatcactattagtataattcattatcaagtcttacttattttaaaagtccttaaatggaaaaattttaaggaccaaaaaaatttagaagagatgatttaatgcatgttaatgtttatggggtaaaaatcttaattacccttattttaatgaatcaaaaatcccattaaaatgatttgctatcagtaacaaaaaaaaaatggtttttcattgaaagtctaaaaggcacaaataatgttgattcttgtgaggactggagtaatatcactattagtataattcattatcaagtcttacttattttattttgagaaccattataaaaaaaccactaatcaaatatagtgtgtgtcacctcataataggactacacagcttgatgtctcataacaagaatttgccaaactaacaatgtaaaatactaaaatttaaaaaataaccttttcgaccataatgattgtgttatgatcttgcagtgtaaatcttaattatttgtgcgaccatacacagttatttaaagttattttactaataaaaaatatcataaaggctattttaacaaaacactcatcccattgtgaatttgtgatgctcttcaaggaaatacttaagttagaaaatcatcaatataggaagtaacatattgtttcaaaacacaatcaatagccatttcaaaattcagaaaaaaaatagcataaaacatataaaaactaccaaaagaaacagtcaaaatgaaagtgaaagaaccaaccaagaaaaccatattaaagacagaaagaaaaatgaagtacaaacaggatagatattcatgtattagttaaggaaagatgttgttaacatcaatcaaggcctgtgcagaacaacctataaaattcaaaccttccttcttcatttatgaaatgcataatgccagaaagccaagatagatataataatgcatttttttttataacatactaaaacttgaaatcaaacaaagttggaatttgtttactatatcttgtcgatatcttcatcctcgaactcgatgtaatcatcaccagcaccctcatcttcatcctcaaggccaccagcaatgccctcattaagtcgggtattctcaggcaactcgccataagccttgagaagcctagcttcatcgggcatgtacttgaggatcacatcagctttgtcatcctgataatctctgagaccaacgagtataatgtctcctgctgcaatccaaactttcttgtgcatttttccgcgaatatgacagagcctcttcgtcccatcgatgcacattgcctcacaccttccattaccaagcattctaagtacttgggcatattcttgcccatcttctttgaacacaagctcacgcttttcgtcatcagcttcgttctttcctctcttcctgttctttcctccctttcccttgttcttcggcatctttagtgattattttactttccctaataattattaaacaaatcagagaaaaaatatatagtaattggaaaacaaatcaagaatctcacaaaaaaatagtgaatagttcaagaaaaacatcctccatatattacaattctactgttattatctcatcaaagacaatacatacctcgaaaaccccttcaaattgtcaaattaaacaaaaaaaaaatgattttttttgggggaaaaggggtaaatgacctaaccaaaaacggaattgaaattgaaggtggaggagtctaaatgaaatgaaattaagagagagcttgagataaattcaagaataaataagatttgacatacgaattgaaaccctagaaattgaaaattagtaaaatacaaaaagaagcagaaagtcaaatcaagatgaaatcgagtgaaacgattaagtcaaaccctagattatgaggaaggacctggagtggagacgaagacgatgtagcgcgtgggtgatacggtggttgtgaacgcccggtggggaagaggaagacaaccacaagcgacgtgggtgagagagagagaagcaaaatttagggttttgatgtctttttattatattttaggtttatattgtgagttgggccaatgggttaaatccagcccaacccaattttgacgggttattaatgggcgggttcaatacgggtgtgtttttattggttgggttgggcgggtgttgcagattgacggtttttgtggaggaaattacactctatactctttttatattgtcttcttttatttttaccctcttttttaaagtctatcat

SEQ ID NO: 113279 - DNA, 3411 bp, Cannabis sativa
  modified_base (3281)..(3294): a, c, t, g, unknown or other
  modified_base (3343)..(3365): a, c, t, g, unknown or other
aaaaaaaaacggcgttttataagtagaaaaagttacctcatggtcattacaaaggatagtaaccgatattgacgaaatatccaccataccagaaatagagttaacataaacccacctaaccacattatgagccaagaagttacaagtttcggagataaacaaaaaattacaacttaacataaaagtagaaagtcttttacaatgacgtgcataattatcaattcctcaaaaggtaccaatgcccgtcagggccttgataacagttttcaaatcactctccgtgaaaataaaacgatggtgctgagagacagcggtctccatggcagacatgccacaacttctccaataattaagggggtttgaaaagctgagcaaagttgtagccactcacaaaatagtctccttatgatccctagcaatggccacaacacacatggagtcgcaacaacctttgacatcacagttgatcttgacccagtcatcatgaggcgaaacccaaacaggagacccaacaaccttcgaaagagtaagtaaactagaaccataatctgcataacagtaagagatagtgtcaatataatgtataatgctaccgagaacattcttgtgtaccttgtcattgcgcggtctccaaaccacaatcgatgcataaaggaataatttatcaatgtccacccctataaactttaaattccacaagaaattaacccaatcccaaacacgggctccagaattcaagacaggcataaccccccaaggggaagaacaccaaagatgaaaagcaaagtcacagtagagaaagagatgctccagcctctcttttccctccccacaaatgggacaagagacctcctcgatatgcattctctttgcgagagaggctcgggtaggtagagcattagaaagaatactccaccaaaggattttatgccgctctaaaattttggagttttagagtgcaggggcaacactacacaggggagcacgttcaagggcttggataaggtacgcagacttggtagaaaataacccattcgattctatagtccagacccataaatcaccctcttgcccattaggcttgccacctttgataatgttactaattgtttcctggtcaaaaagatttgagagcttagagatgtcccagtccctgttcggtaagagtaagtctgccactaacctcaagctgtccggcggatgggtaaaaggtttagggacaaaatccctactatgaataacccatgggtcctcccagatattaatctctttcccattcaaaataagcttgcatgccccctttttgaggatatctttagtacgaacaacgttcttccagaaccacgaataagagctcttgaatgagcactcaaaaaagattttccctctaagatacttggcacttagaacttgacagcacaacgattggtcctcatttagaagagcccaaccccacttggccaataaagctttattcatttcccctgtcctgcaaaacccaagacctccccgagatttgggaagacacaagtgatcccaggcttttaagcagataccccattttccttgcttgcaaccccaccagaagtctctgaccataccatcaatctttaaggaacattttttggaaagcttcgtggtctgcatagtataaactgacagcgcaagccccacagatgtgattaaagtagcacgtcccgcctttgacagagatttcaattttcagccatgaagttttgaaataaggttatctaaaatgaaaattgaaatcagtgtctttctggcgggacctaaaaatcgggagccccaagtaattgatgttccctatcgagttgtttaggccaatttcccttaaaatgcctctcttcatactctcatcagtgttgttgctaaaaaagatcgaggttttgagtttattaaccctctgtcccgaccagctacaaaatttttcaagacaatcccaaaagcccctggcctccgcaacattcgctcatcccacaaagatcaggtcatcagcaaagaatagatgaaagagcctagggccatccatactcaattgtaagcctctgacaggtccattgtctaaggaattttcaaggatacgagagagtatgtcagctgtccagataaaaaggtaggggaatgagggtccccttgctggataccacacgcgggatcaaaattgctcatcttgcaaccattgagaaaaaggttgaaggaagttgtagagatgcactgccaaacccagttacaaaacctggtaggggccttaaagctacaaagcacacgatcaatgaattgccagcttagtttatcatatgctttaaccaggtaaattttgataacaaacaaaccttctttccctttcctgcatttaaaggagtggataatctcttggattaagacattgctatcctggatgttccgacccagaacaaaggctgcttgggtaggacaaatcaaccgaggaaggattggcctaattctatttgcaattaacttgagattaccttgtagacaacattgcatagtgaaataggtctgaactgggagacttttttcgggttgggaaccttcggaataagagtcacattcgtcgcattgaatcctctatacataaacctggactgacaaaagtccacaactgcctcatagaagtcatccgtaacatgtttaaagaaaagcacagacataccatccgacccaagggttttcaagatacatatagagaagagcgtccttctgatttcctcgaaactagaaatgctttccatatctgcttgctcaatgggggacaggtgatcagtgatcagatggtctaagttttccaacgggccttgggtcggattagaaaagatgtccctcaagaaccccgtgaattctctaccaatttccattttatttgtaatccacaccccatagatactctccacagaattacgcctattatggattgtggccgataagaaaaagaatctagagcatttttccccatctttaatccaagaaacccgggatctctgctgccaatacaaggctttccgtcttaaagccacattaagggcctttctcacctcaacctcctgagtccatattcttaaaccaacaggccgcccttggatatcctagagctgaagctcttgtctgtaaatgtaagaatcaagcttaccaaactactgacgattccatttactcagggcctgacgggtggcacccaatttcttgaaaactctagccaaggcctaggcatgggaagtagatgttggaattattttaccagnnnnnnnnnnnnnnaccaagtatgtttgattaacatccgaatatgaattctaaaacaatgaannnnnnnnnnnnnnnnnnnnnnnaaaccttacagtgggtgcaacgaaaaattatgactccttccattca

SEQ ID NO: 113280 - DNA, 2837 bp, Cannabis sativa
ttttagtttacaccgtgtgtgtagagtggtattttggtaataaagttatcattttatatttttgatgtaaaattttttataattaagtatttttattctaatcttaaaactttctcttcctaagtctcaataataattgtaattcgatttctaatctattagaactgtaattttttttaccaatattgctaagtttactaatcactcacttagaagtaaatagtactaatgatatataacctttaagtttaacatttacaatatagtttctcataaaaatgatatacatatatataatatcttttaattatgttatgtaattgataattttaaaattattttaaataaaaattctaagaaaatattttatatgaaatagttgacaaaaattaaaataaaagtgcagattaatagattttatttatactatatacagtataacactcaaaatagttcctaaatattgtgggactatttctaaaatatgtatcgtcaaactttttttcacaaaatgagaaagtctcacaaatgagtgaaaaatagaatgaaaatcatataaaatttcgtataatttattttgtacttttctttatataaatatataaatataaatatagatttttcttcttagtgtcttacacacttttcttaatactgagattttgacaaaataataaacaaaaaattataactaattaagtaagattagatcaaataataaaaataatttattcaacctccatatatgaatgttaaaaaaaaattaattttattataaataaaggtaaagattaaatggttcttaaataatgagagactatttttaaagtatgcattatcatacagtcttcacaaaatgaaaaagtcttacaaatgggtaaaaatagaatgaaaattacataaaatgctacctaatttattttttactttccttcatacaaatatataggcatcaatgttttatggctacatacataaatttaggaaaaaatgattctcctcttatttgttttcaagtatgtcatcagcataatgcaaatttcaacttatccttttatagctacatgatatccttgtatttatatatataaatatactaatttattaaaattttgttttttttttaaaataaacgtttgtacaaaattccaaaaggaatacaaatcagatcttctaactcaattcctacaaagaaaaatctcatcaatcatggtttcttgaatgatggtatgtgcccagtttgcaacgatcaattagaaactactcatcatactttgtagaattgctcctctcttgctcaatgtcgtaatttgtgtggtttatagcttggtgacccgcttgctacttgtatgaatttctttggttttatttaccattttttttgactccctaccaacgcatcagattgagttaattttggttgtcttatggagaatttacttttgaaagaataaatgggttcataaccacgtgatcatttctcctaaactgatggggttgtgggcttatgattttttagcagcctatctaaagaaagatgttgattctagtggagaagactcgagtggtgttgatcaggttccttcatcatcgacacagtgtgcggtggatccacgttggtctcctcctccgttgggtttcgttaaagccaatattgatgccgccttgaatttgtctaagggttgttgtggcttgagtatgattttaaggaacgctcaaggagaggttttggcatcaacttcatggttcttagttggagatttttcacttgaaatcactgaagctttagctcttcaaagtgtgggtgctcaatgtcatttattttgttttaataatgttattttgaatctgattgtctaaatttgctgtcataatttaacaatcatttgttgtttgattcttctttagatcttgttttggatgattttggccgttcttttaataattttagtatgccaagtctagtgcactttcctagaactcttaatacggaggctcacactttggttaagtatgttttgttggctgttgttagcaaggtttggtggtcaaacttgttgagaatttatgccttaaataaaatttattttaatataatcaaatttattaattaataaaagatcgttaacataatttctttcatgattatatgtttaatgtataaattttattaaatcctgaacatatattcatgattatagtgttgttcacacagtgaaaaataatcattgattatatgatttaaagtttttagtctcatgatgtatcagtcaattggatttatattgatctcataatcagcaataaagtttacttacacttgtataagtggaatgtcgtttccagagtgttagcaaagtatactagttatagatgtatagaatacatcagactgaaccgatattgacagtagaaaatatatcataaattttacatataatttcatttgtaataactttagatatcactttgtaactcacattgactttgaaggaatgaataatatatttttttgataaaaaagattgagaaatgtaagaaagtgtgtgatagtatatttggaatttattaaacttaaaatagtaaaaaagtaaagtgttaaaattataaatgtaaattttttttggagtagtattgatgtaatattaacctaaatttttatatttatgtaaaaactgagcttcgccatgctacccatatgtacagctaagcatcctccattctcaaagtatcaatctatatctatatataatataaaggaaagcacaaaatgagtttaggtggcatcttagatttttttttattttattttaaaaattttgtagttttttctattt

SEQ ID NO: 113281 - DNA, 2052 bp, Cannabis sativa
tttattcagaagctttttatttgtttaggtggagcacaaacaatatatttttggaagtccaagtttcatttaataatggtccacatccacatccacatcatagaatgacttggttatttatttttttgttaaaggagagctagtcaatttggcaattactccttgctgactgactcatgtgtggaattggatgtgtctgtttggtcttattgcgtaatcttgtgcttagtttgcacacgtagctttgtgtacaagactactttcgcaacactcatatttcagatacctaaagaataaacaatataaatttattctgtatttttaatattgcataattgcaatctcaacccgaaataaaaaataaacacaatcgcgatctcttagtaaacctttgtctctcaataaaatacagtatgttttgtttagtattcctagccctaaaagtctaggtccatatagatttaggtctaacgtctataaagctacgtggcgagagatttagttggaggtcagtagagctactattcacttatttgatagtggtgttatcttggctgaatttaatgaaactacaatctccttgattccaaaagttggtaatctttcaagggctattgattataggcctatagtttgttgctcaactatttacaaatacatctctaaattgttatacttaagattaggaacggtgttgcattctttagtgaattagaatcaagacgcttttgttaaacaccgatcatttgcccacaatattctcatcttctaggatctcattaaagattatggcaggaagaatacttcctctaggtgtgctatcaagattgatctcaagcctataacactgtagattggtgcttcgttgacgatctcctaaaagctatgtgtttttttagctaggcgcatgggttagataatgacttgcttgaaaggaactacatactctttaatgatgaatgagaggcttcagggtaagtttaatggtgagaagagtttaagacagggtgatccaatttcacctctcttctgctttttgtacttgatatggaatatttaactagaaagttgaagtttgaaacccaagagaaatcatttcgctagctatcaccccatgtgtaaatgaagctcactagcctttgttttgcagacgatttaatttgttttgcaagggcactttacaagtagtgagacatttaaaacttgctccagatgacaccagaaatgctttgggtttgatggccaataaagaaaaaactcaacttttctttggaggggttgctgaagaagttaaagttaccattatgtaagaacttcaatttgagaaagttaagtttcctcctaagtagttggaagttcctttaagtcctactaaatggagaatggaggattatggtataatccttaagaaaatcaagctcagaattcaaacttaggcatctaggcatttatcttttgctggccgaaaaaactactggatgagtatttttgtgtttcctcaaagtataatcaaggaagtggagaagctttgtcgtgagtttttgtgggggaaaaatagaaacagaagcaagattcacatagcctcttgggagaaagtctgtctccttaaggcttatggaggtcttgggtttcaggaaagtactaaatgtaacagagctattttggctatgtgtgtgggctataatggggaaacatgaactattatgtgtcaaatggataaattcaatctacctcaaggagtctattttctgggacaattagttaagacaagatacaagttggtattggagaaaattatgtcacttaattgaggcaagcttttagcaagagtaatatttaaactgctgtatggaatgttaaattcagagcttccaaacattatagcagtttgctgcaacaaacttaagtgtcttacaagaaagttgtttggtatcgattgagcattccaaagcacatatttacgatttggcatgcagttaatttgtgacagtcagtagtctcgtgatccataaggggaaatactgggtaagctgtacaatcccacaccgcctg

SEQ ID NO: 113282 - DNA, 3459 bp, Cannabis sativa
attcataagaacattcatacacacattcatctggggtactctttaaagaactttgttatagagctaagtggagatagagagtgatagctatgtggagatagagagtgatagagaggtgtgctttaatacactaccacatattctgacttcattctttagtgcttttgtatctttctatactattctttctcttttagatgacaaggctttttatctatgcaacctttacttcaattatgcttctccatttacctttcactgcaatcatccatatcaactccgtgaccacttctcttgtcaagcagctttaccctctttgctgcccctgtgaattaagctccactagcttctctacttgttgctccacttggtattattgtcttggcaattttatcagaataaacaccatcttttgtcatgttcctttggccaaagtcatcgcactcactaaatgaagacaccgtttcatctcatatttgacagggagatttccatcaacttttattaagcaccaaggccattggtttaagacggctaagtttgtcccttagcaatatgtgccttttcattgtgctgaatttagcaatatgaacccttatttgtctgctttttttttttattttaagcatttctctctattatgctcagctcaggatgtatttagtttctatgggaaggaagagtggaattacagtcgtgtgattatttcatctgtgattgtttattaagttgtatacatttcagagttcatttttttgtgcaaattaagaatttgtcatgttttatagaagtgatgattattaaacaataagtctctaaccctgttcaggaatataaaaaaatcaaccaaaactagaaaaggggaagaaaaaaaagtcacaccacttaagtggttcttttcaatgactggaaagaaaagattgaatgagatgctcaaaacaaccattttcctttgtctgattccttccacacgttttctactattgccttttcaattagaaaagagattctatagagcttttccaaaggtaacaggatatgttttttattcttgacagaaattcagagatcagaatggaatctctgttatcaaaatgtcagccgggcctctttcgttctttcctttaactgagaaagatccttttattttcttatgttttttttatacacttatatagtgtgtgtagcatataataatcatatcaactctacaatgaatccaagaagagaagttcttcgcttgattccataggctaattccaaggccactgtggaagcttgaattttctcatcttcaaatggcatactcaactgagcccaatattttctattgcagctatgaacatgatgctactctgaccgatgaagaccatatcgcatctgaggactctttctacagttgcccttttttcaactccagtgattatcatcaagatgaattgctccatgccttaattccatcctcatgtagggaagaagctttctctgctaccaatccctggaatgagaatgtggaaaccgaagaggcttatgagggagaacaacagcctcctaacagctgctatggaaactggctgagcaaataccagtctgttttcaatggttgttgggaagagaattatggttcagttgggaatgagaatgacaacggttcggagaattctgaacaggccaacccaaatcatcaagaacagaacaatagacattttactcatcaagatgaagatggagaatactataatccatggtctgattcatggttggaatatggttttgagaatgattgttctaactatggtggagaagaagacaatgccgcctatagcagtggcctacctgaagttggagtctgtgaaggtttgtttggctattggccttgcttgtatcgtacaacatgataaaaaatgcatgattatgaataaacttgaggaacacaaaataaagggaaaatccattgaaggaaggaaaagatgaagaatcaaataccatttacttttttttttagcttagttttgttgttttgtttaatctatgttggagtagctgtagagtgacagtcaaagcaatgtatggctcaaaaaattcaaaggatttggttaacttctactgctcaataagaagctaaagattgatcaatggtgagaggtagactcttattattttcattaaaataaaaatggtgaggaattctttcattcatcctaatttaaatatttactatggaaaatctcaccatttatagctctaggctctgtttcactccatacattactagaattcatcattccatgcaactaaagattaataaggtgaggtttggtttaaggcaatgaaatggaatggaaatgactttaaagtattggaatgtcattcctatcctagttatgttttcattcattccaatcaaacgatgcttaatggtgtgtttcttatataagtttgagttggaaaaagtacagttggagggaatatgaaactcaagtgttagagggaattaacattaccgctattttaatttaaaaagtaagattcacttggaaacacaaaccctttgttattaaatatttagcaattttaccccttgaactttcgacaatactaattctgccacttaaaatatacgacttgttaagaatactccatcaacttttacatttaaagtaacttagtccttctgttaggttttgttccattattccatttaaatgctcacatgtctttgtaaattagcaattttgcgtcctaaactttgataaatattaaatcgcaccctatcaaaataaaaatgaaaaaaaaatcaatatttttttagtaaatcttaaaaaaaataatgtagttctaaaaaaaatcattttcaatgtgttatctacatttcggtattggacatgcggaatccaggtcaggaaccaggacccatcagtgggactctcaacaaagataaaatgggcaagaccaatctagatatgtccttccacgaacgtatcttggttccgtactcgcaaagcctttcgccctcagcaagccgtaccaggaagacatgtccgttaccacgagaccagagagatgagactgtgcattcccggaagacccttctggttccatttatatcctacacacaaataaggaaactccagttgttagatcagaaaagagtatcgtatcaagattaaaggggaaacttcctataacaaatattgtgcaattaattcagattaattgcccacaatcagtgtacgcagtgttgaccagatcacaccaaatctaatctgcctagtcagtagatcgtcttctccatgggctggacttcatgagaaagcccatgagtattgtttattgtaaactccccaatatatggaaatggaaaaccaaatgtaatttttaaactactataaatatcccacgaatactatggattaggagttaaagttgttggatatatgttaccaggatctagattta

SEQ ID NO: 113283 - DNA, 2424 bp, Cannabis sativa
ggtgttgtaacaatgttctaaatgtttttttaaaaaaaattaacaatcataattcttatataaacgatataaggggtaggagatatattgtttttccattttctttgaaaaagggagtgaccattatatatcgaattcacttctaaatttataaaattttatacatagatatatagctatattcatttaatatatggtctgtgcatttttaataaattattttatatatttgatagaatattgtactataccacgcctctaatcattattaattttataaactagtacttaaaagaatgatatcaaacgtaaagtttgataaccaaataatatgtggagtggatttggttcgtgtagctaatatatatacatagagaaggtatatactcagtcggcagagaagaaaatttaaaatagtaagttaattataatatagctactcaagtaaatattttgatcaggttatttttccgttgcagagtttctaaaaataggagaatgtttacacatatatatacataataaatttgattgtagacttaacttgtttggtacacccacatatattattgtgttgtctgatatatagtttaattttgcattgaatttgtaatctataaaggaatttctaatattaactacgcaaaaccttgtagttaatattatgtgttttcttgaacatcctattattgttagaaattttcatcatgcactgtagctaataagtgaatttgaccatcgtagataattgaccttttatacaattttaatcatttttatataattatgaaatgtgtagtatattatattataggatcctttcaaaaataatgtagatttgttttcagatcacgcagcaggacaactgaattaatgggatcaaaagagatatgaaagagaaatgtctcaaaaaaacatatgcctgtatctctcttcataatgtatttgctcttggctatgtttttgcaaatagtatgtagttatgttaagaatttatatgtagctttgaataattactcttatatagcaagctaaatctcaaaggttgttgcattttaataaccagttcttataaagtgtaagctttagttgaatatatatttctatataaattaaatacttcttttagaggaaaatgttttaagaatagtatatttgctagctaatatagtaatacgttatacttctctttttataataataattggtactaaagtgcatagttaatgtttccttgtcacatggttatgtgcaccatattataatacatagattgttattatttcttgaatgattttacataaattcttgtgttatttgtggagccacagatattcttgaagtgttagtatgttaagctaataatacattggaaaattttacactaggatagctatttttgtttctatctatctgcacttgcatttatattttattttatgcaatagagatatcatatagcgcaacgctgtacattatataaaatatatttttaccaacttttgatatttttgaataaattacaatactaaaagcacaattagaaaatggcatcacataagtttactcacaatttttaaaaattagtgaaaattccaccatttgcataatgataaacatcatcatatgaaaaaaaaatagttataatttatccatatctcaaaaataactcgattttttttatataactttgtacattaataactaataaagtattttttttatttcgttagttagctgttaaaagttactttggttgctggtttaaccatttttcctctctttctataagtttgttattttgttcaaagttgttacaacaaccaaacagtacttgttagcttttatatttctttgagacttcaagaaattattctggataggaattatatagatgagatactcttttatagtatcaagaagcctttgactcatgctgcacatggatcctagaaactcaaaacgcactacatctactctagcaccaccaaatactccaattgtgtcgattgctcagatgcaacattggaatcctttttagaattcattgaattcttctctaaaagttttgttagcccaagatatgtttctaagaggggagctgaactgaaaatttaagttaatttcggtaaattaaaacttttaacacaaaactatgcaattaacactcaatcaagtaaatgcaagtaatatggcaagcaataatgatattaaataatgaaacttgtaaagtaaagagtttaagggtaagaaattacaaactctcgatttttacaaggttcagtagagctaagccaccaaagtccttggtcttcaaagttatggacctagcttttatttctaatatcgagctaagttaacgggcttgactaacccttacaaccgggaaattttcaccaaggtatttccaaacctcttacaata

SEQ ID NO: 113284 - DNA, 3098 bp, Cannabis sativa
atataaaatatggctatataacatttttggtttataaaaaattattgggtgatttttttttaaataaaaaaataacaaattattattattattatataatacgagccatcatgagatacaagggttgttgtttgttggaaacaaagggtgcaatatgaagggaggtaaggtgggtggagtgtaggcaatatggacagcaatggtttgggaggaggctgtcagtgtgctatcacaaattcacaatctcaatgatgagtttaaatacaaacacagacagaagtatcatctcatataatttaagatacccataattgaagaaatatacataaacaccactattacattttatcatttcctctggagaaaaagagaccctattaggactgcaatcccagtaattgcgatggtaaatataatacgtcgtcgcgaaaactcgttcggtggcggctgtcgtctaggagcacctggctctctttcagctggccttacatcccttcattaaaaaaaaatccaattttacacatgatatcatatgataagaatatggcagattactggtaaatgcctaactattatgacattacacatacctcataatagaacacttagttgggatttggttggaaggaatgaaaatagaaatagaaatgggaatgaaaataggaatggaataaaatttaaaatgcataaaaaaaaatggataaaaaaattattaaattttttctcatcatgcattaaaatggtctttccttccatttcaaatggaattgtcattccaccaaaatagtaaaaagaccattccattaaaatgacattctaaaactttaatatgcaaccaaacatataaagattgtttcctttcttttccattccatttcataacctccaactaaaccccaccttagttactaaaaatatagatgatgtgacaatttaatagtaaattactataaattatccttattaaatttataatttatattttcttattaagtttatgtttatatttatattaagttgtttttacgacttgaataaagcttttgtttttgtttgatctattgtttttttaaaattttctttgttaaaacaactatgattttaacttaaattgtgatatcatcatcaataagatcatataaatataaatttatatcatagatatgcattatctaaccatatgttgtaaataagtttataacttcgcaaagattaaaatttgttagtttggtatataattaaatacgaaaataaagtaaatgttaataataaggcatatcattcattgcaaaggaatcacagaaattatacttaaccttttttttttcagagaaaaattatccttgagcaaaattgatgaacttttccaaattattatgttgtatgtatacaaaaaaataataataaaaaaataaataatgcacgatgttaaagcttattcttgttcttctgaaaatttaaaggtatgcagtctttcttaagattttcattcaatacaagaactgtcccatagataaaaaaataaaaagaatttatttccactctaatatcttataaaacaaaattaattgatatactattatagaaattcaatttttttttttttttttactttgaaggagggaaatttaaaattgggatggaaccactagggtaggctatgcctatgaccacaaattcaatttttttattaaattaaagagagaaaaaatatatcattacaaagaattgaaccaatatcacataatttgaattaagagtatgtttacccattatactattgattatgttaactaattatattatgtttactaatatattatttgtttgaatcaaaaagacatttattttattacaatatatatttatatataaaatagaaatgtacttatagtcataattaattataagaggagatttaaatagttacatcaaatatataactataataattatatttacttttaatcaatcgttgtatcattattaaacagatatgattaatttaaaaattaaataaaaataattaataaattattataaccgatacatataactataataattatatttacttttaatcaatccttgtatcattattaaacagatatgattaatttaaaaataaaataaaaataattaataaattattataaccgatacaaacctaattttatttattttcttataaataaaaaatatttataaatattaattataaaaaatatcgtattaaatgttttaattaataaattaatttattttaattatatataattataattttttttttaacagatatataattataattaatttgagtccaaaaataaaatttttatttgttagtaaccattatagtacgtcataaaaaaatgtgtctataattacaattgtaacattaaatagtcaccatatatatatagaatgtttagatctattctaaacaaaatggaaataatggaaaaaaaaaaaaatcacacttcaaaacaattttttatgcaacttaaattgcaacaaaaaattgtatagaaactcctattgcaattaggactacaaccactttaaaaacccaaactctaaatttaaacaaaaaaaaaaaagttaaaaaaacaattttatggagtaattcccaaaaaaaaaaaaagtagccatgtcatcaggtaataagttaaaataaaaaatattattttttaaaaattaatttatagctataaatattactcatttgatttgatggtcaataataaaataatcattcatgatcataccatttgatataattgtcataaatgatcaataataaatattatgagtgtacatatatatatttttatacatatatatagttatataaaagaatttaaatcttgttttccaacataaaaacttccatatgtgctacatagagcatggagcactttgaaagcccactgtaaacaaaagatttccaaaagacctttaaaatatttatgaggggtttttttatttttatacctcaaaacagtttttttttttttttttttgcattaatacggaattctacatagaaactcatattgcaactagtgctcctacttaaattgcaacaaaaaatc

SEQ ID NO: 113285 - DNA, 1210 bp, Cannabis sativa
  modified_base (27)..(41): a, c, t, g, unknown or other
gtcatatctcatattaattcacatatnnnnnnnnnnnnnnnaatataattccataataatacacaattaactagttagggtttgctaatccactctcttaatcttagggtattacaagcaccatcttcattaaggttggggtaagattccccattctgggacctactttggccctacatgggtgggatatcctccctcctttcatctttaggcaagtcttggaactggttagtccgatagtataccctttcgagcaagatttgtttatcatttggtcgaatgggaggcgatcttgtttgggaagcagtgaggccctttgggtgtgaggtttgcccacgatccctaggacgttaagtttcccttggcatataaggagacttccctgaagggggtcccttattagaggtggtactcaacccgagatccagccctttcattgaaccgtctaatcagttcattcgcatcgctttctggtggtttagctttatctattgggcttataggattacgacttgtcaatccatcaattcctagaattcacgtctctactgggtgaaagcatcgcttacagtagtgcgtgtttcttcttgttcatgatggatgatgtttatatgatcctagacttgccctacgacctctcttagcatggctagcttagaatcatcccccaagtcaacatggggttcgttgacactaggttggccaaccccaggtccagtttctctagcgtataccgagggatagtccttgttaaaggaacccccgtggtactttgggtaggttgtccaacattgaccgggccttgcccggtatttgtcagatcttgctcgatatcaactgggccttttggtgggaccctgtagatggatttgcctgaggtggccagatagggttagctggattgtcaccagttggtggaaaatggatattgggatccacagccatcggatcctagggtttagtggaaatgcttctccttgtcaggaccatggtgattactatgtgaaaagagatgaggtctttgtaagaatgttgaagctctcaatgaaaacaccaaaaatattgactaagaaaattgccaactgactcaactaataaatattgattaatcaccaataaagagttaagaataataaataaatagacaaaacaccaggatttatagaggttcgacccccttatagatggataatgacctattctcctttta

SEQ ID NO: 113286 - DNA, 748 bp, Cannabis sativa
taagaatcttttaatagattaataatggaaatattctgaaagttacacaatatttgtattcggaaaatatatgaagggacttcattatattaaacaaataagttattttttaaaattttattcaaacacttttcttcaatgtgtactttttatatctttttttttttttgtttgtgttactttcatagatatttataatataatcttttcataatatatataagcttatgtttataaaatatgctttgaaaataatgattttttacaaagaaaaaacttttaattaacaaatagtatgaaccttttttgttttatttttatcatttatatttaaaatatatttcatttatatttgtaattttatagaatataaacaaaatgatttttgttatggaataattattgagttggtgtcttaataaaatattgggtaatatatatactgccacttatttatattgtgttaatatatatatatatatatattaatttatatgtataaattaaaagtttatttatcattgctcttatttaatgtactccaatttttctttgtatattggtacaccatatgacttaaaaaagaaaaatacacatgcacacacttgatcatatatattcttcaagcctcaaggacccaactttaataaattaattgtctacaagaggatggtaataaaataaataaataaataataataataataataaagggctagttttttcatttttacacttcaaaaaagtt

SEQ ID NO: 113287 - DNA, 3716 bp, Cannabis sativa
ttccgcttttaaccttagtcttcataatcaggtggtcttatatgggtcagtgaatggaatgctctacagcatcccgttgcttcagcattcttggctgctctttatagcgattacatgcttacttctagaacagcaaaaatatcctgtaatggacgttctttctcaccagcagctattcgcaaatttgttagatcacaggtttgctttcattttctatcaaacaaacatattcctttttgtttcgaagtgccttacttttccatatctatttcatttttctctaggctgattatgtcctgggcgacaatcctatgaaaatgagctttcttgttggctacggagacaagttctctcaatttgtacaccacagaggggcttctattcctgctgatgcaaagaccggatgcactgatggtttccagtggcttgaatcaactaggcccaaccctaatgtagctgttggagcacttgttggtggaccatttctcaatgaaacatttattgattccagaaacaactccatgcagactgagccaagcacatacaacagtgctgtaattgttggtcttctatcaagcttggtcacaacctcctcagcagttcaatcctttacctaaagagttactaaactgtgaaacatgcctgtaatatgtgttgtatatccatatgcttgacttgttttgtgagagctttagcacaatagttgttttacatgtgaaattatgtggtagcttcttgcttctgcttctgtgagctcctatagtcacatgttttggtagagggcaggagtgattctttcttagaagtagtcttaatgtgtcttgtcattatcagttttttcttcttcttcttcttcttctataatcactattatatttgtgatttctttctagtattgtgcttgtaatagcgaatttattctatgtattttgagcacgtactagttgtaattctatattgtaaaattctcaacattatttacaaattattcattatttattaactttcccttcgttctttttctccctactttctttaattttcaatctttttccttttaaattgaaaattaaaaagcaaaatcaccacttaaattttaaataagtgttgattttgagagttagctcaacaacaaaattaatgttgcactttaaattttttacactaggatttgtcccaataaaaattgccactctattttattacacaattcttcttaaataaatggtagttttctctttgaccaacgatcttgaatttgagtatgttttcaaagatgtaattcggtagagttttggctagactagtgtggtcaagaatccactctttttgaatgttggggtctactatttataggcgggaattagtgtcgcgcaatcttctttcccttcttggattaatccatgtggctttattttcctatttccttgcacgccttttcttctactatgcttatcgagctccgtcctccaagctgtgccgaactcagctatgctattatgctttttccttcttttttaagtgtaacgacgtgtttctacttttcctaccaatcactttattaattttaatacttttattaaggtaaaattacttttatacctctcatattattcttatcccttacaattgcccatcgattttacaatttctgagctcttggctgttaagtctgagctcacatgttgtgaaatcagttacctaaaattattccacacttatcttttcaagccccacaaatttaattcattaatcatttcaaactacgagagtttgtctcggccttttcaatttaccctaatttcataattttaaatttaaactaatggtatttaataaaaaaataactcaccaattttaggaacttccccgatatcttagcttttttgcctttctaatcaacttcagccttttccaattcttcttttcggctgtttttccctttgcttttacctagtcctttcttccatccctatttctagtcatggcttctaagaacacaaaaggagaatcaaaatctgttacctaaaaggcttcacccttaacagacccgagcttcatggctgaatattaaactgttaatgatgaaattcgtgcaaagtatcatgttcttgacgacgtcactttctggatgttgaaaaaattcaaattgatcaaaggcttgggagacctcgagattagcaagggtgaaattctggtcagcaagaaacatatggagttactgcgttttccaattcctcaattgtaggcgtacatcctttccttcactaagatttccatgattcaactgcttccaaattttttcatacttgctctctgtcctcttaagagaatatttttttctcacatatgaattctttgcatgttttagtagaaccataggtacttctcgcttcatcacatggtacatctcttctaaatgccctaattacatggttaagagtctaccaactgttgattttgtggtactaaatcaggtatatagtgaaaaataatttctgattatcatcgtaccacattctcaggatcactacatgtatatatattaaatctgaaataaatagacgaaaaagaataatttacctctcgaagtaaatcagagtatcctcatttcttttcgtaagttgtatcctcatggtgatgatgaagaactcatactgtgatcttttgaaccttccaccacacacacggattaatgtggactaataggataaattgtatattgagttcttgtttttgtctcaacacatgagcaagaactctatgagtgatgatgatggaaaaaggtttaatctgattaattctttttttggttttctcaaaacttatacatatagtttttttaagttttatacggtatataaaataaaaaccaataaagattttattaaaataaatatttgaatttaaaagaataaaacaataatgtttaattaattgaataaatatttataactgaatctgttatagatatttatttcatataatcgattgaggaaatctctcaaccacttgaaacaatatctcaaccatctggagagaatctttcaactactttgagagaatatcccaactactataaatatctgtaagtacttttcaaattcaaataaatatttatcttctgaattaattaattaatctaaaaataaatccagtggggacaaatcctatctttaggtgcctatcactgtgtcctaaccttatgaaagtggtgccacctctgtcctaaccagacagtggtggtatttttgtctagacaacttttatcttttccctaatttatttaattaataaatttgaaaataaataattactattttgataaatcaaaatatattttttccaaacatcaatatacaacttttatccatacccttgataatatttcaaggtggcgatctagggaccatggacctataatactaaactctaataaactagattatttattgaatatcctcaaccaaataatcttgtttattaatgctataattactccactataaatatggaattgaattcttaataattatagaattatatttactgagttttactgcagtgtccattgatataattaattccagtgattagtcctccttgcgtcaatttataattagttttggttaaattactattttacccttctaattatttctttatcctttaataccgttaattcactagtgaaagtataatttagatcatatata

SEQ ID NO: 113288 - DNA, 909 bp, Cannabis sativa
tttttttttttttgcttcttttaatgacaaaattagtttttttaatgttgagaaattggattttaaaatttgtatcattttttacattatatattaggaaatttgttttaaaacttctttaaaatttaagaaaaccaagaatagaataaaaaagtattagatgtacataattttaaagaactaaaataaaaacacgttatatcatatactttaaactttttctgttttaaaatttctttgaaatatactatttatgttttatttttgtataatattattcattgctttaaagatattttatttattttttaaaatttttaatttttctttttaaatgaaatatttataaatattaatattaatatttgaaataaacatataaaaatttgagctaaaataaaaaaagcgttattttagttatacattttaaataattgaatagaaaaactgatggaagtacggttaagaatttcggtttcaaaacaataatattagaaattaaaaaacaaaaatttacgtgccccaatttttatattttcactatatttttttaatctttattaggttgaagatgtaagatcattagatcacctttaaacaaaagaatccttaaataaggaaggatagagaaaattaatgaataaaaaatgagataattaattttctattcttttgtttgagattagaagaataatttgaagaatgttaaaatgatttatttgctggcttagtttgttcgaatctttgcactgtgcgaatctcatgcgaggatcgaaaatctactaggaatatatgactacgatacaatgttaagtagagctgttcattcgatcaaatccgcacttttttagtcaaacaacatccaatctgcactaagtgcggatttattttttttggatccaatccaat

SEQ ID NO: 113289 - DNA, 2174 bp, Cannabis sativa
taatttgacacgtttttcaagaaacttctttgattagcaaagattgcacaataattgaaaaagcactgtagcgtaccttagcattagggcgttacaatctcattcaaatgtattataggctttccgaagatcaagtttgatcatacaattggccttagcattcttcctttcataatatctgactaaattctgacataccatgatattgtgagctataaaaatacattacttatgactaaaatattaatatagtttaataacaacatattatacatagtgatgaagtttaattttgcctaaaaatattttttttaattactcactaaatgtgttttagtcacaataaataataatctaaattatatcaattattcataaaaatcacaaattgtaatgtgattaaagtactagaaaacaattaaagtgaatattaaacggaacttatatagaattttcgcccccaaactattaacattattaaagcgtacttcctcaagttttttgctcgttacagattttttcttaattatttaaaatgttgaaatataagattcttgcatgttaagctttatcccacatgtctataaaagttttaatatggctgatgtctcattgtcaaataagcgccacatgtatatttaaatgaaaattaacttaaaatttaggagatatatttttatcaattgttgacaataaaacttaaaattaaattatttttgatattttaataataaaatatgtttttcaaaattttaaattacatatgtagcgttaatatgacattacatctttagtcataacaagtattgtgaatttagttacaatataagttacgaattttgtgactaatatctttacttacaaattttttagtgataattcacttttaattataaattttgttgtgatttaaaataaatttttttgaagtgcatactaaaaaatttaaaagatataatttgataattgtaataaatccaatggtctaaattataattaaataaatcttaaaggaaacatgtatgtataattttttgttaaaatgtatctactagttttaatattgtttacattattttcaaactagttataattaatgctaatttagtacgttacgacatgttgaggatataatattatagtactattaattaagtttcaattaaaagtagaatattcagttttagaccagtgtgttagactgggagtcttatcaaattttttattttattttaatattttaataattattaaacaaagaaaaaaaaaaaagacccacaaggaaaaatgtttaaacctttataaaataattactgttatgctaaggttgcatttgttaatgtatttatttttaattttttttaattataataataaaagtaaaattttattttaaaaataaaataaaaaaaatgttcaataaccacttttataaaaatagacttcatctgccttacctgatttgattttgtgtagtaacaattgatagatcaatgcactcaagaaatttagtggatccctctcaaagaaatatttgaaagagattccttctctctttccaataaattaaactccacaaacttagtttttatcctcgagtagcaaaaactcccaccatgccatacatctggtaaaatggtctgccactgggactaacaactttggaggtctagcaggttgctctaaagaaaatattaaaaaaaaaaaattagacatacctgcttaaaggtatcggaccaaaatcgttcaaacatcagacagatatcgggccaatatcccaaattaataaaatataataatatgcaataataatcggactactaccagactatcgttcttataatcggactacaagtaaaaaatattaaaacatcaacattgcaattataatcgaacctactattggactcactcgtaccacatcggacacttcgcaaaattgaaaatccaaaaacactatcgaacccactatcaagcccttatcatcctctatcggacctaatgaattgtatcagtacaagcaaactattgccctaccatcgtcctaatatcgtccaagcaaaaatcataattataaaaaaaaaaaaaaaaaaaaacaaaaacaaaataactatcataccaacaattgttctccatcgtccacaatcaaaaacaacattaaaaaaaaaaaaaaa

SEQ ID NO: 113290 - DNA, 5755 bp, Cannabis sativa
taaattttttatttttattttaatttttattttgtaaaatatggccacgtaggataattttttaatgacttgtcattgctatgtgggcaaaaataggatttaacgaggctgaacagacgacacctaaaaaatataaacgaaacagtattttggagagttttcccaccaaaatatgaggttagatagttttttaccagtaaattgatagttgaggaagttttgccgcaaattactcttttatttttgtttacattggaaaagagaaatttaaagtggagagtttaaacttttattttatgaacaaaagtatggaaccactaaattagatgacacaccaaacgttagataaaatacaaaacgacaaatgagtagaaatcttaaaaaatatttacaatcataattcattgtaattgatgagtaaaaaattcaaattatattggcaataataaaatgaggagaaaaagtgaaagattggcaaagaaaggaaggagtaggggtcgtacggtgtaatccagcaagtgggagtaaatgagtggacactgacactgacaactctgctgtaataaatatttacttccccattccaaccccctttccctgcgcacctttacttatccccactctccttcttttccctccctctctcatcatgcttcccttcttcttcttcttcactcagtagagggcaaaacaatctttttaaattaaaaataaacataaaaaggaaggtaagccccagctctgttaatcctcatttttctaagggacttttttttttcttcttttttaaatactagttatacactgtctttctgttcagggtttttcgttttgcttcaatctgggtggagcttacatggtttttattaaattctgttggtgtagattggttgaatttccatgaaattaccctttcttttgggtgtttcttgtagaacttggattccactgttgcattgagatgctttttcgtgatattcgtgtctgatatgtttgaattttcactggggttgaccattgaccaaaggttttctttttcggtgcattcacactcaattacttaaatcacccattttggtatccagttatatttgactcctttcttggattgcttagaaagtatttgaactattaactttagttcacagaatgagtagttaaattcccttatgcaataaccctaagtaaaaacttgtaaactgtagaattaatttgtatattttgaagttttcagttccttttcctttcttcctttatcttggtaaaacatattgcttcactaagataggttagagaaaatgacattaaacatggcattattgttatgatttttagtacttcttttgtataaaatggtaagaaaagaaaagcattgagaagctgataaaaaaccgccatgtgatatagttcaccatgacaacaaggccatcacaagctcaagttcaagcccacctgcctcctcgatgcccaattcaaaagagacccaccagtgcctcaattcgaaaccacaactctttctctaatcatccctttgtggaagatcatccagcatggcttgatgacttgttgaatgaccctgattcaaattctaaaggaggatcacttcgtcgttcagtgagtgactctgttacccttttggacagtgttgcagattccttttccattttggctccccattatgatgaagggaattcagttggtaacccaactaatggtgggttggagtcagcttcttctatgtatggtcctaattctcctcggctaagaagcagttcttcgttttcagagaatgccatagtgtcagcattgtctgaatatgtttctcatgattctcgggagtatatagatagtggtgtttgcgttcctggtgctaggagcagttctaatctgtttgacatgaacacagatggttcactcaatgtggatgcaaaaacagcgaaacggttcggatctaagctcatttgttaatgttatttttgcttgtgtttattgtactctgtagctatctatagacattagtggattaccagcttattggcttgattgtaggcaccctgggcagcgttcaaggattcgaaagctccagtatattgctgaacttgaaaggacagttgatgttctgcaggtacagattgaataagagaacactaagtttggcttatgtttgtcatcatgaaatagaccataacatgtttacgttttgccttgattgatcagtaagaaaatagctagtgtatgctatgtcttcagcataatccagaatgaagtattgcccattttacctaccttatattttgttacagttttgctctgtcttaataacaatttttggatttatcgaacttagtgttgtaaccctgatatttgtggtgtacttcatctgattttttgcccttatgtgtggctgcatggagtgtatctatgaatagtgcttaagttttactttcaatgaatttgcagactttagaatcagatttggctgttagagtttcttctctactccagcaacgtgtcgccttgtccatggaaaacaacaaactgaagcagcagttggccagagtgcggaaggaaaagttgatagtggatggtaagttaccttgttgaattcttgtttctagttccatggaaagatattgaacaatttgcattggttgattgttttcctgctaaacattgtaatgctcctattcctatctgaagtcacaacccacagctataatattaaaattttcacacaattcaatagtcgaactggtactttggtattcggagagaaggggaaaatagattctaataataaactaaaagcaaaaacataaaagtcaagaagaaaacttggtgctaagataaaataaattgtatgttgtctggaggagtctagacaaataaatagttaattttggtcaacagactcaaaacagctattcaatgaggttgaatgcaatttgtttgcctttcacattgccatataaaatgcttcccaaaatttccttctgtagtataatgcttaaaagtgtgattagaaggcttttaatcatagtgaagtgaaactatgtagtatgtaaataggccttctgtttaagattcatattacgataatgagaataggaacgaaatcttaaacatgttcctgtatttagggatgtccgatttgcagcaatattagaatttataatagttcaaatgctaaatactaataatagtaccttatttaattgtggagtgaatttttgaattgatactttgatatcttctgaatttgtcaagatactagtagcttaatttagcatatttgcttgtcattccataacgcaccacctaattaattacctgaatttagttttcttggaaggttttgtaaaatgtccaagagatttggattttcacttaatgatgtatcatttatgtcactgaagattgttgtggaaagttagttacttatgtatgagctaacagttgaggagagctcagtccaatctttgatctcttcatattattatgtggaaggataacatggttattggtttctcatatgctattgattatgcctactcgtgcaggtgagtatcaggtactgaagaaggaagctaagagattgaagagtggtttaacaaattctagtcgcagtcaaattcgaacatgtttcattccgaatcccccagctgaggcaggtagtttagaggccatacaaatgactttagatatggagaaacttaacctttactgaaagtgaaatcgaaatcaattagaaaagaaaacacaaaatcatggtttttgaagctgatagattcaccaccttgtaagactcccattatctaaacccagttcagccttgaaaaatatgtgttaggttaacatgtaataattattacttttatccttgttgcattgtaagaggagatgtattctgccaactgctgttttcttacaatggaagagggagctgacttcatcttctttccagtgacttattctatttccttaattcaatctttttggtggagataactataagtagaaaaatgttttttcttaaccatattcttattgacaagagtggttaatcaacttggtttcgatggaaatagaataattagctcatattgaataccaatttttctgtgcaaaaatcttgatttccttaatgtatttttgcccattgttataaatttgtgtgggtttaatttattttggttggttttgataaattttgtgggattaaaagttattccgatctcaataaattatgtcaccaccaagcagcatcgttctctatagacaactatcagattcagtaacccaaaaataaaagaaagaacaattgacaaacatcggaaacattataaattaaattaaatgtgtcgtcaaaaaacgacatatccagatacattatatcctcgagtatttgatatctaattttcacacagcatgagatccatgaaaatatgaaagaaatatcacattctaatgcaaagcaatcacattcattcgaactaagctgctgaactaaatataaattatcaaagaaaacaaataaaagaccaccatgaccaccattcctagggttatggtaagtaattacagtattacaatttaaaatatgtcattttcattaatagataatgtttctaaagtgggtgaaatccaccttaaagaatatattaattctgattctttcgttggcttctccttcgtaataactttgagatgcttccaggtcatcaaagaagaacgacaaattcttttgaaattttctgataaaatgagaacctgtatataaatttaagagaacaaaataaatatataaaccacctatacttggattagtataaacttgatataaaatccataatcaaatgagtgaaataatgaaggggaaaaaaagaagaaggcatgtaatgaacataccatatctgatgaaatatgcaaggttacaatattccaagaacaattgagactctatagaaaattcatcatcctagtaaaccaatttgcatcatatttcttaggtcggtcaagaattacaagttctccattcaacaaatcagatgactccactactatggttaaacttatattgcctttataacagaaggatgttaattttggagctaaaactgtaacgtttaccattctataatccgtttcagaataataaccacaattctccaaatctaaacttctcaactgttgatttgagattttgatgttctccaacgtcaactcatcgcagtccaaagtcaaattctcaaggtgtggaaagtatgaaataagatcttctaatgacgatgggtcttcaaaattgtactcagctaaaactattgagagatttttgattgccttgcatgcagaaagatttgagttttcaaagataaatccatttagtatcaaagactcaagatttatagcttcaatctgaataggttctatgtttgcacgatatccaagttgtatgaacttgaggcttgtactttgtaaacggagctggtgaactaagtttaacaccatcaatttctcgagagaagggcaacccaacacaaacttaaacatcccgtcattctgtttaaaaccaacacggtccaataacaaagttttcaatgctggaagtctaattgaataagaagtatccaaatccgacccttccaactccaaaatagtcaaatacagtagaacctctatccaagaatacatttgggaccaaataaattatattctaattgagaggttataactcaatagagttacactagaaaaa

SEQ ID NO: 113291 - DNA, 2310 bp, Cannabis sativa
  modified_base (2242)..(2246): a, c, t, g, unknown or other
tggtaaaataacatccaacagttcactatacttgtcaatcaaaattgacaaagtaaacaaagtgatgcgatgagcaaaagtgcctagcggcgttgaatgaccaaccacacaagggtaaaaaaaaaaaagaaaaagaaagaagaagaaaaagtacgcttatgagaggggcaactctctaagtgtagtacaaattctctagtattcaaaacacggtccaagcgccacagatgtggtagaaaaggttgagtgatgcctaaaagtccaaaagctcccctaatcaaatattataccacaaaaggggttgagtggtgtctaaggggccaaagctcccctaataaaaccttatatcttacaaaaggttgagcatagcctaaggggcccaaagctcccttacatcccatgagtaatcaaaagaagaggtcgatactgctctaagagtcaatactccatccacgaaaaggttacaaaagagaagaaatcgagaaatcccaagtggcaaaaagctccctcaaacaaaatgataactcatgaaagaggtggatctaactctcccaccacatgataagtacctaccataaaaagggttgagatagctcctagacttaacactcccccataaagggtcataacaaaaagactcaaaggtataaatgcctaaaagggtaaccatgagaccgaacaacgggagaaaatttcaccaaaattagtctacaagaacacttgaaagaattttatagactaggggacaagtgttgacccccaaaatttgctaagtgaaattttggagacactatttcgggtgataattaatgcttgaaaagctatccgaaaaatactaagtcataaaacacgagccatcctacagatccctgcacaaagaaggccccgacacgaggagtgacaagtcggtatagatctctgcactcaaggctcctcgcgtccttgatctccccatgcccagcgcatttctcgcgcccacgtgctagcctgtccgcgcgcatcaactggccatttgtcaactagtcatgcgttaggtggttgttcgtcaacagatcgtgcatcagttgtacgtctcattcgcaagcacactgccaccttagtacaatgataaggggacaaagaacgatcatactaattctaaaagacctatgacaaataggctcaacacttagtgaaattttcaaaatatcaagttggcctagtgaacaagaggaaaatataaaagaaggtagaagtccgtttaagcaaatatacctttgccaaaacttgcggagaggaggtggatgtaaaaaaggattcgatgagtaaaagtagcggatcctcatttgcctcatggtcagtacgggctgacaaccgaccaacacacctccactattccccccgacatacaacccacaatgtactaacagaatattatcccctaacttttaggaccacttgtattgatggtgttttgtgagtccattttctaaaaaaaaaatgaaattataaaataagtgtatgagtacatttatttaccctataattttttaatgtttactagtgacttgtaagttgtgtaaggagggacgtggccttttagtatgatccgccttatgattacagaaaaagacgcagcgtagagaattagagttcccttttcaatgctctgttaacaatatttgatattctttgagtccgtaaattcccaaatcctggccgttgacaatcctctcgccggcgcccatggaagatgcggcggcaccaccgtttatggcagcagctgaaggcgtatcgcagtcaatcacttcttgtgagctgtcggcctatatcgatggagcggtggacgatgacgagtgtagaatatgccgaagccctggtgagcctgataaccctcttcgctacccttgcgcttgccgtggtactattaagtacgtgcaccaagattgcttgctacagtggctcaatcgccgcaagatttctcattgcgaggtatgatttccatttcgttaactatcttagttggaacatatctttatttctaagttattacagtagtgtaattagggtttactcttcgttttgtatgataaattgagttctaagatagcaatttacattttttatgtctaacggaatgaatcataatggattgtgtggaaatgaacgagaatggataatgaaatcaagttgtttatgcttaagtactaattctgtaagccatttaccaaaatttgtgaaggcgtttggttgggaggaatgnnnnnataggaataggaataggaatgggaatgagaataggaataggaacggaatagaacaaaatttaaa

SEQ ID NO: 113292 - DNA, 2308 bp, Cannabis sativa
ataggatactttcgtcatagtccaccgatgcagcatttttagcatttcacatcattttgataaatatttaaatttaatttttaattataaataaatttgaaatgtttaaatgttatgacattatttacgtattattttttgattgatgcatttaaattaatttaatttttttaaaaaaattaatgatttgaactaaatagaaattatcatttgacaattaacttaaaatttaagaattaggtacttacaaaaattctaaaattataacttaattattattgctgtcataaattaaatttatgtatttatttacaactagaagttaaacttaaatatttatgcctcaaaattatacaatctatggtcgattaaattgtaattatttaaattattttgaaattttttgaaagatttgaacaaaactttttgtgaaatatatttaaattttatttttgatatattaaatttaaaaattaaattaaaaatttcttttaaatacaaaaacaaataagaatgcaaccatgaactcatttaaaattgtaaaattttttaatattatatatatatttttagagagtgtttgaacagggatttaattttattcctttttaaagtgatagtacatctagaaaagtgtggaagctttacataatttactaattataaatatacgtatttatgtgacacactcacagtatatctttgaaagtaactacgtcaacaccacacttataattttttcttatatttttatttttaactaaatatacaaataggacaacataagttggacacttggttttggaatattggcggcggtgttggcagcggcgctagggctgtttctactaggaacaaggcggtaccgtaaccgggttgcggcgggaagcccgttgacaacggttgctcgggtgttggtggcggcagcacggaagtggcgcgtgggagagacgcgcggcatatattatgggaatgatgatgtagtagtggttgtggggcctgaaattgatggtcaactaggtgctccgctcttgacccctaccaataaattcaggtatgtgtcaatttcatgaaaagctgtagttatatatggtccacacaaaagttggtgtttatttaattagtacaaaaattcaaaaagaaaattatagtataaaaatttggaaataactacaaggtcactaactattactatatatggagagaggacgactttgtgttgatagctgacgaggacctcgtggtggtagtcagaaaattgtctgatcagctaattaattaattaagtagagcccaagttagcatatgcatctacatctgtatattatatctatagtatatacacatatataatataggccatatatatatatgacatagagccaggtacctctcgttcgtgagttcccactttgcgcactagaaaatggaaaaagtctatactatatatatggtttatattcattactcaacttgtttatatcgtattgatcgggtaaggataaaggtgggaaaaccggtttttacataacacaacttaacatgaaataaaaacaaatcaaatgcctattaacaatccatttaatacaaatttaatatgttgtttaaatagaataggaaaattattaataacaatatacctaatataactatgtaaaacttatttaataaaagaatttaattttcatatgtaaaaaaaaaaagaaaattattatatgtatataagttttataatagaatactaaatttattattttctctataactctaactttaaaataatagtttaacgggtcaaattggatcaacaagaacctaatatgatttttttatggatcatgttactgtttagaaaattagaagcagagtaaaacaagtcaacacgtctgacacaaaatataaaagtgtgtcaaataaaatatgatacgaacataacacgatcttatattttgccactcctacaactacgaacataagttgttttgaagtttccaacggacaagtcttagggaattttttttttaaattctttataaaatgatgcggacaaacttatcaggctgaaaaggctacacgtaaggccccataattttaaggggccaaaaataaaatatttgttaatgatgtaaggccaaaaagcataacgttataacatatttatatttaagccaacatgtattatgaggtgaaaatgacataattggtaagagtgatttataaagggaaatttgattttctatgcttagaaaatcaaaaaatttgatttataaaccaataattaaaaccctaaaaaaactatacttttttt

SEQ ID NO: 113293 - DNA, 6553 bp, Cannabis sativa
ataaataaaaggatcatttataagctttattttcctacaagggtcaaagtgtgaccttttgaccacccaagttatggatattacacatttgccacagcctagggctcaagtcgtgacaacctatctcgacagtcctccataggcctaccgggattgaccccttaatgttttatttttatttctttttaatgaccaatctcgacagtcttcgctaattaagtctgtcgagctctatcttggtgaacacacaggactgtcgagattgggccactgagattgtccaattttcttgtatagtgcaaggtttctagtaacattttcttctactaaaccctcattctcaacttcaatcttcggttcagcaataagcttggtagactcttctaaccctttactacttcttaaagtaattgcactatagttttatttataggattcacctcatatatatatatatatctatatatatataatagaatgatttattttaaataaaatcaatatctagtattaatttacaaaattttttattaagcatcaatattatttgatttaattaagtgatccaatttaatttctcaattcatcgtcaaaatcaactgtcaattaatgtggtagggattttaatatagaatgtctaatttttataaatataaatgtagtatattggtctggtctcaaagcttgttgctcattcaattttgatcaaatcaccattaaaaagagtaagtgagagtttggaagaactatataatccactaatttctttctctcttattttgcatatctaatttattgtgagaagatttgcatatatcaatgactggggtacacaattttaatcatatattatgtatatgttcattcaataaatttattctgtataaatataaaattgttataaattacattttaataatgttccaacttttctctcaaattactagggttttttttgtcgaactaaactaaaaacaaagtttgaacaaaaagactcaaaatattttttttctagaaaatatatccatatataaaccatcaagtaagctaactactgttactagctatagaatttgttgaattatggccgcatatatatacagatggatagtatctcaatgatcagtgagatgttttgggtagaatccaagaataaattgagagagcttaagttcaaagtagaagatatatcgtactaatatagggatagatactatccaatttaacaacatatatataataaataatatacattaattcaaatatgaaagccaggaggaggaaaacgatataataatatatacatgatctcgtcatgaacagctagccaaatatatatcctatatatagggtatgatagccattgatttattatttcaaagtagctacataatatcaataattagctttataatatacatagaaatatatcacatcttatcaaagacatacagtagtaatattatttgaaagagatattataatatgacgtcttcctcttcttctgacctctttggaacgctagagactaatgtagaaatcaaagctgaagcacagaaattccaccacatttttaagcacactcctcatcatgtttctaatgtctctcaaaacataatacatggttgtgaattacatgaaggtgaatggggtacggagggatctaccatttcttggacttacttccatggtacgtatatatatatacgctcaattataacagaaatttaaaatattttttacgtttctcaggtttattatttgcagcttaattgataattactatatatactgaattatgtgtaaggattctgtattgatatatatatatgtgcgcatacatgcataaatcatatatttacaaggatgatattcttcaacgtatcgatatccatcccaaattttatattcctcttggtcatctaagtttgatctagatctaatgtgtcagtggcaataattacggagccacagtttgccacctcaattaaaattctacatctacacctatatatatctttctcaaaattaactccgttttttatttaatattattttctaatttgaaaaaaaaatatatgttttttttcttctagcatcttgtaaaatatatcatgactctgtctctctcatgatctctggttcttctctaatggattattgaggatcagaagtgccactgtcatttcttctagcatcttgtaaattaaatatatatatatatatatattaataaatagtgcacatttccacgcttgtttaattaaaatgatttggactatgaggtgaggttttaaataatttataaagtctaataaaccaacaagagaaaaagtcaaatggaaagaaaaccaacacatgtctagagaaaatctaactttttctacagaacttgagtacaaacatacgtgactaaacccacaaaaagcatgcagttaaataattaaagggtttatatagatttccattaattaatgaaccaatcaaaccagtttttattcttttgaaaataataattatgtgttcagttatgattttgcaatggagttgctattaaattttttatgtaacttgtatttgtccatgccatgggtttgattccttctatatctttcttactttctaattaaggttaatagcagattttttattttttttttttctttttgaaagagaaaaaaactgaaacttctattaatatattgagaagaaaaaaactacaatggagtccgattataggatcagagtagaaaattatattaatacaaatatcattaatttcaaactaaatcagcaaataaatccttagatgaactcaagttgataaattctaaaagaaattaaccgaaggaaaatttgtttggataacaagaaaaggtgctccaagcctccaagtactaaagtaacaaaaataatcaaagatgtttctaagaggaaaaatcaatagaaataaagagacaaataaataaatacccatttctagattttttttaaacaaaaaaaaaattaaaaaagatgaatgtattattgattttgaaaaaggaaaaaagaaatatattaatatgagaggctgagagagatgatatttttttaattgtaaaataatattaaataaaaaaataaagaaatgaggttatgttttagaaagatatgtgaaatgtattgatgaaattatatttataattttttatttttttttagaaggggttgatttttaattgaggtgggacacaaaatgagacaagaattggggaaggtgatttggatccaataattacaatataaatattgatggatgaatttttaattaatacatcttcaaaatattatatcattatagagtttaacattatatttggtagaggagagagaagaaccgagggaaagggtggaggaaagaaagaagggggtgataatttttttttatttttttgcgggagagatggacgggaccctctccctccaaacataaaaatttgattccattagaaagaattaaataaaaagacaaaataaaataatgtataataatattataaaggataatattgtcataattttaatatttaatttactatttatctttggaactttagacttaataccaaacaatataaagaagaacaattatattcttcatctttcctattctcatcatttctaaactcctcatctttcatactctactttctttttacttatattgcattaaggtagaaattcaagtttttttttaaaagaatattaagttcatcactaaagaaagaaagatggaaatcacaggaggaattccgtccctttgataaaaaccagcaacttggctattgactctagcctgatttgctaaaccatccgcaaaagcattaaagctactgttcacaaagaaaaaattacaaaaatgtaaaatcttaattaattctaaaaccaaaagggaaactttaaaaaaaaaatctaatttggaataacactatgcttctgcaaagcttgaacaaaccacttgcgaatcaggaaaaatcgacacctccatccaattactctgcagagcccactcaaaggcgaacaaaactacctttaactccacttccaaagcacacgaagttgttgaatgatgaagaaaataagcccacaaatcattttagatgttgaccataacggcaatagcctccatgatccctttgcaccaagatgcatcagtaacaaaaataaccctcgattgagttagagactctcggaccatgatcttccatggggtcattattttgaagaggaacagaacttaaattgctaccatattcaacaaacacttcctgaacctttgaaattgactctgccacattaatctctttgccaaaaattagtaaactattctttacattccaaattatagagagtaagcaacccatgtataccagaaacaaatttctactactactatgaatagaggaaaggaggtttttagcaaaaagactcaaagagaaatctcgtatcttctcaccaataagagaaaaaattcttgaaaaccaaagagccttagccacactacaatgtttgaacagatgcaaacctgattcctctcctaaagcacacaaataacactctttttctactacgaacggtactcaactcttaatagggatagcttcattcaaaattctctacaccagcactacaatccttggattagtatcagcatgctataagcacttccataaatccctttttagaccaaacctgtttccttgatccacacagtaagcactcttcatagaaaactcaccattcaattttatttttttcaaataggctaatccaaatggggataaggaagtctaggaatctccataattctcttgccaagttcttctccaaaaatttggaacacaatctcactattctaagcattacctatggacaaatctgtaacaattttaattgtatatcttctactttggagacaatccattgattgctcaaactcatggaactccatccatggtatccaaggttgcttccacacatcgaaagaacctccctcgactgacaaagcaactgaacccttagagattaaacctctaacatcctacaaacttttcaacaagtaagatttgttactctttgctttcactacctaaaagctttcaaataaataatacttcttgagaagacaatacacccgaggtttgtctaccttttaagccacagactaggctagtttagaaagcaaaaccctattcatgtcattaaaacttctcatgcccaagcctccaaactattttggttggcaaattaggtcccaagccttgtagaccataaacctatccttttgcgcactaccaatctaccaaaatttcttcatagctgcatccaaatctccagattcatactggcaacatgttggtagacatacaatagactgacaaagaggaggcaattgactatatcaacgtttgatgaccagcaaaagagagcaacttcttcttccacccttcaagctgcctcatcatgctagctttcaaattattataatcgtccttcttccttctcttaaaaacaaaagaattccctaagtgtttctcatctccctgatgtttagaaaaaaattatattttatccaaaatatatttacataggttgtcatcaataaatatatatatataccattcccctattgacagagaaataaaagaatattaatacatctaagaactttcatttatatatcacgtcttgtaattaattaataatgactttgttaatttaccttcaaccgatgtcgtcacactaaaggtatcccgatcaggcagcactcattaatatatggtgcatatgcataaacaaaataactcaagggcatgagattttgatttttatatattaatgtatattattttaattatatgatttaatttcagatggggagaagaaagtagctaaacaaataatagaagcaatagatgatgagaagaattcgatcactttcaaagtgattgaaggtgatctattggaacatttcaagagcttcaaagcaacactaaaagtgactcctaaaggtgatggaagcgttgtccattagtttttagaatatgagaagctccatgatgaaattatagacccacatacattgcttcagcttgcaattgatttgtccaaagatcttgaatctcaccttcttcaggcataaaaatttttaaataataatctttaattaatatgtgtgtaataatataaatatatatacccatatatatatatatatattatatgagcttggtttgtaataattaatactcaatattcatgatgagagtaaagattgtaataataagtacgtagcctagccagtttcgtacgtgtatacagtgagatttttagtttttatgattgtactgaacgtgtgtatttttgaattttataattaattaatgacttcaaaagaccgtttgtgtttattggaataattgaatttaactttatatgtattctggcatccatggatattgatatatggttaatgtaacaccctaactaccttaggcgtattacgtgagtttta

SEQ ID NO: 113294 - DNA, 1803 bp, Cannabis sativa
acaaaaactcagttatcatctatacagcagatttctacgaaattgttaacagatcttgacaacatgccatttgaaattgctggctttctttaaaaccatgggaacagacacttgcatggtgaatgtaaatccttcacttagtgaaaaagagaagagacaaatataaatttaaattagacaaccccttaagttcagagagaagttacaaaacaactaaaccacactcagaatcaaagccttcgattgtcaattcaccagagggtttagttatctccaacttgtacttaaaagtctcagtcatccccgtagtagtccagtagacaaacaatcgaagttttatgtaaaataaagtacaaaatgctaaatgtcttgcagaatgacacttacatgaaacttactattacacttccatgtacttaaaataaaacttagcagatatatcatgtttaaatttatgggtatataactactgctcatgctaggatcagaaggcactcacagacaatatcttgttacgtgttccatccagctgcatgaaatatgcctcaagcaacatctccagatcttcaacatcattatcatcgaagcggttgcttaccaaactcccacttctcctagaactaatccgaggaagatgagtagcactggtgttgatgctatttgaaccagaacctcccaacaatgcttcagattgttggttctggatccacttccttgtcaagtacagttgtgccatatcttcattgtcatccagaagatgttcgatttcatccctcacctgccattatacataaatgtacttgtcataaatacttactatgatgtactggcatagaggaacaattaaaaccttacgggaggtttttttttcttttttatgctgggaaaccatttgggagattcgttttggcgtaactgttgtttttaaaattaagccatatcaattttctgtattcactgtgtccagatgacatttattttgtaagataactctatttttcctctccacagaggatcacgcagatgctgctataagaaaatgacaacgccactatatgcagatataagagaatgagaggcacacactcagaaagaaaaaaaaaagtaaaggatgggaaagagcttcgtagctgtcttcataattgggtttggcactcagatgttggaaaaatccaagccagttttgctcaagatagtctcccattttcttccaagaactgtctttttttttttcaatttaaccttgataataaaattgttaagattttgaagagaagatatggcaatagtgtgatattagagaagtaccatggacaaggaaagagataacttcaattaatcttgacaataaagttgtcaagattctgatcagaagatggggcaacagtgtaatattagaagagttcaagagtactatggacaagggaacagaggcaataaccatttgtggctgtgagaagaatttttcaagaaaaagcattgcccatataagttcttgttgataccattaggtacctttgacttttttttattcatttattccttctttcctttttatttctactttctttcctctttataaattaaacacttttatttttattttcccctccttttttataaggaagttaatttttgataaatttctcttttcataagagaaaggatttatcctctcaattgtatcctaaaggtttaatcttttctttggaatggatacagcttctcctcaaaaaataaaaaactatttaggatttttgccccctgaactttgacatataccaaatcatatcccctgaactt

SEQ ID NO: 113295 - DNA, 2045 bp, Cannabis sativa
ttttgtaattagattggattgaatcggttcggttcaattagattggattggatgatgcccaccccgataccactgctctacactcaaatagaaaatatcatgacaattctttttttttttattattattattggtaaataatagatataaagaaaaggtatatagataatttagaataataataaaaattgttcatataaatgatataatattaattatattgtaaaggaatcgcaaagtttttaattatatgttggacaatggcaatggctggattcagcaggacatatgtttgatttgagattcaatgtaactcatcatcctaccacataataaacaagtctttatatccctattaataaggagagggtaatggctattggctgggctctacaatgacaacattaattgggcctaccgagcccagaaaatagtctccatctaatgaaattagagtccatcactatttatttagtcgagttcgtgagattggccctatatatatcgaccattttcatgcaaatgtaccaaacagtctgtccgtctcccaatatcattcctggcccacttcctttatgcaagaaccaacgataacttcatgattactactaatttttttctttttcttcttgaaatggacatgcattactacaatttaaatgtctgaatctttttttcttcttttgtattgttaaaacatacacaaaattcaacggttggacattttttctttatccattcatgtattaatattaaattataatttggcaaaataaaaactattaaagcataaaattgcagaagtataaacattttaacgtgtaaataaaaatacttctagtaatagtctagatgaccatgcattaactacctctgttattagtgtagaagagcttgtttgggcggatacctctctacaatttttaacttcttttataacagataattttctttaatgaaatgtaaaaagaaattataataatgcacctgctgtcacatttttgatcggccagtgaccagtatatactatatttataaatactgaaaagaaaaaataagagtagaaagtatcattaagttaaacctaaatagttattggcggtaatgaaatgaaatggaaaggaaatgaaacaatcttcattctatttctttgtttggttgtatattaaaatattggaatgttattctaatggaatggtcattccactattttgaaatggaacgaaagaccattccaatacataatgagaaaaaaattaattatttttttattaattttttttatgtattttaaattttattctattccattcttattcttatttacattctcattcttatgttttcattccttccaactaaacgtcaccttaaggccttactaatagaaaccccgaaggtgattaaattaattcaaatttctttttgtcttagactcttattaggtgacatttagttgggaggaataaaaatatgagaataggaatatgaatgagaataaaaatacgaataaaatggaataaaattaaaaatgcataaaaagttattaaattttttatcatcatgcattggaatagtctttatctattttaaaatagaataggcatctaccaaaaagaccattctattagaatgatattctaatactttaatatgcaaccaaataaatgaataaaataaaagttgtttactttcaatttcattctatttcattacccacaaccaaacaccgtcttaatttaataggaaaaaaacagaaaaagaaaaagtatttttctatttctaactcattcctattggacctcattaggccgaaaattgtaaaagatgtggcccaattgaaagccggtggtgattgatgtatatacaaatgggctatggtacgttccttcatgtgcatctagttgcagagggcatcctcaaaaatagagggcatttacaaaaatactgaatttggggtaatacttttcaattttactgtcacacggcagaattaacatttatactgtcctcccttttttttttcttttatactgtcaatacca

SEQ ID NO: 113296 - DNA, 2344 bp, Cannabis sativa
tcattgatagttaattaaattactaatgtaaaatattaggggcataattcttgtacccggagcaactgagtattttacaaacaaaagactagagagtttgggagatgaggtaagtaaagtatttaattacaacataagaattatattatatgaaagtttattatatgttatttattctgctcttagctgcaaacttattagcattttagcatagcatttcatgcatgatatgcagatatataaatagaaaaacatattattagaccatgcatgattttgaaaatagttcactgttttatgaaatgcttgataagagtttattctaagaaccatgagtgaaagataaaataaaagaaaataaagaaagctataagtgcgactgtttcgataagcaacagagaaaagtttgtagtttcatacggaggtctttatggctcatagtggcagcccaatagagtgggccaggtcagagttggccatgatataacatgccatgttcccatctttctctcctccatttatatgagtactataatgttacagttaagggcacctcaattcttgagctcgacagggcaacgaaggagtaaggttagtatgtgtcctactgtgacgagagatggctagccagaggagagcccatgggattttatagctcagcaagccctgcaggctcaggcttaaccgaacagtgcgtaccagtttagagtcaaagagataaaagaaaataaatgttctaaattcacgatcatactttgaatcgtattttttataatgtcacatacatgcagaactttacgtactgagttgtagctcacaacttgtcctgtgttgcaggtaaagctataaataagtagatggggtgagttggagcatagtcctcaccctggtggtgtacatatggatattttgaccgcgtgggaaggtctaaccctatacttttgattcctctatgtgctcttagtagtcaagtgtaatagtagacacttatgtgtatatgtttggatgtaactaatagtaggaactctatttaaaggtattttattattttaaattaaaaagtttaaattagcaataatttcataggtagttaatcaataaactaaacaaataatactttaaattgcaatagtttagtatattgttgttgttagtaagccaaaaaaaaatcaaaaaaagggaatttgtttcactagaggtccaactacttatggtgcgatcaaagtggttgagctaatgttagaaaatggaggatggaatatccataaacttaacagattatttgatcatgagactacttcggcaattttaaaagggagcaatcagactggccttggtaaggatagttggatctatactttataaagtaatggtcgtttctcctgcaaatctgcttatagggcccaggcggttgaaagagcgactcattgcgaggtcgccccctcaatttggggaaagttgtggaatagcaaaatcccggagcaactcaagattctttggtggtgtatcctgtccaaagctctccctgtttgttcggtgatctggaaatggagaaacaaaattgttttcgtgattgtgatctaaagttatatattgcatgtctctgcgatgtgatctggaaatggagaaacaaaattgtttttgacaaagccaaaattgatatgaaaaatattgctcaggatcttcggtttagatatcaagaaatgttgggcgctagatcagtgacgaaaacggggttgttaacacatgaagcccttcctcctccggagtttctgaaggaagtggatactgtttgtttccaaacgaatgcctcggtggttcaaaaagaagcagggctggcgatatggcgatagtggaaacaggggactctgagacaaatgaactatgggttgctacggacttcgattcggtctctagtgtcctcgaaggtgaattccttgcaatcttgttggcttcccgtaaagcaagggaaagacatatctcaaaaatccacatccaatcagatgctttggggcgattgatgctctcaactccggtcgtcttactgtgggatggacatcttatcctgtctttctgtcttgtttaaaactttgtgaacaatttgacaatgttttctttttgcatattaattggtttgttaacggtgttgttgatgccttagctgcctgggcccgttgtgccaagctaaatgctgagggtcctcttcgggaggtagcccccgttgtggttactgctatgttctaatttgctttcataatatatcgttcttagttatcaaaaaaaaaaaaacaaaaacaaaaagtgtgcttcaatggtatgtcaaaaagtgatataaatttggcac

SEQ ID NO: 113297 - DNA, 3252 bp, Cannabis sativa
tactattttgaaaaatataaggtccattttgtcatttaacaaaacagagggtccaattggtaacttttgcaaaacacagaatccaaaatggtatttattctaatttcaattaagcagtgaatggttgatatggaagaattagagagttatatatatgtgtaatcaaaacctgaattaataaatactaatcatataaaggaacacaaagggaaagaaaagagagagagagacttacaaaaataattaggtttaaggttatgaataattaggtttaagtatatatatttaattataatagatatttataaaaataataaaaaaaattaatagttacattaggattatttttaattacatgtgtatagtttttttaatttaatttcttatttttaattaattaataaaataatattataaatttaataaaaaattcaaaatagggaaaattaattaaataatatttataaacttaataaaagaattaagaagaaaatagataaaaatatttggaacatgtcaccgtcttatttctttatgagcattgctattatgtaccagtagtgcttaacactttatcgacatgtcgggttattggttagcgatattccttaaaagctaatattaaactatatgagactcaatacttagttagactaatagcgatattaacatataggaggatgctaaacaccactgataccctttatcatttctctctttttatatatatatatttatatatagatagatagattcaaattattaattttgtaatataagtcaaacaaataatatttcactacacaattatctggctgcaactcgccacgttggaatcgataaaaatgccacgttggctgcaacttttattagtttagacttcaaaatcatcaactaattaatgtattatatgctattatatataatgcatattgatacaaaacgtataatgcataatcataacaacaaaccaagaaagaaaactatgcatataattatttccatatatatatataacttaatttgattcctaatcatgactttcatagacatggcaaccactctagctatatcatataatatattatattatatatatgtatatataatgtccatttttctcatccacaattgaaaagctattacaactctttatataactgtatattataaaatttagttttagtacataagagaaaaatggatgatcaaaacttggaagagaaggctaatgatcaccacgatgagaagatattgttaatcataatcaaatcaacgattgtgagagtctcatttcgcataattacactaaccctactagcccttttactccctctagcttttctccaccttgcaaagattgttttctctcgttttcttctcctaagccaagtagctctaataccaattataccactctcttcttcttcatcatctcaatatcccaatcactcgtatctccacaccacaaacctagctatcctctatctcatagtctccaccttaagccttgctacactcctccacaccctaaccaataataaactcactactactagtctcaccactactactactactctagggaactacgtagcatggattttacttctaaccatgcaagtttccattggtttagggttagggaataacgacttattatcattagtagtagaaggtaataaattctcaagtgtccgtacggacaggactttgtatagtaaagcaatattttttcttggtttgcatgagactatgattcgttggtcaagtctagtagtggagccggtgataaacgacacaagttttggtgtcgtttggagaagaaagaaggaggaggagatggtgaagagagttttgatgagtattgggttttggtgtttgtggtgttatttagggttgagagaagaggttgaggctttggtgtttgtggctgagtttaaatgggaattaatattgtttgataatgttaatatgaatttggaaatggctgactttgttgggtggtggttgtattacatgacggtgatgattggtgttgtgaaggtcatcaagggactggtgtgggtttccatgtctattttttattatttctttagagtaataaataataatggagttggaatcacatcaccatccgatgatgaacctttattttttttagataatgaagacaaagtttaagctgggtatttaaagttttaacctttattattttttatatgtatacattgtaaaaaccttccaatgttgcataatttataacgtacgggctcggcttgacgtagatgttttctttatcttaagcacttgcatgtaaatgtgtatagtgcctaataaaaatgtatatttatcatatatttcattaacattttgaatgggaaattttatttgtgtaatggtaattgatttttttagaattattattaattatctagctagagcatcttgtttgaatataggttgcatattagagtgaacaaatatttctttattattattttttttggattgctctactaggattttcctctcaacataagttgtggctatggcagggaaaactcaatcttggaaagttggaatgcaatcactcaaaaaagcaagatagagagtccaatttccaagcaccctattctcaagactaaatccatggcggaactattagggattcaagctcttgagctattggaatttgaaaatgatgatgattttggtggaacttcgaagactaatctcactgacctcaatccatatcaagaggtctcagtggcttcaaaatagattgtaggttcttttttaaaacctcctattttcgaatctaagatttcgggaattcccgatattagaagctcatggtcagaacctttctctttgggtttcgattataagtctccaatacaaggacctcctggaacatcgcaagctcattccagtggaggtcaatctccactttctatggaaaactcactgttggcaaccctggcccctactgagattactagtgcaaaacgaaccatctcctcctagattagggctactcaagcttcaaaaaagatgagaaagtcatgtaattctccaggccttgctcatttccctgttctgtgtgttgaacaatctgtgagtaatgtgcctttaattagaaaatgggaagtctggtagagttaaaattggaattggggatattgcagaggaaattttgttataccgaaattaaatacagtaaaattggaacgaattaccgatagaata

SEQ ID NO: 113298 - DNA, 3079 bp, Cannabis sativa
gtgccacgtgtacactgtgtacacgtggacattccaccatggcacttaacagctaaaaatggacggaaagggctaagtgctaataggacatgagtttaaggagttttacagcaaaaattttagaattaggagctgcaaaaatctgaccacttaaggaggttatgccgcaaataactccatattttgcaccaataatgtgagctcttgtgatgttagacaccttacggtatgggttagcatttctcaacgtgtcccatgtatagcatatctctgttagtgacagtgcttggcaacttggaatagaaaaataaggagagagatggcaatcacgtgcctttgatatctgtataagaaagaaggcaaggacacccttttctttaccaagcaaacttattttcccttctttgcattataataattggaatcttgaattattgattaagatatggaaacagctgtggaagaaagtctttacggtaaactagagactgatgtagaaatcaaagcttcagcctctaaattccatgacatcttcaagcacagaccacaccacatctcaaaccactccactgacaaaatcaaaggtgttgatattcacgaaggcgaatggggaactgttggctctgtcatcttctggaattatgttcatggtaattaattaagatatctatatacctctatataatatagaataatttcatcttttataatgacatgcatacaaaattggtagacatataattgatgattattatattatgtgtgtagatgggaaagaatgtgtggctaaggaaatagtggaggctatagatgatgaaaagaatttaataacttttagagtaattgaaggagaccttatggagcacttcaaaagcttcaaactgactattcaggccaactgcaaaagtgataagggtgaagagggctgcaccgtgcactggactttagaatatgagaagcaccatggggaaatcatagaccctcataccttgctccagtttgtggctgatgtctccaaagatctagaatctcatctacttgaggactagtggtatggtcaccatatgtaagtgtgtgagtgtatggtgatttttgctcctatataagcctacttattgtactaaatattaaataaattgtgggcgggagtgaacatatatatatacatatgtgtattgtatgtatatgtgtatatgattaaggggtcactgtaatcctcagtttctgtcaaattgggtgtgcggattttatgtatggtgttaatcttgtaatatgtatgggtaatgtgcaactgtattttttatcttatatattatgcgtacgtagtttcttggttattctcatcgctgaatacatctccaagttttttcaatgttacttatagaaataaattacattatataacacaacactaattttccaaaaactgatctggttctaaaatgttagtaatagtatttcataaaaccaataatcttcaaaactatggatttggatcccaggcaagtactacttggcgaagtttgagtcaaacacaatatatgaattgtttttttttttttttaaatcaaatgaaaattctttggtgcttttggctaaacaatatctctttagaaactagatcatatcgctattataatgaatatccaatacttgctcgataaatgaatatttattaagagttagtcccacattgcatgctaatgtgtagaaataaattgtgatatataagatcaaagggctactcctcccattgccaattggttttgcgatggaaactcattcatcttatcctcaaattctaacatgttcagtcctgtggtctcttaaaggtatacccacactttccagacccaaacgtgaggagggtgtattaagaaaatgaaaacacaccttcgacattgttatggatggcgtgcaccgtgtgggtcgtggatccggtcttcgattgcctcgtcgatatggttgtgggttcggtcgtcgattgggtccaccgtgggtcgaatggggtattattgggaaaatggtaatgtggttatatatggccaattttaatacatatgaatttaaggaaaaaatgttaaagttttatatatatttaatcaaatttccctctaatgattgatatatatgattattgtcaattttaaaaattaatattagattattatgaccatataacttgatgacatagcaattaattattttttttcttattttctttaaatttttctactccttcttcattcttaaaataaatgaaattattaaagaaaaaatattttgtgtacaaaagtgttatcaaagaagaaaaacataccaatattctccaagaaactattttttttttgaaaaaaaactttcaaaaaattaaaaaaaaaaaaagaaaaaaaaaagtgtacaatcccaattttatgagatttgttcgaatgaagaatttcaaaactgtattattgagaaaaaaaaaaaaaaaaaaaacaatttcactcaaagtatatatatgatcttagtcaatattacattaaaatcacagaacaaatccttacaaagaaaatgtcattattgaacagcatatagcatataattgatgatgctaattttagagaatataaaatgtcaacttgaatgaaaatcaaagtttaaaataattatatataaactaattacatatttttttttttcagaacctattaaatttttaatttcttcataattatagtgaaagatgataatgactacaatttaataaatagttattattgaggtaaagataaagtagtaataacaaaataagttaaaataagttagtttctaaaaataatttctaattctttaatactattagttggaaatttggaattattgtttccaagtttataaaatctaatatatatatatatatatatataattttaaaaaatatttttaggttacttgagtcattagattattgcgacatcataatattttttttttgaaaaaatcataataatttttttagtacccatcaacgggtattacttattgaaaaatatatatatatatatatgtttatctcaatatatatatatatgtatat

SEQ ID NO: 113299 - DNA, 9355 bp, Cannabis sativa
aaaaaaaaaaatattaactcatgtaatgctaaattaaatgaaattaatactaaaaaggggataatctagttatactttaggtccactaaagtcaaagatagggtaccaagtgtgtataatttgtaaataaaacgtaccaattaattatttttagaaacataaggtactaaacttgtattttgatgaaacataagctactaatgtattcactctttgtaaaaattataataataaaaaaaattattaattaaaaaataaacaaatataaatattaaaacactaagtaaaatcttttcgttaaaattaaaaaaaaaaataagatgaaaactttttcaacttaaaacaaataacaaatttaatatttatgtatatcgtatgtgatgaagttaaactagtttatggatctattctttcccgatctgagtgatttggtaatattgtgagtatagatcttggataatctttgttggcaggtagcgatttggattgaaagagtacttaaaggaaatgatagaaaaaataattctctacatatttatttatattttttttactgattttatttactgtaaaggtagataaccataaaaataattatggagataatgaatgatatcaatcggtgacgaagaaatggatagaattgacacgtaggtgtataaaattataaaaagataaaaatacattgactctaggtaaaattaatagggttataaatgaaaaagtaaaatcaaattataaaaaatgggagggtataatgcatttttcatttagttttataatttttattagattttaaacttgtttctatagaaatttttaaattttttaataaaaactaaataattaagtgtaataatttaaattaaaattatatgtgcaataattttaaattaaaaggttatatgtgaaattattttaaattgtaaaattatgtgttataattttaaattataagaagttttattataaattttaaaataatttaagtacaaaaaaatattaattgctaaaacaaccttgtttagtaacaaattgttaaaaaaataattaataattataattaatttaatttcaaaataaaattaatgttaattaaagatttataagaaaataaattattaatttattattaatttacaatttattttttatttaatttttaaattaatgacactcatacaataataattattaaaagtaaatgtaaccattaaaattatttttgctgctgtccaaagtaaggacaacgatcaagattcccatgagcattgtgaatctcgtctaatattttacgtttggcatgcctctgggctgcgcacatgtatatattttctttgattattatcatattatttatgaacaaagtgatccaatttcgtattgtttgtcatttaatttatgattaaattgggcagtaggaaaacttccagcagctcaagcaaatgtcgatgtggtatcagcttataggaagtacgaaagggaacaagcattgaagctcttacaaagttacttgagtgtttgctctggagcagaggtgcaatacttaacttttagcataacgaccatgtggattatgttctgtagaaattgtaacaagtatattctcatggaaatctaccttctatatttcttgaatggaaaattggataattttgaaattttctacatcgtgaaagtttagaattgtctctacagttgactaaaattatgtatacaatcacatacctcacaggtgacagccagcataattacagttgaagcaaatcaagtacagaaaggaatagtggatttggtgaatgaatatggtattaggaagcttgtcatgggggctgttacagaaaagtaagtagtagtattagtactactaactattgtcacttggatcatgctttttgcttttcaagcttatttggacgacaacaaaaattgcataactaaagagagccaatcttagcacatttttacagacttttacatttgtagtctttttttttttttttgaggggccatactgttgataatataatgtttgttccatgctttgctttctcataatgaaacttgtagttttattttctgttttcttttctaagtagcttcattttggatgacttaaaacagttttatgaaggtgaaaaagaggtcaagcaaagcatactatgttgcaaaaaatgccccattgttttgtgaaatatggtttgtcaacaacgggaaccacgtgtggactagacactcttctgaggacccaagctcacttccttcgtgtagtcgttcaaagcttgcaactatagggaaaaacatatttagatcatttttacatggtaagaataagtcaatccatttaaattggcttcaattcaattctgctagtggtgcaatctgtgctcaattaaggaaccaggttcagtgtgaaccgtttcatccggatttggcttcttcatcgactttgtatagttctccaagtactttcctcagtgatctcaatggtttatttagccctacaagtgctaatgttggttcagggtataattcttcagaaagaagagtgtcttcagactctgatgaagagaggttatatagtcagcttattgatctcagggtagaagccgagacgtctaggaataacgcacacttggatacattaaagcgaagaaagttggaatcagatgccatcgaagctataagtaaggtaactttgatctgaaagcttatgagttttatttctacggattttgttccttcaggttaatatatggcttatgaaagtgacactgtgaacttctcaattatttgaaatccatatctaggctaaattaactgtataactactcttttatttttgccagtaatgtaacctttcaaattcaatcaaataaaaagtaaattttccaatgtaaacttataagagtagtctaaactcatatttctcttgttgatagaatatctaagtagcaactacaaaacatatacgggctgcatactgactgatgttgatcttgaaatcaaaatttatgaatcaattcttgttatctcatttaatagtattctctctttccttttaggccgaaatgcttgattctgccttctcacatgaaggcaaacttagaaaagaggctgaggatgcgttaaagattacattagaggaacaagaaattctattgaaagaaagaaaagatataactctagagcttcataggaccatgagaaatgttgcactacttgacagtcgtgcacaagaagcactcaacaggaatgacgaagcttctgatgaactgaagctagtgcaagaatctattgcaaccttgaggcaggaaaagcacaggattcgaaaacagaagatggaagcagtacgctggcttgagcggtggagaagttgtggacaaggtcgaggtgtgaactgtactagtcttattgggtgcactgatgagttgcctgagttggcagaattttcattgtcggatttggaaactgcaacatgtaatttttcggagagcttcataattgggcatggtggttatggttgtgtttacaaaggggagctgttgggtagaaccgttgctattaaaaagttgcattcatataacatgcaaggagagtcagaatttcaacaagaggttctctctctcacacacatttttgcatagttgatatgcaattaccttcttttccttttgccctgtccattttcacggttgttttttaaactgcaggtaaaagttctaggcaaactacaacatcctcatcttgtagcactgcttggtgtgtgcccagacgcctggtcccttgtatatgaatatttgcctaatggcagccttcaatgtcatttgttcaagaaaaacaatgttttgacctggaaagtcagagcacggattatagccgaaattgctagtgcgctttgctttttgcactcttcaaagactcagaaaattgtccatggtgatttgacacctcgaaatatacttctagattctgctctcagttgcaagatttgtgattttgggatttgcaggatgataaatgaggacaacttatattgcccaagtttgagatggtcaaaggggccaaagggtgccttttcttacacagatccagagttccggagaattggagtcctgacatccaagtccgatgcttactccttcggtttaatcaccctgcagttactcacaagaaggcctccagtaggtttagcaggtgaggtccgcaaagcaatttcatccggaaaattggcatccatattggattcctcagctggagaatggccaaaccatgttgttaggcgattagtagacattggcttgcaatgttgcgaattgaacggtagagatagaccagatataacaccctgtctagtgagagaactcgagcagttgcatgtctcagaagagcggctggtaccatcattcttcttgtgccccattcttcaggtaaggctgcttctcatgtctttcaatcaaaccccaactctaaacaagctcaagctttcccgaaatttgggtgtaaggttcaaacttgttctttaacttggctcacatcctaatgttctggtttactttcaggaaataatgcatgaccctcaggtggctgctgatggattcacttatgaaagggaagccatccaaggatggttggaaaatggcaaagagacttctccaatgaccaatttaaaactaagtcacctgcatctcattcccaaccacgctatacggctagcgattcaggagtggctttgcaaagcataacaacaaaatcatctcaagaaaattttgtatgtaattgcgttactagtaaatacagtgtgtataatgtcatatgttgcaagctatcttctcacttctttttttcttcttctcaaacttgcaattttgtttggtttgccttaactagagatatgaaatataaaaagaggactgttccacagatttggctgtgattgtaactgtaactgtgacatgatctaatctaattcaagaccacttgagaaatcactgaccctgctagttgagatgtaacctaaataaccaacaaaacaaaggtgatttctattttataaaatgaggtttatgattaaatcaaagtttcaatcacgagtgatcttttaacccagctgcaaaacatttgtgttgaaatataaatgtgacaattgagtaacaattggaagtggaaaaaaagaatcacagcccaagaactccagccaaaaagagtcattcatatacacattacattctcgtcactgattttacttatttattaactaaatagtgaagtatttttctgaaatatatgatacacatattgatgtccttaccacagagagatgtatcgtaaaaattcaaaactggatacattaaagcctcttataaatttacggtcatcaagtgatatataaagaaatccagagataagtttacacccctcataaacaaataaacaaaattcaaagtagcgaagcattacttttcttgtgagcatcactaaagggatgatcctcctctattgaagttccaagtcttgacccatcaatctcaccatttaaaagcgggttagcctctccaactcggtcccatccatgaaagtcactctcctcaggagaaggagccatgttctccttgacactcatttcagcagcagctttcatagtattcgaactctctgttttgttgcccaagttaagtctttcattcttgattataaaagtttcatcttttttagcataaggggtcatcatgttctcctgattttcatggctaatgaactgagagttacaccttccataagtttcaactgatgtttgtcttaaaatcttttgtggggttgatgacctttgtgtgaagcttccaaatccctgaatccctctacttagcttccgagctttatctctttcttctttaagaagaggacccttttcaagtagattcagtactctctctgatttttttctagctgcaagaccccagttgaacctgttatagagaataaataaaccttcttagtttcttcatatacataaatcgtgttaacaaagatttgtttcaaaattctaacaagacataccctttttcgtctatgtactgaaacctttcaatctctttaatgacatctttttccccttgaaattcatctccaacactctctggtccatgagtcaacaaatgctcaagaacaatcagagagttgtaacagaccctccaatttttcttttcaaatttcagaaatctgattcacacccagttgtcaaatcatgtgttagatttatcgttcagtctcagaatttcaaaagagcaaaaacaaaaacagaagtacgcagaaaccttttgtgcaaaatctcaacaattctggtgtaatcatctatctcaaaagcagatcttgagattgaagacaaggtccgagtgtcaggagcccatggattcccattggtggcttcttcagttaatcttaagacattaaaacacaagaaccacacaattacgagataattataaaaaaataaggcgaatttagttttacaaattaatgaattaaataaagatgagaaaaagaaaaactcacaactctgctggtgtaacatctgtgagggccaatctggcagtcttgatcttctccttgaagaaaaatgaagcttgttttttgaattcacggaaagaagaaggtgcactgttttcacagttgtttttgcttaaaattgaggacatgtctgaaaatacaggttagaaaatctgaagactaatttggtattagagttaaatccaataaaacagaaaaacaatacatacacctaatgtctctgtgtgaccaaaaaaaaaaaggagagactaaaaccagatggtttcaaaggttttgaaaaatagcagtgtgatgatgaaaacaatgtcaatgtctctctgtgtggttaaattagaatattgaagatattaacttgtaaaacagagctttattattataataatagagtttaattagtcaatgatgttgttttattgtatttaataagatgagaagagtgtttcaaatgtcaaactactagagagcaccataaggaagaaggcacagaagtccttgttttggttttcggttttaaaatttaaacgccttcttcattcatcaatcaaaccatttccaagatagttttcttttcctttttttatctttattttttttagtacaaacaagtcaaactttatacatacgtacttgtagatgtacaccactatactagcaagtactttactgatcattgaaaagttgtcagattcatcctaccgtgggatgagatctatgatgtgatctgatctgatccgtgttaaaagaaaaaaaaaaattgaattgtagaccacattcttgatttcgaatcttatggccccacctttgaaccccatttgaatatttgccatctgatgctacacatataaaaaactgttttttttttttttttttgagggatatacaaatctgtcctttatacaaagatccatacgtgaaactcatacagacacaaatgaaatccattaaaaaatgctttatactagaaaagtataatcaacatgaaaacgtacatatagcaatgaattcatcagaagactgtacgatttaacaaaaaagaaaaaagaaaaagcagactttatgacaaatttttaagtagataatagggcaggtatgcctctttgttcacattgcatgactatgaccgtttatagtttagggtacgaccacaactccacaaggttatctctctattctttatgtttatgctatatagtaaccacgtaacactcacattttatatagatagatatcttatatttatatagatacatgagtttgaaagttcatcatagaagcaaatattaattaattctaatgtaatcaactaataaccacaaaactcccaatgaatccttcattgtgcaacacggcacgttagtaataaagctttttaatgagaagccggcatttggattgtgtttatcgaaagttattctttgtttatttatataatacaaaaacgaatttgtagtatagttcctccaaatgaaaaaggtgtacggaagaagtctcgtggaaagttagatgtagtctcgaaaggagtttcaaaagtccagtttatctacttcagaagttgttcgcctttatgaaaagttagatgtcattcggaagggcatttccagaagtctaacttgttcatccggaaggagtctctagggaaagctagtcttcgtctagaaaggagttctggatggcttgatgttccctcctagatctttgttttggggatcttgtagacagcttttgacctgtggaagaactagaagaagtggagattgatcccactcttctatccagaaaactaacgattgggaaaggtttagagccaaaaataaaatcaatattgataaaatttccaaggtcaaaccctgacctctttgcatggtcacatggagacatggtcagaatagacccttccgtgatgacccatgcactaaacattgatctaaacatctaacacgtgcaataaaaaaggaggttggtggacaaagagtgcacccaagtgctgaaatatgaagtcgaaaggctacgtgccaatgactttatcactgaagcattctacccactttgggtatccaaccccctgttggtacccaaacctaacaacaagttgagggtgttcatagatttcaccaatctaaataaagcatgtccaaaagactacttttcgcttctaagaatatatcagttggtagctgctacagctagccaagagatcttgagcttcatgaatgcttattcaagttacaaccaaatcaagatgcacccaccagatcaagaagacacaagtttcttgacagacctaggcatatactgctacatggtcatacccttttaggctgaaaagtgcaggggccacctatcagagacttgggaaaaaaaatgttcaaagatcacattggccgcaatatggaggtatacgtggatgacaagctagtcaagtcttaaaaggctgggggaatgtggaggatctagatgaatgcttcaagatcctccaagagtacaacatgaaacttaacccccttaaatgttcatttagagtaggctcgggaaaattccttggcttcatagtcaatgttagggaaatagaagcaaacccaaacaagattcaagccctttcggacatgaagtctcccacaataatcaaagaagtataaagcttggtgggacatattgctacacaactgctccaccccaagagtaaatatcgtcccagatgtagacttcctgtcattaagacaagcttggaaatctgagtcggcatagcctacgggatttaaagcactacccttgtagactaacacataat

SEQ ID NO: 113300 - DNA, 4246 bp, Cannabis sativa
aactcccttcgatctccttgaagagtgcttgcttcctcccgaggcaagacttaaaaagcaatctctcgaaagcttgtaaaaccttcttccagaggtagcactgttgttctacttcttttgcagacctgaatacagactcaagacaatacaaaatacatataaacaaagtaagagatgaacactctcttctctacaaattaaagactctcttttctaaagatatgagtgaaatacaaagatgtaaaagaagtatatgacctagctgcaataaggtgtatttataattaatatacaccttattgacagctcacaatttgaacaagaccacaactcactagataatttcctaaaatagatcttcaattatcctaagaatttctatttctgtacttatagaatcgtgagcagtaagtacgacttatttttttttttttttatagaaattgaaagttttgctttgattttctcctcaagaaatctaatcaaacataataggaaaactcacataaggtcagattaacaaaggtggatagatagaaaagagagtcaccaaacttaccatttttaccttattttccataaataatgaagcagacaacttttcttctaaaaataaattaattaatataaaagtcaaatacataaaatataaaaatcaatttaaataccgagtcgaatttaaacaataaataatacaatatttttgtgacattaaagatgccaaaaataaaattaacaaattcaaaataaacttagctttagtactatggtatcatgaaaaataaattactataaatttattgtatctcccttactagctggtcgtgtccaaatttctgcctaaacattgaactattatgaaatatacgtgctgtcacatctctttatccagcttaaaccaacttcgaatgaccaaatcaaactttagaaagaaatcccaactcccaagcacttcaaaaaaaaaaaaaaaaattggtaaacaggaaatattaaaatttaatttggcattgattaattagttttacactagacaataagttgtacacaaacacaaggcaatcatcacataaccaagctacaaaccaagtacgtgtcacaaacaaaacatccgaaacagttaagctaacacgtggcacattacagttggttcgtcctgttgttgctaaaacggccagcagaggaatagcttccatcggacggcaaagaatcgacatcagatatggcatgtggcatggtaaccgtttgattaaaatcctgctgggcatattcggagacgctccagaccttaacggacttatcgaggcttccactgtaaacgacccatctctggttctggtcatggtcacggtcccgttcaatagccaaacacttgactgggcctgtgtggcccgttaagacggaaagacacgtgtgaatattatcatcccttctccacacgcatatggtcttatctgcggacccgctgaacaccaatccccctgcagccgcgagacagaggatcgccaggttgtgacccttgaggaccccaccgtgggaaaacgactgcttctcacgttcccaaaagttgaccaatccatcagaggacccacagtaaactattgaagagccgttaccgttaacggccagagccgttactgcgctctcctgaaccaacaatttctgaagcaaagaatgtttcgtcagcttcccacgctgctccctcttccaaaccttaacggttccgtctgcggctcccgtgaagaccaatccctcaacggttgcgacgacggcgttgacggcgtcgtcgtgagcgttaattgactcgaggcacttggagttgtcgatcctccagacctttaaggtccggtcccacgaggcggagtacaacaaggctttgtcgtcgctcaagctcaggcaagaaatggcgtccgagtgtttgatccagagggaggtgcgacgacgtcttccggcgtcgagtacgtagctgctgggtttaacggagcttttgaaaatgtccatgagagtgggtaaggtgcctgctcgtttgtggagggtattaatgttatttttgttggaaatggatggtggtggtggtgagactttccagacgcggatcttgccgtcttggtgtccggtgaaaatcttattacctgagattacaatggctttgaccaaaccgctgttagatttgaaaccgctaaactccttgagactcttccagacacgaatgtttttgctgtcggagcctgtgtataagaggtcaccggaggcagccaatgagtaaatatggccttcttcgcgaacaagtgagccgatgagagtgttgttgttgttgttcttgttgttggaataattggaattatcgtggtcaaattgtgattgttgagaccaaggagacttattattatatggtaggaatgatgaaacttgattccaaggagacatcatcattggagatccctctgtgcttaatctgctgggatcgaacccacccataattcccattggactcgttaacgaagcactactgttacgagcgtaatcatccatcatcatcatctccgaattattattattattaatatttggatctgaattattattatgtaaactcatcatcttgtaattaatatttcctccttttttctcctccctcattctttttttcttttctcacatcaatagtgtatataaacaagtggaattaattaaggagacaaaaagactatatttatatatatttaaggtataaggaatatatatatatagagagagagatatatatatacgaaggaggagactcaaaggtaaaataattataattgaaaggcgagcagaagaatataaggagagggtgtatatgtatttatatgatggtgaaaacgaaagggacggtggagaagatagcaaactaaacggtgatgacacgtgtaaggaccaaaattatcattaaattattttaattattaattccgatttcgatgctaacagatcatttattcatcggtaattgcttgttttttttttttttctaaataaagaaaaagaaatcctttttagtttaatgctaatggaatgagtttattatagttttgtgtttaaggtatttaattaaaaagttaatatacgtacctaaatagaagaaagttagttcataaaaaaaatagaagaaagttgttccattacgatatgcatataaatatatatactgattgagattagcattgatatcacgatcactaaccagaaataatctctaccagtgaagtctgtctgaaacgtacgctaacttctctttcgagaaatttatatgcttttcagaaaaagaagggatgcttttcaatttctttttacttatatatatatgtgtgtgaatgttataattaagtgaatataaatttgtattatgtataaacataaacataatgcatatgatatccttcaaaccatattgggtatttatatgaccctttatttgatatatgatcattacatatacatttcaagaataaaaacaaaagctatttgatgtagtattttttccaatgtattgctacattctaactggtgtggtgtactctttcatttgtattagtaagaaaaaaaatgaagataataataatgaatgatcactactcatgcatggatgaattaatagcattacagttttattagaaaatgattaaaaataaaagtaatcaaataatgaatgatcatgtcaaagttcggaaaaaaaaaatatagataataaaaccaaaccataatcaaaactaacaagtaactcagtaaacacacaaacacacaagaataacactatattttacttggttcgtgatcaagattttcagcaacaattaattgaggttattttgaataattaatgtgaatttaaaaaaagtatttttacatgactgaagcatattaaaaagttttagtccacgaatcattttcattgttgtatatttttacagaaaataaatattttgatcccccttcctttatatcttgggatatttataggctcataatagtagtaaaaatgccaccatttgtcgcgcttgtacgaaccatgccttcacaatttcccaaccttggttatagagcatgatcacctattttgtgataatgtgtctgggctcaatataggtgtttggtaagattggatttttctcttactaacgatttgacagctcacaatgtagtcgtccaatgaggcatggtgttaggttatttttagttttagtatatttttaattgagttttaatc

SEQ ID NO: 113301 - DNA, 10271 bp, Cannabis sativa
  modified_base (35)..(48): a, c, t, g, unknown or other
ataaaatgatttctgatcttttattaattagtaannnnnnnnnnnnnnaaatgagttttatttagggtaaaaaatccagcacttttgtcctgcatccttcatgccaaagataatcgatgatgcccaaatcacaaaagtcagctccactttaagatggcttgggcagatgaccctagctgtcgtgacatcattactggacattgggcggcttcagattctattgatattttgggtgtctgaaccaagattaatggtgttacaagtgcttcgaatgaatggaatggtaaagtttataagcgcactcgtgaggctattaagaagaagaagaattagcttgaggcaattaactcgaatcttaattctaatacttggccttcttgttagaagcttgaaaaggaacttgatgttctcttgtacaaagataagaagtattgggcatctcgtgctaagaattcttggctcaaattgggtgacaaaaattctacttaatttcatcaaagtgccactcatcgtaaaaagaaaaatgctattggtggtatttttgataaaaataaaaattgggttgagtcgcctattggtatttccatggtgtttgaagactattttcactcattatttacctctcataggccactagatgatgctttaaacatggtgcttgatttggtctagccccaagttactactgaggttgatggtgtgttagtgagaccattgatcgaagctgatgctcagattcctttgtttcaaatgcatccgagcaagagtcctggtaaggatggtatgtgtactaacttctatcagaaattttgggacattgtttgtacaaatgtgtgcaaagcttgtcttagttttattgatggctcgaattcaacatcctttatcaatgaaactatcattaccttgatccaaaaggtaaaatctctttctcttacaagtgaatttcgaccaactaatctttgcaatgttctttataagatcattacaaatatgattacgaatagattaagagagatgttggaatgatgttatttttgaagagcaaaatgctttcattcctgggcgtttaatttcttataatgctatgattggtttcgagtgtcttaatgctatcaaaaggcacaagaagggacggaaggggtttcttgcttataagactgatgtggcaaacacatatgatcgagttgattgggcctttcttaaaggcatgatatccaatcttgggtttcatcatagttggataggtttaattatgtgttgtatcactaccatgtcttatgctattaatgttaatggggagatcattggtcatattaagccatcttggggccttagacaaagggatcctctttctactttcttgtttctcatatgtgctgaggggttaacctcccttattaagcatgaaattatcttgggctctctttcggatatctcttgtggtcgacgaggtcctatgatttctcatcttttatttactaatgatagcttcttttttcttaaagcgtcggtggccagttattctcagttcaaagaaattcttttgttgtatgaaaattctttgggtcaactaattaatcttcataaatttgcggtttgtcttcttcacgcatgcctgtggatttctgcgtattttttgtgcatattcttgggggttcctctcgttccttgccatgataaatatctcgaattgccttgcattatgggtaaaattaagactggcctctttcaatcaatcaaggatagaatatggaacaaactctttgggtggaagtctaagcttttttcttctgggggagggaagttcttttgaaatctgttattcaagccatcctacttatgttatgagtttatttcgcttacagtggggattgtgaatgaaacaattgtatgtgtgctagattctagtggggcggggatgatgatatgaagaagatgcattggtgtacttggtatcgtctatgctagcacaaaaatgatagaggtatggactttcgtgatatgttcttgtttaaccagtctatacttgctaaacaggctgctcgcttgtgtttatcacatgaattctctagttgttaaagttatgaaaggtttttactatgccgatggttctttgcttgatgttgaagagacgaagtgtgcttcttttctttggaagaatatttgttggggttgtgatctttggaagtaaggttgtcattggctcgctaggctaggtgatactataaatattcgtgaggatgtttggataccaaaggctcacgtggactgtacctactccttcaagggtggtcctcattttcgtttggttagtgatctaaaactcaattgtggcaattggaattccattcttatttaggaagtgtttgatatggtggaagctaaagctatactatctgttccgtgctctttgttcgatagacaaaatagacttatttgatatttttcctgacaatggtgtatattttgtcaagagtggttattggagcaccgttttaagcttgggtttgggccaagaatcaacttcttcagtgacttctccttggtggaagattctttggggcctcaatctcccatcaaagattaaaaactttgttaggcaatcttgaattttttgacatcctatgcaaatctcacttgccatggtcttcatgcttctagagtttgtcctatttactttcagaataaggagcccactatccatgcattatggttctgcttctctcttaagtcaattcgttcagaatggtgtctcaaaggtcttgataatttaaaggatgcctctagtttctgtgaacttctgttgggttgtatgaatttttacgcaaacaggaattataagagttcattgttcttagttagcgcatttggcatagacgcaatacctttgttcatgaccataagcttctgcctgataatatggttagtccttgtgcacttaattacctttggcaataccaagatgctcaaattggtgggtgtgttaccaatggtcagtctttctctagctcaggttcgaggagtagtttggagctgattccgggagatgtgaatctctttgtggatgttggtcttcatgaggaggattcaaagataggattgggagttgtagcatccggcactacaagaaaaagtttttttgccagtgaattttctcacaggcaaaagtatatatatgtcgctgacatagttttaccggtctaatttttacctgcaaaagttttactggatcattattttgctgacaaaatttctccaataaaaaattattttagttttgtcggcgatatatagttcataggcaatttttttttttaaaaaaaattatatttataataaaattagtcaaactttttaagataataataaataaatataatctgaaatttatattacaattataaaaatacataaattgtctaaaactaaataaaaatattgttagtttataaaaacgaatattatctgcgaactaaaaaataaaactacaagtccacagcatcgtcattatcattgtcatcaccgagaagggcattctgtaaaaaagacccagtgccaggaggccgaaatggtgaaatcggtagaattagaggcattgggggcatgttgaatcctagaacgaagctggccagttgcatcatttgttgctgaaaaactctcatgatttgattctgagtttgcatcatttgttgttgccactcgttccgtgcttcctgctcttccacccttcgccttagggcctcatattcctccagggtggcagtgggttgtccaagaggacccgccctgggagttgccctctttgcccccgtcataagtctcgacagctggcccatccctctcaagtggcgtgtccactcacccagcacctgtgtcataacaggcatgtctgcgagaaaatgggtggggtcgatattgtactattgggggacattggtcagtgctggttgagtttcacgaatctcaaccattttgatctacaaaaaatttgaacaaactgttagagttgaatacaaattaaaatatagaatgagtttattaaagatataaaattacttacatgcggttgttgtgtgtgttcatcgtgccatttgtggtccttgcagtagaattttgcaaaagtgtctacaacactgagaagttctgccgtcttaggataaagttatttttatacaatataaaaaattagaaatatattattccaaaaatatgaatttttatataaaaatgctgacaaaatcataccccgctcatgatgtggccgactatggtcttagaccctcatccaccttgaattttcatctacccttggtttttcgcattttgtttggctctttcctgtaatttaaagtaaatttattgttagcaaaatgagcaaaaaatcataagttaatggatattcaattttacaacttttattttatacctgctgttttaggtctttccagtatgcgataacctctgtctacacctccggtgtaaccacatctacacgtgatctcctagtcgctttcacctctccatatttcttaatattcttcttccatgccttttttgtgtctactctctagtcacgtagcccttttcacattgatttaagaatgtaatcctcgaacataggattctcaattgggaactcaaacttgctctgaaaaaaataaacattaaagttatatatatttgtttttttgtataatagttttgtttgatctatacaaaaaaaattgaatgttactgctattctactcagatagtctgaatgactgtctcctcaatgtcctcgaactcaaacttgttcaaaggaatggtattgcaaaagagaaacttgatataattgtcaaacttgttaccatagtcatctattggggccctagtcgccttataaaatctaaatttcaatttctatcctgcaggctgcttggccagttcttgtttaatatttttttctcttgtactttcccttaacttcctttttcttattgttgcttgcacctacattagccattctacacatacaaactaggaataattaattaatcaacctattaacaaaaagaacatgtatttaatttaattaacagtgggtttaaatattacaatactttaaagtctacaagtcatcataataataatcatcatcatcattaaaagttacattattttcattatcactatcactagtgtcttcatcatcactataagcaataaaatcatctaaatcttgacagtgaggctgttcatggtccctgctggtcacttcaattgggttgacatcatcacggacatattcaacatcgtccagttgtgaaagttgaacaactaactggattcctgaagaatttctttcttgtatagtcgtggtctcatcatcatcctcattcttgaaaatctgcgaggggtgtaaacattgccaagcttccaatcaactctattcttcaggccgagaatgtaatatatcaaatttgcttggaatacaagtatggatagttcattttggtaccattgacgggtgacgcagacactagtgaaaaaccatcattttctatcgtgttactgtttttgtcccaccacttgcacctaaaaataataacactacaattctttaagtaagtgaactcgtagacttatttgaatacgccataataaaatttaccaccttctccaggcaccaaaataccactgttttgggtgtacaattgtcatctcgatcctcgactaggaatttaacactgttaacaatacatctaggataacaatagtatgttggattagaggaatttgtgatggcgttcaactcatcaaatactttcccagggttattcgcttggagttgattgatctatagttgagtgaaaatgtaaacaatactagtacaagaaaccgtatttgaatgacaaaattagtagaaagctatacttactcgagacttgaaccaactgggaaacttgttctctttaactgtgtcaagattttgatcactcctaagttgtagctcgttcctatgctcactacacataaatagatttttgtaagagaaggttgtgagtgaagaaaactaaattaagaatgcaaaaagtatcttacttgatatacatctccacttcattacaattgttcaccactctgccttaagcttttcttgcattggtaaagaaacgatggccctcttaccgatgggtcgctcaacatgcttgaatacagagaattcccttttaggcttatttggaaggacatcactattttgatctagtcggttaaaccgagtttcaacttcccaaaagtacatggaacaaaagcttaatgcctcgtttactacataagcttcacaaatagatccttctagtcaaaatcaactttgtacatattgtttgtacatggatatggcttgttcaattggatacatccacctatagtgcactggtcccccaagtatcacttctttaggtaaatgcatcaccaattgaacaattatgtcaaaaatatcaatggaaaatggtttctaatttacaaagaatgtccaaaatgcttttttgcatgctctacaagtctttaacattcaatgtctttgagcatagaaaaacacacatagttcaattattgtattttgaatttctttcttcaaaaatttttgaatgcccccggcatcaagcgttgtaacagcacatggcagtcgtgagactttaggccagaaatcttgtcttcactctcattcacattcttctctaaatttgaagcaaatccttttgggaactgcacaaacttgataaatatgtaaaatttacgtcgtttaggaagactaagcgtttaagtagcagacagtttcttccaattctcattgtggtcttcatacaaccacaactcacgatgtattttgaggtcttccaaattaagtcttgctttgtcggtatccttacacttgccctcgatacttaaaagagtcccaagtacattagcgcacatatttttcttgatatgcattacgtcgagattatgtctgagagacaggtccttctaatactcaagttcaaagaatatactcttctttgacaaatttagctcaactacataacgtttatgcttgactccaccaaatttttagtatttttcaggcaaacgaaattgtatctgctccagctgagctaaaacatcgaccctgacaattctgaagaaggtggtcttttctcaatttttccagcgtattttttacttctttgccttgggtcgtccatttcaagaaattttctatgcccaacataaccaatcttgttgtgcaatccaatagaaggggtgtgtttgttacaagtggggcaggccttgtacccttttgtgctccaaccagacatcaaagcatacgctgggaagtcattaatggtccacaaattagcaacacgcattgtaaacacagtcccgttgtaagcatcttgagcttggacacctgactcccataactctttccattcatcaatcaatggtctcatgaaaatatccatgttatttccaggcacagtgcgccctggaataaatagagacaacatcaacgactctgctttcatgcacttccaaaggggtaagttatataggactaagataataggccacatactgtaagagttactcatgttaccaaacagatggaatccatcagtggccaaacccaacctcacatttatgggttcaagtgcgaaagatgggtggcgcctgtcaaactgcttccactcctctgcatccgcagggtgcctaaacacaccatcctcttttggtctcttagagtgatgcctccgcatgtcctcggtctagtgtcttgaattgtataacctcttcaatcttagagttagggaaaagtatcgcataacttttcgagcaactttttttccgtttccttttttctttttccaacaactctcgccacaaataggacaattttttttttctcattatccttccaaaacaaggcacaatgatacttccatacatcaattgagtcataacctaaaccaaggttacgtaacttcatttttgactcgtaatgggacttgtaattttgtgcccttcgaaaataactcaatcaatatggagagtaacatatcaaaagaatggtcactccacttattgagaactctgagtgcatcaacttcaccaaagcattgagcactgattttttgttacccgagtacagttcacttttcatatccttaaataaatcgtcgtacttaccactacaatttagcaaaggctcattgaatgaatcaacgatagtacttgtatcgtcaaaaccatgatattctcttaaaatatcagtgatcatcacatctgccatttcttcttcatcgttgtctactaattctacagccggttgcatgaatgactccccatgaaaatatcaggtcgtgtacgatcgttggatgccatgcataaataaatgtacccagatattatccggggtctcaaagttcacatttatacatctcatgtaagggcaaggagtaagtccaacataatttatttgcatttgagaaactctaataaactcatccacactcttatgaaactctacagaccgtctgtttaaagtcatccaacttttgtcgctcgccatatttctacttaatataaaaagagaaagttcaaaacaaagttcaaaatgtgcacgtgttctaatccaccttctcactctattactaaaagggtaaagaacttatcccatccaaatttgtaatatacatatagtacaatctatgctcttaagattgcttctttttttatcaaaattttggtagcacctccccacagttctcataagtaagcaaactattaataagtctgccaacttacaagaacatgcgaggagacgacgtaccaaaatctttaacaaagaaacaatcaaatgaacaatagatcacactataggtatacaacaagcccaaactatctatgtggacaaaaaaagtcctggataatttggagaagcgtatttaagagtccttactgactcagtctctccaaacaggtctaaagaaaattgtgcgcgtaaaaaaaaaaattatcactaggtgataatacatatacacaattgttctatcctatctttggtttataaccaaagagatcaaatcatgataaaaattttattttatgctatcttacaatattttatgctattttattttaccacctacaaatttttattatgaatagtgttcatataatcttattgctaagtaaaaatatttaccaacttttaaaaattaaataaaattatcattttaatattttcaacttattatttaaattcacaattattttttcattttttcatttttaattttttaaaattaacaattcttattttaattttcaagtttctaattttttaaaattaacaatccttatttttatttcatttcaagtttctaattttttgaaattaattttttttatcattctaaaattttcaattagtaaaaattaataatttaaaatttaacattttaaagttaccaacttatttaaattactaatttttttttattattttaaaattaccaatatgttatagtttgaccattaattttaattgaaatttaattttttttttaaattaaagtctaaactaaaatattaccaatttactaagttaccaatttttttaattaaagtaaattaaaatgttaccaatttacccatttttttttaattaaagtctaaactaaaatattaccaatttaccaagttacaaatttttaattttttttaattaaactataagctaaaatgttattctaacaaaatttggcaacataacaacttaaaattgatcattctcaaatttttgatatctacaaaaaaaccacaaatacaataatatttgccaccaatccaaccgcagtatattgttcacaaaacctacttcactatggatgaatatacaagatattcaaattctactaataagcattttcaggtaaattcatagcttggtgtacttgcaaataaattgtaggacaactttattctatagtgtatgagcaagtatatcaaagctaaagatttgttgaatatagtattaaaactatttttttattaacatattataaaagtattctaaactttaaatggagtgaattttccaagcaacaagtaaagcgatatcgaaaatttgtttactaaaataaaattagaaaataaaaataataactataattctacactaatatacgcatatacatattgtaacgccctaatgctaagacacgctacagtgctttttcaat

SEQ ID NO: 113302 - DNA, 2276 bp, Cannabis sativa
catgaatgactgagaacatgttatacaataatagaatctaaactttttgaaaggatagaatattagttctcttatagtgttaattctgggagtgctaataattagatccaaatctataagtagattatagattaattatcacattgaattaatggaatataaggaatcaagagataattagaagggtaaaacaatgattttgaccaattataattatgaactaataattggagggcaaactacttatatttattatatcaatagagtactagtaagaactctgtctatattgtcaaagagtgtaatttcatatttatagtgtagtgataatggaattaataaattaaattattccattggtgagaccaataataattcagtatttattggagcttcaaaatataggctcatggtctccgagtcacttctatacaacactatacaggaaatgtttttatttgatgaagaaatttgagatagaatctatttatatgagaaataattcttaagggaaaatagtaattttgtaaaacttattattttgaataattataacaattatgaattgtgtaattaaatagtatttaactatttagttttatttgatgaaactatattaattagttaaatataatttattattaaataatattttagagagaaatatattgttctccaagagttcaatcctcaatgagttttcagaatgagagaatgagagctcgagagaatgatatcgtgagaattaaaattggggtccctttacaattgactttactttccttatataagttttcatctaggatttcaaatctcttaaccccaagagcacattcctgtaactatggttaagttaggtttaaaatacaaaaatcacatttcaaaataattatctaaaaaatgataaaagataaaaatatcttctaacttgacatgttgatatatttctaccacgaggaacacatgctaaagtcatgttgttaggtcacgagaagaacgcggggtactcctcatttagaccgagatgacaagcacactgaggctcatcttaggctgaggtgatgagagtgagtggcctctatttgggttgagatgatgatgaggccgagaccagtattttttcgaggtcatggaggcgtgaagatcctcatttggtccgagatgacggaggtgtgaggacccccgtatggttgaagatgatggaggtgcgaggactcccattcagtctgagatggtgagggcgtggggaccccattgggtcgagatggtgagggcgcaaggacaccattgggccgagatgatgacacataattccttaagtaaggtccccaaaatggtgtttagatgttatgacctttcctgtatccaaagagaaattaataccaattgccttcaatttttttgagggataacaagaagcttaataaattcatttagattatcactaataccttcatccattctaaaatcatagaatttttgttttaaataaaatcttccaggcaaggtctttgccatgaaagtctgttcaagcttctcccacattgcaacagttgtttcctctcttattatttttctcaaaatctcatcttcaaggctagtgtttcttgatttctttaggatctctttctttttgaatttctccaatattgaagacattttgtcttccctcttaagagcttcatccaaccctattttttcaagatgagctttcatcttttcccttcatagatagaaatcattcttctcatttaacttctcaatgtccatctttgttgtagatatccttgttgatcacttccaatctaaatcttgaagttcttccaagtgtgatttaggatagtagttaaacaccttctcctctctgtcaagttttgattcttgctagctaatatctttcaattgaaaccgagctctaatactatttgttgtaatttcaatagcaacctgagcaagcataaaacacaaataaccaaaccaaaaatcaataattgaaatgcaagaaatgtaaaaggacaaaatttaaataacacacataaatttattagggaggtttgaacttccttcacaattgtggagagcctaatgccctttgaacttattggaattgaaaatggctgagtcatttatttgtaatttcattatctgtttttatccaatgtaacggtaatcaagttagttatttgtctgttgtaagtcggttaacctcttcttgtattcaactctatataaatgtcaagcaatgccaactgttttcttagttgagcaatattttc

SEQ ID NO: 113303 - DNA, 2057 bp, Cannabis sativa
catcaatgattggcccttcaagtatccattcgactatcacttgggaaaactttgagctttggccactctgggtcccgaagtggtaataagtctttcgtgtctgggtagttatattaaggcaatgtgaatctctacatatatctcagttttgacatattcctagatctgcaaagcttctccgtgccttggtataattgagtggacttcattggagagatcttgaggttatctcttccttttcatgccacatgtcacccattcaaaaacacgattaacatttacctccaaacttttgagactctttgagtagcgggagcgtgcaatattcttttgacttttagagataagtttacaacacatgggtattgcagatgtattaagctgccatcaattaaaggataaagaaccaatggtgccactggcgtggcatgcatcctgtgtgtttaatacatccattgacaacacacgtgtttagggggtgcatctttcagaggaagttacaatgatggtaggtctattgacatgaccctcctttaatacacactaggctcaacacaagaaatgatgactaatgaatgccctgcgcaagttttaaatgccattttttcaacttcccatccattagatcaaatcgtactttttggagggaggatctggaccattgattttaaattgcatggatttggctgaaatataaatagatccatcaaacctattttctctttttttactactccagacttctcaaaatctctactttcaaacttcaaatcagagtcccttattcctagaaaaacttcgaccttacaattgttcccatctataaatgcaagaagtttttgactgcctaatctagtacttcttagaattttgtttaacctattttccaaatgcagtgtcactaaatcttgaacttttccaacccaagcccgatgaggatttttacgtccaagtcgggttcggtcacgtgattgactgggtacacaactcctgggcagatttccaaaaaaacctttccctttccactcatacatcaagtaagtatcccgacgcttgctaaatcttgctgtctcgtatcttggatagaaatgattagttcaagctaggtctacgatatctgatacatttgaatggaaaaaggatacccatagggttacatttctaggacagggttatcttgaaacttttctgctaagggagggctggtactgcctagacagatagggtatgcaatctaaatttagtagacctttgcatgttctcaggattttgaaattagggtttggaccaggtagaatgaacttttgagtgaatgttaggactatttatcatttgtgtgcctatttgaagttactaggactctgaatgggtttgatttcaggaagttgtttgaaattattttggtaattttcccctagattcccaatctgttacttcgagtcgttgtctagcgaggactagcttctggaagtgaaaggtctggcatggacctctccaagcaattttaggggatgtcttccccgatgtccatataatcatttggatgttgcatgcaatttcttaatttttcttttcatgtcatttttccaatgattgatttgaacgatgaattctaccttgaggtagtgaatataaaagaaaatccaacggttgctctcacagaggaggtggctaatgaagaagtttcaacaaaggctccagttggggaactttaataggaccttaccttagagactactccaaaggctgatccatctaggtacctataaaaaaatcaagggaaaagggaaagccaacgctccgcctcccacacctgtgtaaaatgattccatctgggagattgaccaaagaattaacagcttcagatcatatggcatgatggagttttatgccaccgaatctggagtgcagaacattctagggctgatgtggcataggctatctactgcagaagagtcaacttttgtgagcacaaatgggttcagtgcttagagttgtgcccacattgtaagcgaggcacatctccccttgaggacttactttgcaaaatttattgc

SEQ ID NO: 113304 - DNA, 5441 bp, Cannabis sativa
  modified_base (54)..(58): a, c, t, g, unknown or other
attgttttagaaattcatatcaggatgtcaatgaaacatacttgttagtaaatnnnnntcctggtaaaatatttctaacaggggctgccatggctgatgattcgccacaccagatgtagcatgtcgagaagttgcagcagggagttgatgctgttggaaggtatgcttgtacgcttgtgatttggcccaaatttcaggtgatagctggagttttttaccttgaatgaaattatttctatctgtccatataaaccacatagtgcacaaaagctgttcaaaatcagatctgctataaatagtggacagataggaaatataatcaccatttttcatatgagttgctatagtaaaatccagcttgaaaccagtcaacttccacacagttttagcatatttacatccaaacatagcatgccccactgattcccaagcagtagaacaaaggctgcaacatgccgaatcaatgattttccttcggcaaagggattcagcaacagggatagcattctgtgatactctccaaacaaaaatcttgaccctagaaggaagtttcagactccaatgtaatttccaccaggcatcatgggatgatgaactagaggattggaatcgatcttctaaagagctggcaagatggtatcccgattgcactgtataatcccccgaggtattgtaatgccaaatccaattgtcgagatcattagagtgagacagaggaatttgtagtatttcatcaacatcagcagggcaaaagtcttgctgcaataaaggcaaattccagtccttagtgtgtgcaagatagtgagacacgttggggctgcctgtgtaacccaatggagtaaaagtcgaattgctaggtatccaaggatcacgatcacatctgattttgctaccattccccactttaaatctcaaaccaagagctaaaagttcccttccccaacagatgccctgccaagttagagaggacaaaccaccttcctcaacactcatgaaattgttatggggaaaatatctacctttaagcacacgacccagaagagaatccggttgctgaaatagtctccaagcttattttgctaacaaagcctggttaaaatgaataaaagagtgaaatcccataccaccatccgactttgttttgcaaagcaattcccatttcttcccatgagtctttttttgtctgtatccgagccccaccaaaacttggctgtcgagaaaaggtaataggcaatttaaagcaatgcatcacataagttggaatagattggacaacagctttgaggaggacttcttttcccctagtagaaaaaagcttatcattccaagagtgcatgagtttccatattttctctttaacatccctgaagagttgcttcttatttctttcggagtaggcaggtaatcccaaatatttctcatgacactcactaatagggattccaaggatttgccggaaagaatttttgacagcttccgttgtatttggtgagaaaggcatgactgatttctcaagattaagatcctgtccaaacgctcgatgataaatatccaaggcacgcttaattgctccacatgaacgatcgtccgcttggcaaaaaagaagactaccatctgtgaaaaaaagatgagacattgatggagctcttcgagaaatggcataacctttaagcctaccaattctttcctcaaattgtaaaagtggatctccatgtcgaagtcctctctgaggggtaacatttccagaaacagtaccatttatgagaaaagaaaaagtagtagctgtcaaacacttcatgataagagaaatccatctgatattaaaccccatctttcccataaccgcgacaatgaaagaccattcaactcgatcaaaggctttacttgtgtcaagcttaagtgcagcatagccctttgaacctcttttgcgatgcttgagattatgaactagctcaaaagccacgagcacattctcagtaatcaatcgactcggaagaaaagcactttgagtttctgagataacatggggggaggatatccttgagccgaagagcaatcatcttggagataagtttttaaataacattacaaaggcttatagatcgaaaatctttcatagcaagcggttgtttgattttgggaattaaagtgatgagggtcttgttaaatgcagccgggttacccccctcattaagaacatgaagaaccacagtagtaaccaatgaacccacaatatgccaattatgttgatagaacatagccgacataccgtcaaaacccgggcttctatccgatcccatagtattcaaggcaacaagaacatcggctgctgtaaattctctcaacaaaattttttgttagcatcagtaatagttatgggaatggtggagagtacatgagataaagcccaatggttctcctccaaggcagtgaaaagttgctcaaaataagtggagacaatgttcgaaatctcctcttttgaagtgactgtagtgccattctggtcttgtaaacatttaattcgattggtagatctcctagcagaggctttagcatggaaaaatttagtattacggtcccccgattgcagccaatccacacgagatctctgctgccaatactgttcttcagaagctaaaagatcatccaaaattttttcaaccgagacaataacttgagagtatttaggaatggaagtagtagctgaataaagatgagtggcatttttctgagcagtactaagcttcccatattttcttttatgcgaagcttgcaaaccagaagtagaagtatctagatttttaaccaaactcgtacaaggatccccatgagtaatattctgccagcagtcaatgataatatcagtacattcttgatcttttaaccacatcttttcaaatcaaaagcgagatttctgcttaggttcgggttcaaaattaatggagaaattgacatgaacacggagagcacgatgatcggaaccataataatcaaggtgagtcaaggaaggtaagcacaatccattactccaaacatcattgatgaagcactagtccaatctctctttcaaagcaaggtttttttttttgccaagtaaagtcatccccttcataaggtaactctcttaaagaacaacgatcaatagtagaacaaaaagctgtcatttgatgatcgtgtctaagagggccattgtttttatgagagtgggagaaaatctcattaagatctccaattagcatccacgggtccaatggggacacatcagccaatctatttatcaatgtccaagtgtgttttttattaacagcctcaggaaaaccataaacaatagagagatgccatcgaggactattgtcaaaggagacatagcaatcaaaataatttgaattcattgaaagcaaggttacatttacatgatcagtccataatgacataataccccctttccaacctacatgagcaacttctaaaccatgattgaaatgtatagactgcttaaaacgagaaagagtgccaacaagaaccttagtttccatcaaaaataaaatatgaggagagtgctcacgaactagcaagcgaagacgacggaacgcactcgggttccccataccccatgcattccaacttataatattcatggctgagagtcgggttgcttgttgacaaccgctgctggaagggatggtaaattctcaattgaatccaaagaagaaccagaaatggactgagagtgatcaccatcaaaaattgaacccaacagagaattatttctccatcttttcaacacacttctaaaattttcaggatccacatgtcttttaaaagttctgttagcagcctcagaatcacacaagtcatcatgaatagccacaacctttcctttattagtaggaaataatgttgcaggacctttagtttggctaaaagaagcctcagaagcaataatcatggagctggtatatatggcttcagtagttgagtgggtagtggtagagtgagttaatgtggtaacgggtgaatgattaacataagagggggagccagggtaagcattagcagtaggggaaaaggtgttaaaggggtgggagatggtctgataataagtgggaaagggtgatgggatttcaggtatggtttcaacagactcagaaactgatgtagtatgaaaggaagattcaaccaatgtaagaggagaagtatatggaagggaccctatggctagattgcgattggaatttatagcagggatggcatgtccaatggcttttttggttattcgagtgaggaaaggatagatattagccttagaaaagtctatgcgatatctatcataactagaggtgggaagcttatcaccaatcatctgagggacataaggaagatcatggtcaataacattgtcaatgagctctaaaaaagaggcacatcgttcaaaaggatgtccaattaagctgcaccaaaaacagaaagtcgggagattttcatatcgaaattctagccaatgttcatcccaaacttttggtaacttgaccattttccctctcatcaaaggttgggtgacatcaatcaaaacacgaactcaaagaaatgatccccacccttcatgaagagagtcttcatataggtcaatgaattcactaacccattcaccaactttctgtgctaaggcgcgagacttgctgagaaagggtaaccgatgagtttgaacccagaattgagcctttgtaagatcagatttagtgacattgctgagcacagatggggagtgcagcagaactaattggttgttaaagtgccacggttctccattgagaattcgatgaagatcccctgcacaacaaatacttagtaagaaaagttcagaatgcatttccgaaatagttacatcaaaacgacatttgttggaccaaaatgctcccattcttttaataaaagtgttgggattgatagagttggagagacacttggccactaggaagaatttaggaacttgagtagggtcattaaggtctgcctcagagaaggtatgaacccccttttctttttcagagagaataagtgtagagttcatgttgttgatgatggtatccatagagaaattaaatttagtgaaagaaaacaaaaatcagaggaataaatcaaaaagagtctgggattgtatatatagggtatcaaaggtgagtaattcccattaacaaagacggatcgtggctatcagaatgaagaagcgtgagatagtagtgggagtgtggattcatgggcggcagatcaaggaggaggaggacggaagaacagggcaaaaaccagaaaaacactgaaaaaaactgctacagggatccatattacaaaaatactttcagctggccaaataaacaaatatacaacccaaataaaaaaaaattacacaaataccacttacacacatctttaacccaggatcc

SEQ ID NO: 113305 - DNA, 1973 bp, Cannabis sativa
  modified_base (1921)..(1947): a, c, t, g, unknown or other
ttctaccaaaaattctcactccttccgcttccatttggtgaaagggaccgctttttactgagtgagaggagctcatacatcagtggaattacctccgatctcctatctcaccttgaccttcttcctcttcctctctctaagtcgacggcgcttttcatcggctgactttccctcacacgatcctcgaccacacacacggaccacggtaattaagatgagctatttttttagtattatttgaagtatctcttactttcagatttcttacattttcattttcgatttcgtgggggtaacggtatttttgctttgattttttctcatctttctctgttaattgttgatatctcacagtattgctattaaatctgaaatctttgattaaagtttttgaaatcatgagttctgctctggatcttgttaattttggtcatagattgttatcatttgtggttttgttttgatgatcatatgataggctcttaatcttataattttgcagcggttcttattgcaaaatgtacataattgttgagtgaaattaatttacgatacaggttaaattatagacctagaagagagattgttcatgacgatgataatggttaatgaaaataaatatatttttggtgcttccattttgggttgtaatcaatttgaagctctattcaagtttatgtcttttaaacttcgtatgaaattttcatggagcttttctaatgatttttctatttcttcttcttcttctacttcttcttcttattattattggactcttggacttttagatttgtggaactattgtatgatatttttgtgtggattttcttatggttgctgtttttacttcaagtttaaaatgtatgaggatatgttacatgtgagtaaaactgtattgagattatgttcttttcatttatttatgggtttctaagttctcaccaaaatcaacttaactttaaagaatagtcagttacttgtacataatttttgctttggatagttgaatattttgctgtcttctgaatggagattgaagttgtcttttgattggagaatgaaaagattagcctaatatttttctttttgatagctcatgttattaaaagctccatcccaatagtttatatttctacatggtagttcttggcaccatttctaattgatcttttattatttttgaaaagatttttgaagaagtccatggctacacctgggaattcaatgctctattcttttcttctgtttattgtcattctctcgcttcaagaaatgtatagaggaaaattagcatcaacagagttatataccattcttggggggtttactagctctctgctgttcctttctttgctgacggtatgttctacattgttcttttttaattgtattatcagtggtcatgttgttgctcttatacttgaagtaatattcaatgatcacaaatcataaataaaccaaatcgcttccaatttttcttttgatgatttgtagctgtctaagatctatatgttcagggctaaggcccgacaaaatttggtgtcatattgctttgagttttttattttttttacgtgctatttcagttaagcaacattcttaaatttaaacatggttgctatttcccatgatgaaagaaactattgggtaggtagcaggctaggggagagtgtgaaattacatgtgaaattggacataaacgtctccctaatctcttttcaagacctctgtggttggcaaggttttgaaatatggtttcccttagtctcatgaggggtatcgaggcatacacctcaacaataagaagaaaaacttcataaaatcattagcacataataccataacaaagttataaaattcataaaaattatttgttaagtcttaaaaataaactaaattcattaagggctcgtttggaacnnnnnnnnnnnnnnnnnnnnnnnnnnntatattaaattggattatatatcata

SEQ ID NO: 113306 - DNA, 2558 bp, Cannabis sativa
  modified_base (1650)..(1653): a, c, t, g, unknown or other
  modified_base (1880)..(1891): a, c, t, g, unknown or other
  modified_base (2351)..(2354): a, c, t, g, unknown or other
  modified_base (2525)..(2533): a, c, t, g, unknown or other
cccccccccccccccccccctttttgacagactttatacctgaccaacagcctgatacacaaccagagccaccagttaaaacctaagcagaaccaccacctgaaaacctaacctttttcccaagcagaaccaccagttgaaacccaacctgaattccaacatgcttcccaactagaactactagctcaaacccaacttgatacacatcctgctcaagcccaacctaaacaacaccaatgtaacaccctaacccattggattattataaattaacgatttaaaagaaaattataatttaattaaaacattgctaattattttgaaaaataaaaaatttatggcattatactttttgaagttagggatcctcttttaaaatattacaaaatatgtcattacaatattatatcgaaatacaaatataagtcaaaagaattgtaaaacaaaatcccgacaacttggcaccgctagtcggatgggctaatatgtacatttaccaaagaagacttctagctcatggttgtcctaactttttatttcccttatctgcaccacaaaacacccttgagtcacaaagactcagcaagaaaagtaaaaacacaacatcatatttcatcaaacaaacatcgtcaattaaacacatgtaatcgacatcaataattcacatactttaagcaatcaatgatgttaataattatttgtctaataggaaaaactacattgttacttaataaagtaatcataaattcctattgcttaatgagacaacctttataccgttgcctaatgagataacttttaaataagaaacctaataattgtttcaataatagagtaataaatgttttttatagacgataattattgaatcacaattgacatgttaagtggtacaattgtacttttcttacctcaagtcaaaatttaagtgtgtcagccaacttaagtggaaaacacacgacaatctgaggccctatctataaatactgtggaaattccctgaatattgatcaaacacaaaaatctaagcacccaaaaaataccccaaatgaatcactagatcgccaaatggttaatcattttctgggaccctgcctggggaaaagcttcaccgtttctatactatttccatagaaacggttaactgtttcattgtaaaaatagcaaactttgaggtttcacttctcaaaaccttcctcaaacttaaccaaaacctgccaaacttaccaaaacaaccctaatatgagttctaatcataatctacagctcaaacaacataataattccaagaatcataaagtacccttgttgagttagctttgagtttaagaactcaaactcacccaacacaagctacaataacccaaacccttataaaccagcttaaaactcaacataaaaaatattagaatatattttaccaggatctagatttactaactagtatgtttattaacatcgtaaatatgaatttctaaaacaatggaatttaaacacatataaattttaagtaaccttacattgattgtagcagaataatatgactcctcctactcaaatctctaacccttgttcctttttgtcgcagagtattatcaagatctgagcccgattctctttcaggttgttggattcttcacagtcttacannnnatgattgagtactagacttgctatgggtgggcatgcactcattcactataggctcaaaattattgaagaacaataaaggagatttcgaagtagaagaaggaagaagagggtctcaagaacttagttgtctgatagaatgtaaactaggttatgagggattggatgagaatgagaccatcctattccgtttatactatttcacctagggttaagatttaaattatatnnnnnnnnnnnngataaaataatagcaaaaataaagtcatagtggccggccatatagatggagcacactagttataattttgcttttttttttcaaccatttatcttttatttcacaaatgtcatattcttcaattttaatcttataaatgccaaaaatatttatttaatatttataattaattatcaaacaaaattgttatttatcttatttattaactagactccacaaagtctcttaattaacaaataaactctaaaacttcttttcttcacaattaagtcattgcttagtgaaaaatcacaaataagacatagtataactttagaattataattgattaattaaaagagtcttaagcagtattgtctcaactagtgtgggaaccatgtgcctatataataaagctttcaataagtagctctagaatttaccaagtaaattctctaactttttaattcctccttgcacnnnnatagatttggaattacactcttaattatatagaatactctatatcttccacaacatagatacgttatgattatccattgttacaatcctaataatcaaggatcctttatagattatctacgtcgaatagggataaatttaccgttctccccttcaatgtattttatccttnnnnnnnnnagctacctataaatgatacttcagt

SEQ ID NO: 113307 - DNA, 1378 bp, Cannabis sativa
actaatcagattgtaaagagttttatttagggcttaaaacccaacactttatacctaagtacccagcctatcgactcgcgcaactctaccttgcggattaatcatgcaacttttctctggagcattagccgccttctttttcataaagtttggttaaaaacattcgtgttattctatggagcagtctttcttgcaggttctcgcataacacctttttttttatcccttgtgggattagaagttccagggtcttttgaatttgttttcttcgtagcattatttttctaaggagcatgatcatcaggaatattttcatcgtgagctaaatcccctgattcaattctagcctccaatctggcaaaagtttctcgcattttgacgggagaattcttattgatctacccattttctttttggtttcaacaagttctttagccattcaaatgacttcaagatttggctcatagtagtactcctcttctttgtctttttcatcattttcaagatcatcctctgaatcttctgggtcatcttcattgatggaattttcatcaacatatttttcattatgttgagtcttcttggtaggacgactagtcacttttgatgcatctcctacaatacatgctttcacatgtacagtaggacgattcacatcatccataggagtgttccattcgggagaactaaacttttactcgtcctcgagtgaaacactaaataaacattaaacaagtcaatctccaaaacatgagaaattttcaagtagcttcaacaacatgattatgcaaaatttcacttatgcatataatctagaatttcagttcaattacacccttgacatacttcaatttattttcatttagccatgaaaccatagaatgcaattaacaacaattgaaccactttatgcatgccaattacaatcatcaatccactaactcaaaattagatatgcttgcaatacttactattctccactaatataaataaatgcacaactaagaatcagaatgtctttttaggcttgtagtgttagacttaggtaagagtagattacgtggtcatttaggcttgtctataccataagcttctccaatcatgtcacccaaaatatttttcacacaatctcaatacccatttttctaattacatgagagatattgaatttcttttttttaacaagattgtaacaactttatatttatcttttttttttctatatttgacattggttgccaattttttttttctttttctttctcaagttgctgtcaatctaaaatttttcacgttctctcaattttcacactttttctcacacacatacaacaaatttcccatctaaattctcccaaactaaagatctacttatggt

SEQ ID NO: 113308 - DNA, 2557 bp, Cannabis sativa
aaaaaatataattttaaaaatattaagtatttatgccgctaaaaataaatattaaatttatactatttataaatttgaaactttaagtaattattatgctatttgaatgaaacaaaattaataatactgacttttagtgaccttatatagctatcttatcattacatgatagtatatataatgtcatcatatttatttgaacttagtgcgaaacttgaaaactagtaataattgaattaatcagaagttggtaagggctcctccttagtaacgtagtctatgttggtggtgttgatccccttgtagatcccatcatgcagtcttttaatctcgggattgcgtttattgtggtaataatcgcgacgagtataagagaagggaacttcacatattccgtgcgtggctacaagggtcactgtttttctagtccttggagccactttaacagcgttcatagtttcagttacagtttcagttaagtcggtggttccccattgaactgtccccgtaagctcagccgaaaactcgatctgcccacctaagtatgcaggtatcacgtcaagtttaagggttgctttggcacctaacttgagggaaacacttcccccaagagttttagattttgatttcttgtgagaaaacttaagggtcacagtgtcttctgttgtgtaactagtgttgcgagatgtcacactgtctttctcaatgacattatacacctttcctacctctgtgtggtattctacgtcgtatatgttcctttcaatcaaggtctcaaccacctccaacttcacctgatttggcatgccagtctctgcggcattaaggcaatctgttacgccatctagagtgattcccttgagaaaacgatcattcaccacactgcgcagtgccaccacattatcaccgagtttgacaggccagaatatagtgttttggaagtcagaactcttatcatcctcagtcttgtcagagtcagcccagatccaattagggctacgcctccagaattttccagtggagagattttttatacggacaaaaccatcaccaacagtgtagatcacattggctacagttgtgtcgccctcatcggtgccatcaaggaactgcaggtacgggtggtttttgaaggatctgcagctgagaaacttgttttgggtaccgtgctgcttgaatgcgacttgttcaggaaatataacgatggactcaaaatccatgattttgaaaacatcgtcatagtacttattagtggagggggaggtgtaggcgacgtataggctttcctcgagtggctcaggcatcctatggtaactaacgtacctgttagtcgcgacgtgtagaagacggtataaatctggttgaccctccaattcagcatcggtagctctgataggtttgaagagtgtagatgtattcacagatttttcatcatctatgggaatgtcagccttggcatgaataaaccagccagttgtcgaccccatgacgagatacttgttggtgtggcaacaccgcaagtgcacaaattccttatttcgagctgtcaccacttgaaattttatcaaaggactgctaatgtgctctcctccaaatttcacatgcattttaaatagttttcgtttctcatcctcaaattcctccttagttaaacatctcaagtattttccattgtccatggatttgataatcacaatattgggcaatgccactacctccattctcaatagaatataaataattatactactatatatacttaaggaattatatataatggatgtgtttggaatgaatatatgaatactacaaacacagaaataagtacgtatatatagagcaacacattcctacaatacatacatattaatcaattctataaatcatatcatgtgtagtacgtgaagcccattataagtatgaacattaataaattaacacgtttttgcttataataaatattatattatagataagacttctcattttttgtagtattattatgtcgtgtggtatacgagttttgggcttcaacaataaacaactctcccacctcacaactcacaactcacaactcatgaagatcatatataaaagcatttgattgatttgatgttgatcttataatatcagatcgatcgagacatcaaataaataaatgtgcagtagtgcgaggataatgaatcattaataattcttactttgtcagtttcatcaaaagaaaccagttttatttcctggaaaaaattacattctatatctattttaatttatttgttttaatttttatctcttagtttttatattttgggtaaatagcggtaaaacccttaaaaatttcattttggtttcacttaacccttaaaactcaaatttgggcggtaaaaccccaatactcctattctattagcaattaattaacccctctgtccaaatttagctgttaactgccaggttggattgttcacgtggagaaaatatacacatggcacaattttattggtccacgtaaataattatttaaaaaattaattattttaaaaataaaaattaaaaa

SEQ ID NO: 113309 - DNA, 2878 bp, Cannabis sativa
aaaaaaaaaataaattaattttcattaatcacttgaacaatacgtcaacaccagcaccagcagaacactgttgaagaacactgtggtggtggtgtgggaattggcagactgtttttagccactcacaaattgtggtggtgtgttggaatgggcaggctgtgtcgtgctagcctacaagtgggtgttagactcactaatggctgcacatttacgagaaatggagattagatattgtggttaactcatgttttgtacttgcttgattagggtgagagaaatgtttagtagttagtcatgactttttgaagggattcaaatgaagaataatattaactcacagactaaggctcattaacgcctcaactacgcaattcttattagcatctcaaaattaactactgacaatggtgtgtttgtggaattcttttcttatttatgttatgtcaaggacaaggtgacaaaggaggtactgctccaagggagacttaaagatggactttatcagcttaaagttccttccataacttaccaaaatcaatcatattcctccaccagtagtagtttaaatttcttttttggtcttttagtttcacccaaacaaaatgtaaactagtctacaattggtacttctccttttttaatcaaaaatgtatggcacaatcccttaggccatccatcctctagggttttagatcttgttttgaaacagttaaatgtaaaaagtgctaatatgaatgaaagcttttgtgatacttgtcaacttagaaaatctcattgccttccctttaaaataaataattaccatgttaaacaacccattgagcttgtacattcagatatttggggggtggatgtctaacaccaattttcggttctatatccatttcatagacgattataatcgttatacttggatatatctactaagagctaactctaaagcactcatgactttcattcaattcaaaaactagtggaaaacaagtttgagaagaaagattaagacactgcacacagatggaggtagtgaataccatggcttcacttgacttgtcacagattgtggtattgattttgatcactcatgccatcacacctcatctcaaaatggtagagctgagcgcaagcccagacacattgtggaaaatgggcctacctttgtttccacaagctggagtaccacaaaatattggtgggatgccttccagactttagtctatctcataaatagactccctacacatgtgctagatagcataacaccttttgaaaaggtttattccaaaaagcctgattataagtttctagaaatgtttggttcaacatgttttccatgccttagactttatcagaatctcaagttcttatatcattccactaagtgtgtcaaccttagctatagtgatagtcataaatgctacaaatgtttgagtagcactggcagtttatacatctctagacatgttattttaaatgaacataattttccatttgaaaaaggttctctaaacactcacccgcctgaaacacttgattttgtccttattcctagttggtctacctcttttcaacatattgcagcctcacgagtcactgtcttctctaagaacttgagctgatgaggtttatcagggggatccatctccttctagctccatacaagcttcctctcatcattcacctgctactcttgccttgtcatctggttcaatctccagccataacatggaataggtaagtgatcatgagcctcctatttttcattttgagatggctagtctatttgatgatgttcttaccagtctagatcaggtacctacaagagaaattgaacaactagaagctacaaaatcctcctcaagcataaatattttagttgctggtgcaaaacatcttcacccatcttatccaatggggacttaggccaagccatgcatttgtaaagccaagacttatctgagtcgttctgagtggaaatcaataagtaaggagttatgttaaatgaaggatgcactaaatcacaagggttggaaaattgcaatggatgatgaatacataacacctaacatgaatgtgatagacaattcatgggttttcaaagttaaagggaatgcatatggaccttttcaaaggtataaggctcgtttggtagcaaaggaatttaatcaaaggccatatgtaaattttggtgaaattttagccatgttatcaaggcttcaataattcaaatcattctaactatagttgttgctaagtcatgggaggtaagacaactcgacattaataattttttttctttctaaatggtcatttagaggaggatgtgttcatgatttagccaaagggatttgaagacaaagatcgacctgactatgtctgtaagcttaccaagtctctttatggtcttaaacatgcagaaagggcttggtttgttaggctaaggaccacttttgaagcttctaacatgacagttccaaacctctgaaataacatctccgtatctaggatccttgcacacaatattgaggaacctaaccgaaagagggcaatattttgcatccataaccaggttgagaaccaaaggggagtgattagagtacacaataagaagtgcatgaaccctaactttcggaaaagaagtaacctaggaagggtcacagagcacttagtccaaacattcacaaataaaagtatcgaaattatgtccgctggaccaggtaaggaaaaccccagaacctctgagatcgacaacttcaaattggtgagaaaaatccctaagacctctcccttccgccaaggtgaaagggtgaccaccactttttcatctttcttgataactatactgtcaatactataagggggcgtttggtacaaggtg

SEQ ID NO: 113310 - DNA, 2083 bp, Cannabis sativa
gggcataaaacccaacaggcagtttctctaaggagattaaccgtgcctttatagtgcttattcccaaaaagaaagatgcttgtaaattcgatgattatcgccctataagtctgtgcaatgtcggctacaaagttgtggctaaaatcccagccaacagactgagaaaggtgcttgataaaattatttctcccttccaatcagcctttgtcaaaaattgatggattgctgaaaattctattatcgcccaggaaattgttcatgatatgtgtaggcaaaggggtggagcccgactattgggattaaatacgatatgtcgaaggcttatgataggttggaatgggcttttgtggctaaggtgctgaaagctttcggatttgatgattggttttgtggcttaattatggagtgcatttccacggtaacattccaaattttggttaatggaggcctcactaagtctttcaaaccagagagaggattacgccagggcgatcctctatccccgtatcttttcattatatgctctgaaattctttccagacttatctctgagaaggaaagacaagggatgatcactgggtatcgggtttcaagtaacgaccctttagtatcccatttaatgtatgttgacgatactatcttcttcacaagagctgatattactgaggttgacacgctccaggatacactgaacttatattgctcttggtctggacagcgcattaacgttaacaagtcaaagatttttctgtcaaagaactgtgagtcgaaccttggtattgccctctcggatttcctgggatttgatatcatggaaggtgacgaattttttctgggtaacccgctgtttgttagtggtaatcgtgcgaaggatttccattttatcattgacaaagtgaggaaccgcatggaagggtggagggccaagttactctctcaaatggctagaactgtccttatcaaaaatgtaatctcggctattcctatttactctatgtcgattttcctactgcccaaatcgattacagatgctcttgatgcccttgtaagacttttctggtggacaggtagttcgaaaggggggagattcttagccctgttaagttgggataacatatgcagaccctcatgctgaggaggccttggaatccgtaagttcaatgatatcaacttctgtttgattgccaagttgggttggcaacttgctaagaatgggaactcgttatggtgccaaattatgctggggaaatatggtcaccagggaagtttttggggcaggaatcttcctagaattgcttttggagtggctcgtggaatttggaaaacaaaagactttatcaaagataacagtatttggattattggaggaaattcgagggtgaaactgtggcaagggtcttggtcttgtgctgatggggtctgtattaacccgtgtgatctcaatcctggcgtagtaaatgatattacagtagggaacttaatttctgatggcgagccatcctggaacatcagcttaattgaaaggctgtgtcagcccgaagcctccaacaaaattttgtcttcctatatctctattctgcctgacagggactcgttgatgtggaaatcctctccttctggggaattcattcttaagaatgcttactgggacctccattttgatgacttctctcttgacaaggattgtaggctcctatggaagcttcccattcatgataactcttcatttggaaatgcctcaaagggtgtctcccgtttagctctcggctgggaatcatttttgggaatatcactggtaaatgtgtcctgtgtaatgtagagggttctgattttgctgcccattttctgtctcaatgcccaattacccaaggcctttggcttgctagtaaatggaagttgaagatcgaaagtatccctttgcactctggtgcagaggtggttaattggttatcttgctatgcatcgttgtgtactgggggtgtaacgccctgaataaataggcacgctacccaaaatacttatgaaatcctaattccctaaacaagattactaataaaaatagcgcagaatttaaatttttata

SEQ ID NO: 113311 - DNA, 2903 bp, Cannabis sativa
  modified_base (690)..(692): a, c, t, g, unknown or other
  modified_base (2429)..(2439): a, c, t, g, unknown or other
  modified_base (2855)..(2859): a, c, t, g, unknown or other
ttacagaaacaaatacagatgttggctcaacaaatgtcacgtgaacgtcgggaaccaatggatgttgagatgaatgatgcagctccaacccaatcaatgcgttcacaaccgtctcgctctcaaatgcttggaaatggatttggtccatcttttcagccaatgggttttcaacagccgcaacagactcctactttgtttcagcaactgatacaacaacctcttgttcctttgtctggattgttaactcctgaacaatttcacagtcaaatgtaccaagcatacttgcagtttgtggcatagtcgccaaacaattcgcaagtattgatgaatatgatgatgtagtcgcctcagacatctcatgtgtcacagcctcggatgccacaaatatcatagatgccgcaaaatattcagatgatgtcaacataagggcagcaatatcagaacacatcgcaaacgatgctgacacaaccatggcagtagacatctcagatgatgccgacacaaccaggacagcagacttctcagatgatgccgacacaacaagggcagtagacatctcaaatgatgccgacactacatgggcaacagacatctcggatgatgacaagtttgcaaatgccgacatattacccacagatgctggttgttcctagagatgctagtgatgaggacgatgctactacaaacttnnnttagaatttttattttaattttacaaactatcaattttctgtttattaatattttatgaacatttaatttatatttaagtatgcagtattgtaatgtttatgactcactttttattgtaatgtttgtgactctaaatatttacttttatttaaatgattttatattttaattaattaaataattttatgtattaatcaattaaatagaaataattttaatataattaattaattaaataatttttatataattataaaaatagaaaattttaatataattatttataatattcattaaataattttaatataataataattaattagaaataattttaatataattattaattttttttttcgaaaatactcatcagtgacgacattgtcctcattgataatataatcaatgaagacattgttgttgttgatgtacaaatttttttttaaaaaaataattattattcccaatgactatgtcgttggtgatattataaattgctaacgatattaaaagtcattattgataattatttttgccgactaactattcccaacgactttttactaacgaaatgtccttcattaatggctcatactgacgaaaaatggactttttaccaacgaaatttgtccttattgatgcccatatttcttgtagtgtctcagcatgcaagtgttggacaacatctcatgacgctcatgacaatgaccatctcgcccgtgagtcttcacattcctcaataacacaaccatcacttagtgactttttttaagtgttgaaggagaagtcgttggagatataattaaaagaagaagacaagcacgtggccaagtacacaccagggtacgaccacaccacctataaggtcagaaaaaaaaagtagtggatgtacaaggggtacatgtagtggatgcgtgattcccaagttagtacagcctgacactcgaccgccactatctccattccactaccacctaccacctaatgccatcagaatagtatatgggccaataggaaccacttacaactcattttgtaaaccacgttaatagtgcctaactataaatactcctctactctattagagagaggattgaaaccttgtaactttgagagaccattttttgaataaaagacaattcataatttctttcttacccatgtctcatatatatttactagaataatacataactattttttcaatccaaaacacaaagtttccaaccataatatatataattgatgagttcttatcgtcaactaaaattataaataatttttcaaaaatgggtctactataactttatgtataaaaaaagttggattgtaatttttataaatgtcaaaaatataaatatttttatcgatagggacaaagtaagtagtgttacgtttgatgtaatgataatgataatagtaatagtaatgtaatagaataagaatgataacagaaattgattacaatatttggtttgtagttatagtgaacattgtaatcagaattattgtgtttagtttggtatgagaatgtaatagaataaagtttgtattgaccaaaataactctattacttttattttataattataaaatattttaaaaaaaagatgatatagacctttgactttttttagtatatttttattaaaatattactttttctttgtaatggaaattacattagttttggtatgtaattaaataaggtatcattttttataaaaaaaaannnnnnnnnnnacgtttaaagaattttttttttacatttttacaattttccttagaaataacatgaaaacacaagaaaactacataaaagtaacatgaaaataacatttaagtaaacatcaaaaataataaaaaaaaaaataacatacagatatcaaaaaatcaataacaaattaacaagtataacataaaaaaaccgtattttctataaataaaaataaaaaaaattataaaaatgtttaaaattctatgaaaccgtattttcgtaattttttttgttatttttgtgtatttatgaaataatcccattatcattacaatactcaatgtaataactattacattgtaataaattataaaagttaaaaggaaaaaacaaacgatataataaacctagggtgactatttaatggttacatttttattgnnnnnatatggttacatttttctttaacctgtaatagcaggttactaat

SEQ ID NO: 113312 - DNA, 2820 bp, Cannabis sativa
cgactgttgtttttccttactctcttaagggcagcacaaaaagggggtggtagttgttcagttatgtcgctcttcttcattacattgacgagtaaagaagtgttccagccaaaattgacgtaaatcaaacatgtcagcacaacaagtctagtaacaagcgcagagtagtgctccgtcacttttgtggtaaattttcctatccactgaagtgtttccatcttattgttaagcaatccttggactacatgccataagaatgcaactatcggttcatgaacgacttcatgaggttccttttgagtgaagtacttctcataggtcaaaagaaattcaacaaacatagatttgggagataaaaaataaccattggcagtagacagccaaatcagaaggtactcaacaagatacaggaaacaattgggagatatgtagtcaactgtcctccaattggtattataggtactttctaaagcttcttggaacctctcaaaaggacacacccccacaagtccaatcgcagacgggtcgtctagaaaatctgatataacttcaaagaatgccttccatggtttccacatttcatgacaattcaattttgttataatcttctgacacagttctttattcaccttcccagatccaagaataatcatggcaattcttccaacttctccatgagtagggttattacttagaatgtcagactcagctatgactcgattcaacatactcttagtagtgtttaaccctctgagtataatcatgttcttactcagtggtttcggccattcagggaatatgtaaccaactatgttttcagtagaaaatttaatgtacttcaacagaatctcagactcatgatgcctcagcttcagaaattttgcctccagaagaaatgttgcaacctcatagatctgagtaagaaccctgcttttgtagaaaatattgtcgattggaaagtcataaagagctaggagtctgtccaaaaccatgactccaaccgaaagcatctctgaagaccaatatctctgagccgcacaaacaaactcgtgcaaatcagcagatgtgaacttgccactatttaatgttttagccacattctttgaccactcagcctccgggtataggaaaataaatgttggatttgaattattgaactccctccaaacacctaaatagttcaagcagaactctccataatctctgaacttataagctttttgggtctgaagacatgtaagatactcaaatacgcttgcaattttgttcgtccaataattccaaaagaatatcagtgattctattgacacctggtttttagaaatcacctccacaaactttgcagaattagccaccagttcctcttcccaatagtacttgatggattttgaagaaaggtgcatgtccagaattattctagcagttagaatctcaccactaacactcttttgcctctgagaagtagccctctgactcattagggttaccaaatccctctgttcattgcaaatgatatcagcttcattgcaaacaatctcatagaagctttcagtatcattcctagcaaatgtttttgcttttcttaagagatcacccctttctttgaacttctttaagggccagcccttgctacctggtgaccagagggacttggcaagcacataaaaaagaataagcttagccgagtccttaaattttccagcttttcccagcagatccacgctgcgtaacgtatcacctattagcttggcaatatttgcagcttccatgaaatttttgttttcttcttccaacagcaagagttcatccaagcaacacaatgaagttaagaagttccgaattgaatccatggaattaaactctttaacaaattccattatggacctcttatcattgatctgaaaataatgaaaagcacatttctccaaaaacatttgttcaattctgtcaatttcttcgcttctccctgcaatactgcactcatttgttgtatgttgtttccaaaacttaatgtaattcaaacccacctcaaataatcttccattggagcaagcagtaagacattctgagaagaaattccctctagcataagcattagcagcaagctcatggcgccctgcaagagaaaagcattccccagccttttgaagctcagattcgccacacttttccaaataaagacgacctggcataataaatccaaagcaaagaaattattaaaattccagaattgcaaaagaaaaccaaactataagtatactgatttgatgtttttatttatacctgcattttcatactctccaagatcagataaacatcgggcagcagaatcagccttgccaatagcttcaaatattttggcagcttcgccaaggatggaattagcttctttaggattcgaaatgcgcaaacgacaagctgcagccttgagtccagcagctttggacaatccctcccaatatgcatcaccagctctttcaaagcacattgtggccatttcatagttgtgttcttgaaatagctgtgaagaaaagaaaagggattaaaaaaaatataaggaattaagtattttcaaatttctatgactagaaataattaaaaaagttcaagcataagtaggtattgttgtttaattaaaaaataagccaaaaccttaatgcccctcgatctccactcttcaggactgcttgtgacttgcatggtctgcgcaaacgaatcatcaagcggtttagattgcacaagacacttcttcctccaatagtcgaagataggttcagcaatttccgagctttcacatatccacaacctttgcctcgtacg

SEQ ID NO: 113313 - DNA, 2791 bp, Cannabis sativa
aagcattaactaatctaactaatttaataatgaatatgaaaaaaaaattagactaaacattttttctagatgccgaaacaggtaggggtgcatcaatacatcccttttaaaggagtgtattgtagaatcaccctataaattattgtaaaatttttgttaagttatattctactagttttttaaaataatatatttaagtcttcataaaactgtctacgccacactatagtgtatttcatttaagattttaaataaataattaccgttcaaattatattgaactattttttataaatttatacaataactaatatattcgcaaaataaattttgatttgtgtttcaaaacacacttctccaagtgatcaccattaagtttatgaatataaagtaagatttgaacattatcttctatttttttttttttgttatgtactatagtcgtattaaatcgtattatattgaattgattatatattatatttttatataataatatgttaaaatttaatttatactaaaatattatatatttaagtatttatataattttacataaaatataatttaatataatactatccaatacaatattggtaccaaacgaacccttagtaggctttaaaataagactttaatgttggagaaggcaatgatggtggcatgggctatttggggggcaaggaatgatcttttatggctccaacatgttcgttcatctacttatgtggttctttcgggtcggacaattcttgatcaaagcctgataataatatgatgaagataaacttgtaggagatactcaaagtggggagcaatggtctaaacttgttaataatatgatcaagacaaaaggaccagcagaagaaacttatggttatggtgttttggctcagcgtgcaatgactggtattgtgcaaccagatgtggttgtgatcaatgggattaaggatgtgttaagttggataatgggaaaggcttggtcgaatgttgtaattgatactaattgtgtcagaactcgagccttagaccgtagtaaatatgtaatagttaaagattacactttgatccttgtagaaaataacttttataaataatccttattttatattacaaaatacatatttaaaaataatagaatataactgctatatctataaagaaaatactaatagtaaaatcaagaccactcattaatataaaagaataataatataatcacagttatttaatcatcgatacatttaataaatcaataaaataataaaataatatatcaagataatttaaatactaattttaattaaataattatatcaacataattgtctaaataaaaacataatttttatacttttattaatttttaacaaatgtttaattaataattaaacttttactatctctttctgaaataattttcactaatttagtaaaatattctcaaaattaacaaaataataatttaaataataattgattaaataatcaattattataactttatcctaacactacaagaaaaaaaaatttaccggcgactaaacttgttggcaaagttttgccggcgactttttttgccggcaaggcttttctggcgactttttttgctggcaaagggtgctggcaatggctcatcgacatatcaacttttgccggcgaccttagtaagtccgccagcaaaagactttacagcggcaaatttatttaccgacaatagggctgccagctgaggtcctagtgacgagcttttgccggcgagttaatgcgctggcaaaagaattggcacgaatttggcaccgactctttgccgacgcatcaactcgtaggcaatagtatttaataataaaaaaataaatacttttttcggcgagttacccgccggcaaaacatttaatatttaaaatattaaacccttttgccggagcatttgtactcccggcaaaagtatttttaaaaaaaattaaaatttataatataattaaatttaaatttaaaatagaaataataataaatatattacaaaatcgaaatttatattgtaattacaaaactacattaaacgtcataaactcaataaaagtatttttagttcataaatagtaatattatgtacactacagactaaaaaaaactacaaatcaacagcagcattgtcgtcatcaccgggatgggcaaactgtgaggaggacccagcagcatggccaggagactaaaatggtggaatcggtagaatcggaggcatcttgggcatgttaaatcctgaaacgacgttggccaattggatcatttgttgttggaacgcactcatgattttatcttgattcatcatcatctgttgttgccactcgttccgtgcttcttgctcttccaccctccgcttcagtgcctcatattcctcttgagtgacagtgggttgcccagagggacctgccctgggagtttctctttttgccctcgtcttaagtcttggcaattggccaagttctctcaggtggtgtgaccgctcacccaacacctgtgtcataacatgcatatatgtaggaaattgggtggggtcaacattgtactggcgcgggacattggttggttctcgttgagtttcacgaatctcaaccattttggcctgcaaaaaatttcatgaaactgttaaagttaaatagaaattaaaatataaaaatgatttattaaaaaaatataaaattacttacatgcagttgttgtgtgtgctcatcgcgccatttgttgtccttgcagtggaactttataaaagtatccacagcactgggaa

SEQ ID NO: 113314 - DNA, 7809 bp, Cannabis sativa
aattatcaatttacttgcaaaaaaccatccaaccttatattttggtgggaaaaccctctaaagtactgttccgtttacatttttaaggtgtcgtctgtccaactttgttaaatcttaattttgtccacatggcaatgacaggtcactaaaaaattatcctaactatcaatttacttgcaaaaaactatccaaccttaaagttttttggatggttttttgcaagtcagttgatagttgggaggattttgccgcaaattactcttaaagtttttattttaatttgtaaaatatggccacataggataatattttagtaacttgtcattgccacgtgggcaaaattaagacttaacgaggctggacagacgacaccttaaaaatgtaaatggaacagtactttgaaagatttttccaccaaaatatgagattagatggttttttgcaagtaaattaataaatgagagattttgctgcaaattactcttaatatttagagttctgtcataaacttttgccaaaattttagtgtgaggttaggggatcatttttttatggtcatagtgatatttgatttgagtaagaatcctctgcactttgtaccaaccgttagaaatatctataattttgatatttcttaagaatttatagttataatatacattttattattttttaaaaaaattcaatttttaaataaaaaaaaataatgactatttcattgaaaaaaattaaagttacatcataaatgaaatcatccattaaaagctagttaatttaccaatctacctcttacatgaataattttattttcgacattataaattattttaattttttcaaaaacacgtaaaatatctataaaattaaatattatacaggtggagtgattaaacaagtggcagtagagctagacacatacatgaatgaattcgacatagatggaaaccacatgggaatagtcacaacaagcataatcaaccctcttatcgaaaagaccctaaacacaacaggaatccaactcaaaagtggaaaagatattaaggtcaagattgactatgatggcttcaaccaaatactctctctttacgttgcttactctcccaatccacttgttagctttctcaaccgttcgatcatcttatctgatataatcccacgatcagtttacgtgggctttacagcttctactggcacattacctgaaacccatcaaattcttgattgggctttcacttcagtcccaataacgacgccgtttatggccaaggacaatataattaagaccatattggttataactattcctgtttcgattggcttgtcaattgtgttaagtggtgtgtttttattggttatgaggttttttatgaagaagagtcataataatactaataatagtaagaagaagaaattagaagacattgagagtaggtcaaggtcagctgcaaatgtgcctaaaatgttcacctataaagagctttcgaaagccactcatggatttagtaaggagaatttattaggcacaggtgggtttggaagtgtttacaagggaatcattgttcttgatgataatcaagctcaaactattgctgttaaaaagatttcctcaacatccaaacaaggtttgccttttcataattattctatttattttatgatgagtaatgatatataaatgccctaccactacatatatatgtagtgattttaattttagaaaaattggcctcattagttttttaaaactaaatatatttatctaaactaagatcactgtgtcactatgagtcctttggcaaaataatttttatgaaaattttttttaggaaaatgattgttttaaaaaattatttttgttagtaaatgaattacattatacgaccatcatggttgtatagagtaaattaagtgaggttatttgacaaatttgagtatttcacattgttagtttgtctaatttcattcgctactaccacatgtagtggtagggatgattttgccgacatatgtcctttagtttgggttaagggttcaaatcctaccacaacccctcttcgggagggattatacttgacctttttggatgctaacttgttgtggcaaggatagaaacgacccaatcaagaaagaatgagatatgagtctttatctctggttagtggttctcaagattgtttgaaaccgaagaggtggggaaaggatcaacaccacgagatcccctttctgttgatttaaaaaacaaaagacccactatgttgcatcactatgtacaatgtttaggtgtaatttgtggggcacatattattcttattttgcacttgattttagtttgataatactttattaccaatattattttatttaacaaaaaaaattaaaattgaaacaggtgaaaaggaatacttagccgaaatatgcaccattggaagattacgacacaaaaacatattgaaactacaaggttggtgccatgaaaaccaacacttgctcttagtatacgactacatgcccaatggtagccttgatcgtttcataggaaaactcttccttgattgggaaactaggtacaaaatcttaacgggcctagcctcggccctactttacctacacgaggagtgtgaaagcccagtggtccacagagatgttaagcccaacaacatcatgttagactcaaactacactcctcatctaggggattttggcttggctaggttgataaaaaacgacaaggcttcaggtgtcgtttctaccatgctagctggaactcccgggtatttagcaccggagttgggatttaccggtaaagcgagcccggaatcggatgtgtatagctttggaatggtggtgttggagttggtttgtgggagaaggtcaaggggtatgaaaggggagagtagtttggttgatatggtgtggagtttagtaaggaaagatgagttgttggtgggtgttgatccactcttacaaggtagatatgtagaggaggaagtaaagagattattggttattgggcttgcttgtctgcatccagattctgaacataggcccaatatgagaaaagtggtccaaatattattgaatccaaatgaacctctaatggacttgccagagaagaggcccaatatggtttgtgtatctttatctcatgtttcttcttcatcatcatcttcttctacaactatggttgatttggggcccaatagtgtctctgcatccagagctagggcagatgagattgtaatccactatgattgataattattgagaagaattaagtgcctcacataatggccaaaatttgtctttgtaaggattttgagagtctatactatattgctcaaagcatataaatataattaagcattttttttcaacccttaaataaaacacaagtataatatcttcttttaacataaaatagacaaaagttacttcaaaattaaacatagagattataacaaccttactacaagtgcctacattttcatatgatatgattccaaagaataaacacaaatttcataattgttgtatctaagaaaaattggctctataattcctttgaattctataaaagaactgataaacaaaatcagctaaataattcttggtcatattttgtaatttctcaccttctggtagatgcactagtctgaggcattggcaaagcctttctaggaagctcgtttggatcttcgccgagagcctttttattcaacagttgaagcatccgacgggcttcttgaagttcatctcgggcactcggtccatgactttcccaagcatcaaccacctgcttctggaatccaattgccaatgtataactgcaaatcccaacatacaaccattttaatttacaaggccaatccatgtaataggaagactccttacataacataatacttacatatcagtgcatttatgagaaacaaagtgaacataccttttcatggcatcatatgcctttgcaaggttctgacatgccccgatcgagtctgcatggtgtggaccaagcgacacatccattatgtcctttgcaactgcaaacatttgtgcagctgactgaggtctgtctagttccaaataagctgcccctaagttgttgtaaatatatccaattccaaagtgtttggagccaaaactctctttcaacctctcagctgcactctccaagtaaggaatagcttgttggaccttgccggtcaacaaaagtagccatcctaatctagcagagacactgccttcggtatgctgctcttgcgggagcttctcaagaatagccaaagttctcttcaacagtgaaacagcgatttcgaactcattcatactctcatattgcattgatatttctgagtaggcatcagcaacatccaagggagaaactcgctctttcttttcaaggattccacaagcaatctccaaacatctctttgcatcagcagatttttcttggctactaagtgcttttcccattgaaataaataccaatgcccttatctcactttctttatctgtttgctgaacaacatccctcaaactattaatagcctcctcgtacttccctaatgcaatctgcatattagcagcatcaatctcagcacgaagcaaatcggaactaagtccccagttcttcaatactttttgtgatagtttattttgctccaacgccttctcatgctcctctaagccagtgtagatcaccccaagaagcctcctgtcatgagcaacctcaacagaattctgtcccaactctttcctatgtatctccaatgccttcatacaaaatggcaatgcttccttaaaactcaaaaccgaaacatatgcttccgccagatcccggtttgatttacccaattccagactgtcttgccccaaagtcgtctccttaattttcaaacaattcataagatctgcaagagcctcctctctccttcccatagctgtctttacatttgccgttgctagaaggactgcatgaaggactggtccaatatcctcaaagccgaaaccctcttcctttaacttacctagtatcctattggccctactaaggtatcctaaactatcattaaacctctttaagccataataaatcgaacccaataattgtaaagccatggcaactggcaaagaaggtcgaccatccttatccaaagcattgagggctctttcagcaaaagacaaagccttttcagggtcatcaccttcttggtcaagtttaaggccgattttcaaagaagccaacccaagctctgtttcactataagcagactccatgttcttaaatgcatatagcatttcctctggggtctttgcagactcaaaagcttcttcaaggtcagtcttttccttggcttttttctgtcttgaggacatttgaggtgatttctcaaccgttgtgtctatattccgagatggatttacttgaaattgcttgtttttatagaataagccgcgacttttagagcacggcttgaaatgattgggagagaccagcgaagatggagatgtacaagaagcatcagaaatgtaatctcttgacaaaataccagtaagggatttgattctgtggcgagttaagtgtgggaaaaaggagagtgaagctttcctcatggtgaatttagggttcactctaacctgtttgcttccttgtcaattaggatacactcacaagatctaagctcacaagattttttgttttttacaaagcaatataaatcacattaagaaatacatcaccaagatatcagcaatcggagcatggacctcttcaaaccaagatagttcagttcattgtctagactaagagcatgcttcgccaaaccatcgacagcagtataattgttgcgacccaaatgtgacaaagctgtccacgaaaattaagagaatagagctacaatatcagaattcataacacccaactcaatagcatataaatttttatgacaatcatatgagaatataatttaaaaatatagaaagtcaactaaataaagaaaattgttctgaaatataattaaaacctttgtaattcttttgtacacaaaacttccacatataaaattaaagatcatattatattctatcatatggattaaataccacatattatggcacaaaacatgtctcaaaaggcacaagacagaccacaatatatgacacaaaacaagctacaaaaactagcagcaaaactagctagagaaaacataagataagctacaaaacacgacacaaaatcagccaaaaccgccaaatacaaagccaatgtatatcaaaaccagacacgacttaaacataaatcagaccttcaaccaacctacacaaaggatatgccgaaaaaaaaaacagtacattccaacaatgatacaaaaatattaaatatatccagacccttatttatctatcactatttatcatttttttttttttgtttgtttgaataaatgaaatgagttgacaagttcatattaataaacacagattttcaaaatattaagtataatggattgccccagtctgcactttctccttcaaattagtcccaaaactgaaagcattaactcataaggttaaatcatcattaaaatacagaaacacaagcagatcctcagacacactaaaatggctatgacaaataaacaaagaaagagaaaaacagattttatttctggaactgtaaaagaaaagcctaatagaccaaacaagagcatcaaaccgccttacaatgaccatgacaaacattcagctgtatgaccatgaatattgggcagaaccaatgaatattaaataaatttgatagacttttaccttgattaaccatttgtatagaagcaagaaactaacatactaccactcaactacaacctaatagaggaaaatacaagaaaaaagagagcacaaaattgtaaaagcaaaattgagtaagaaacttaaacacacaccaacaaaaagaaggttagatacacattgctattaagaaataaaaatacaacctttaagccctaacaaaaaacgaaaggaaattgacagagttcatttgagatcccatggcatgcccttctggtaagatcaatcacaaactcctcccatatcattatttgttaccaaaagctcttctttttttaaatttcacttctccaatccaatgggaaattcagtaaagcttttatctttctcccataagaaaatgaatactcatataaaaaacaacaacaacagaagagagaggcagaggtcactagatttgtacaatatcttcaaatataaataaattaaggggttacataagatacctgatagccgagtagagatggagccgcagcagggagagataaagggttcaagggttttggagaattaaagggtttaagggtgtttgagtgagtttgagaaacacagaatagctgagaaagtgaagacaatggcggcacttggcctttgggtggttctcatatggtgaaaggcttaactaattaaatagattttttttttattaaaattgatgtataaataataaaaaaaaaaatattgataagactttttttattattattattattattaacaaaatggagtcattgggtggttttaatgggttttgggttttcgaatttttattttggaatcttggaatcgaactcgcctgtatgaaaatcaagttttttgaatttcggatccggttggtcgagttcgggtgggatgggtcgggtttcgggttaggctatactttttttaaaaaaaaaaattcattttttaacaaaaaaaaaaattacaaaataatataattatacaatatctattctatataaa

SEQ ID NO: 113315 - DNA, 1793 bp, Cannabis sativa
gattaaagatgtttggagggtattatttttacatttttttaagaagcatataaaaacaatttatgctttttttaagtatataatgtcaaatttcccttttctaaatttattaatcgaaggaaaagcttataatatctttattggtgaagataacattaatataaaaatttaaaaatatttttaattattaattaatatctttaatgattattgtctaatgagtttgactttaccatctataattctagaagactagaaaactcataaaaaatggcttcattaaaatctcatgagtaaacccaataaaagatttttttttaaaaaaaagagtgttggataataatattaatcataaaagtttatctgtaaagtaggatggtcaggagagtacacattattagcaatctttggacagtaacaaaaaaaaatatcaaaaaaaatattaatgtctttagaaatacatcatacataagactgatagaccttactataaagaatgacattaacaagagtaagacaactagactccaacacaccctttgataactaagaatactagcaagcaagacccttgagtagatacccaaagtctcagcaacatcaagagagaagctacccttccaagtccaagtactagaagttaagaaaaaatcagtatcatcacgaaacaccactcctgccttagatttacccaacttagtacacaatccaatatagcagttgattttcaccacaccacagggcaatttggtctatctaagatgagtattacaactattagtagaagtgaaacgctataaaaaatcctcactccagtcaaacaagaagttgtcatctgcacaaactttttctttcacccatttatttcgtctatatcgaattctctaaagacaaacaatgaacttttcaaacatagcagtagatgtaaagtctagacaagtatcaaagaactcataaatgtcccaacaaagaaaaaaaagggactttaagattgagggtgacaacctcacggatagaagaaagcttatcataaccccaaagagcatgcaaggaggtctcaggcacttgttattctcgctatccccagtgatcatgttccactgtatgataatttggtgtggcattttatttgatggggtccgagatccaaattagcataagtaggcagccagttatgagagatcttccaaagaaaataattgacctttgcagggagatgtaattgccgaaccttattccataagccaaatttaccattggcattagaaccttgcccaataccaagaatgtgaatggtattccagtacctactcctgacggagtaaatatctgatctctcaaaatgccacaccaggttatcatatagtggaacatgatcactagggatagcgagaattacacttgccttattcgcagagaaagagatattaattaaagatgcatttcaacaaccattagccattaacaaatcattcacaatggcatcaacaagtagaacacgaaaaaaagaagacttattatcatccaagttaagaatctattgatcattataaatagaaacctcaattccatcactaatgagcaaccaacctccatctttaaaaatctccttagtccataaaatagacctccaaatgaaagaagtttttttggacttaccaaccattaaaaaaaataaagagttaggacgaaggagaggggcgaaactataaataaaattgaagtgaggaaattacatgtttttatattacagtagaacctctattcaagaatacacttgggaccaagtaaat

SEQ ID NO: 113316 - DNA, 2860 bp, Cannabis sativa
cctgggtttgtctgatacctgctcacaattcttactgcatagcatatgtcaggtctagtgcataacacgctactacaaaaatagctttctgcgtcggtcaacgcatctggtcaaagttgttgaccaacgcaaaggtcaatgctcaattttttgcttcagttggtaaccgacacaaataatgattaatttgcgtcagttatctctccgacactaaaacaaaaactgacgctaaagatggattttttttaaaaaaaaaattatacacatattgccacggttaacttttgatgcaaaccacctatgcctcatgtatgcaccgaagcaaactacttatgtgagggcttctcaccgatgcaaaatattcttttttttggataaataaatattcctcttgttaataaccccaaattgaacccacaccaactcttcattctcttttttatttaattcaaaaattagggttcccatctgttctctcctccatttttgattccctccgctttctctctcggtggtgaactgcgtgttccctccttccccctcgtctctcctcttgaatccctttgtgcgtgaaaggttctcgtttggcactcttctctcgagtgtgaacgacaccaacgactctcctccggctcagttctcctctctcgtttgagcggggcaccgcttagtttcgattctctctcttagtcactctctcactctcccaggtagattttcactttgggtttactagcaaaaaataactcaatatctaggaatataaatgttttttgttgttctcaataatttgactttgggttttataatttagattattatttagtttaatctgtgacaaaatttattttttgtgtttgtgacatagtatttctattttacagtggttttatatatataatcaccctcacactataaatatgtacagaagaatatgatgaaataaaatcattatatatatatatatcaataaatattgagtcatgggaattattacaaaatttaaaaattaggaggaatgggttcagaatagagtaattaggttagtagagagtatcataatttgtagccctatattaagaatcaatcttttatctgccattagataatgttagtaaatttttgctctgttttggtgttaaactaaaaaagatggctttaaataattaaaaatctaaacatatataaaataacaaagaagatgcaatggctttttattttttggtttctatccatgtatcactttgttgagttttaggagatgagctttgcttgtgtggtacttcttgcgttgaaaccactaagatttaggtaatgaaatatgaatgtggtaagaagaaatcttgggttaagttgtttagtactattggtattattgattggtcttgttgttgtttattgtcaaatctttgaatctctttaaaactagagctcttttgatgttttgtaactgtatgcaagggttgttttactatgataaaaaattctttagaaacatatgatggaattcatggccttaaatcaagatatgaggctatagttcattagacagtgacacaagtaatgtcaatgtttttggtgttttgatgaagattgcattttatatttgagaatttaaattaatttccattatattatgcatcgtttgtagttattttaactatagttaatatcaagtagtataatagatattatgttgtatttttttcataaaattttatcagtaaccagtatcattatttagttaatgaacttgcattaattaactcaagttatgaaaagaagaataatgaatgaagacaaaccattcaaagtcttaattttttaaacaagttacaataccaagtggtagttatatattttcttttgttaatttggatagtattacaagtaagatagtgactaaatattttatgttgcttttgaaagttcaagtaattgataactagaagtaactagttacttagtggtatttaaataaggttaatttattgatctattggttattttggcaaataatcttatcaattagtggctaaaatactcattaagcattcttatgtctttcctctaggaggattagtgttattgtatgaaattagtttatttagtttaattattttgatttaaattgtgtttaattattaatttagtttaggtgttcaattgtggtggattaattcgaagattttgaaaattaaagttttgcattgtgttcaattaaattgttgttggtggtgttgatgattatctaattttattttgctcaagctgagcttcatgacaaagttatatttatgcccgaccttttattatttttgtatgtttaatgtcattgattcaaactatactgtcttcatttagaacttgttggtttttgtcttttctaagattatttacttaatttagcatcattacataatgagttgtggatcatttctcttttcatgttttttctagtattagatactacatgccatttttattataaagtccttttaaactcatttataagattgggtttgggataagtggggtatgatttgtcagaatattttaatttaatctgtattctttttagtatagtataattagtggaggaggaagagggtctttgtatataaagcttccaactttaaaattatactctattaatttgtaaatgtaactttttatattttactgctcctgactcatttttgctgttgctctactttaggtgaagggacacgaccaaccatgactgctcatatttaggatgttaaacaacatacttgttagtgaatctaagatcctggtaaaatatattccaacaattttagtctatttattttaaataaatcattaataaaaattactt

SEQ ID NO: 113317 - DNA, 3778 bp, Cannabis sativa
agggtattttgggtacaatacacattaaaagaggtatatttcaaataaatataaaattagaggcaaatttggttaattgattaataaaagaggcatttttcaacttaccccatattcaaatgtgaattgtgatggcccatatttgggaaggtcggcccgacacaactcacgttttcatgcatttggataatttgtgacatgctcgtattcaaatgtgggtcgtaatgtgatggcccatatttgagagagtaggcccaacacgatcaatttgtatcatgcttcgtttcaagctagatccaagcttttctcagtccaaatttcttagttgggtccacgtttgagtttatttgagcccaccttgttattgctacaaaaaaggaggttagggtttaaaaccttctttaatgattttagggttagtcacattgttttgtttttctgttttttgttttgacaaaaagagatgcatcttattcataatcagacaaatcatccaccaaaatagttgaaaagtagtaggggcaagttccctaccgtagccacgacccgaggaagaacaagtggcaatcgccaaccaattagttaccttgttcgcataacgtttaacaaaaacacaagaaatattgttaagattatacattaaagtacgacaataaaaaaaaaataactaaattaaaaggagacaataaaggaactgaactatacagagcatcaatgatgcttttacaatcctcaacaacaacttgatctaggccatgttctttgattcagctcaaagcttccttcaacctagttgcctccgccaaaagagaagagacacgaccagggaattgtttgaaccaatgataaatgacagctccataatgatcacgggcaaaccctccaatcttgaaacaaaaagccccataagtaacagaggtatttacattgactttaatcatatcaatattaaaaatcgaccaaatttgccacattattaaattagatccatagaataaaaattgtatttatttatttagtttctcttataagagaaaggataccctttctagaatgtagtcttaggttaaattataattttatatatttatttaacaatacagatactttatacataattacattaaaaatatttattaattattgaaatttaaatacttgcaagtaaatactcaatatgttaactcataaaatgagagttcataagatttttttcatattttatttatatataattgacaaataaaaatatatttgtattaaaatgttaaaatattattttttatcatattaggcattcgggctaaaccattcatgttttcgtgtcatgtatgtgggtttattgtgttatatcaagctcaaattcatattatatgaattctgctaatttgtagttttgtgtcgtatttggagttttgtgtcgtatttggtctaaatttattgatgttgcccaacaaattacacaagattcataataataaatgagcttggtaagctaaaaatctcatcccttgaacacttcttagactccctatttatagtaccaacatagccataaataatgagttggcaaaggaaaccacaatttttcttggctagtgcatcgtgggagagttgaaggcttgaagctacaaatcttaaaatgatgcactcaatttgggatgtgaatgggccatgtcttgtgttgggcatttggcccatttgatgattaagcccgttgtagagaacaattgaatcaaggagatatacttgggcttgattgctttcacattaaggcccacaaaattaccacatttagtatagggattagacttgattgtaaagcaattgttgaactaaatgtttggtagtttaaatttttaagcatggatacttatccaaggtgtcaaacactactacgaagtgacatttaataattagttagcgattttttgtaatttttattaaagtaaaatatatagaattcgatatttaattatactaatagtgatattacacatcacaagagtgttagacactatgagttggattgcactgcacatgcaatttgaacaatttgtcaaattacacctacactatataaatctcaaaactgcacaaactgcactgcaaaaatgtggtgtagtgtagccgattcacagtaattgttcatatattatagtaaaatttcatgatatatacaggatcttaggtgaaagcagactaggtgcccgcctagggcacacccaactcaggggaccaaaaactaaaaaaatacacatttttagtaattttagaaaataccactttctcttttttgaaaaaagatttaataattttgttgtatctaagactcaattaactttaggttgaccctaaatatatagtttattgacaaaatttattactaaaaatgttcaaaaatagtgtccaatttatgtcaagctactcaaattttggcacatgccttaacaactaaaaattaaaaatgttgctccaatttcaattattttcaacctttcttgttttataaataaatgttgtttaattgctttcataaatatataaattaaagaatttaaatttaaattggttggtcaaataaatgtgttttgaaaagagcttattcaataaaagagtaaccctccctcatcctctatctttaaagttagctaggcattaaactcactatttcacttcactttgactatttctttacatattttagaatcttcattcattgacttaaggttttctcattgatttattagtctcttaattttgaatatatcaaacccacttggccttttagtgtaatatttaatatacatatataaagtcaaaaattaacatcttataactaaagcttgatcaatgaccaagttagggaactacaagtagtcatgactcaacttttttcttttctcttcaagtatacattggaccaaaactataatgagggaactcttttgaaccaattaaaagggcctttaataattggtatttacctaaattacaaaggactaaacttgtattattcaaacataaaatatgtattgaaaataaaattttaattgttagtatttaataaagagtaaatactattttggactctgcttttttttgtaaaaattactgattaaactttctattttgttaaatgataaaatagactatatattttacactgaacttaatttttaacaattttttttaatataactaattgaaaaataatttaaatataggaaatataaccagttttgtcataatacatctatatcgggttattattaaattttatttttgacaaaaaaattaattcataattctatttttaacattttaaaaaatacagtgtccaaaacagtatttatcattttagtaaatattttttcttcaatatattgttaattaaaaagagagaatactattacacatccattcataaataaattgtacattaccataatcacaaaagactttccagcaaatatgaccatgactttcttttttctttttaatatatttttaatttctaaagatgacttttatttcctttaaaaacgctttaggcatagtttgagtcatcatgtcaaattcaaagcataatattcatattttagatctaattattataataataataataatttaaatagtataaaattatgtgtgtgtaagagagatgattgtagaaataattacataaggcactattttttataaaatatttacatttttacgttcaaataatatttttttacatttttacggtttttcaaaaaataacacgaaa

SEQ ID NO: 113318 - DNA, 11072 bp, Cannabis sativa
  modified_base (27)..(46): a, c, t, g, unknown or other
gcacttagtgcggattggatgttgttnnnnnnnnnnnnnnnnnnnnggatcggatgaacacccctagtatccaacgaactcactaacagaaaagacacgtgtcctactaactaaaactacttaactaacatatcgagtgtctaatatttaatttaaaagtacttttgaaaaaagctagcatttgtagcctctcaaaaggacttttgagaaattattttaaaaattaaaataatttatataacttttaatttactcaaaaaaaaattttttttactaatattgaaactcatataataattatccaaattataaaaataagatgaaacttatacatttcttataaaattgagaatgccactactatctcttgctaccaaaccgaaacattgagaagggctcctaattgggtagactgatggtttcacacgctgttatcatgcttttggttgtacccgaaaagaaacctgttttctttgtactcttcagtcttcaccacattccagttccacggtctctgatctgctcatctcttctctctcgtcctctgtctcactccccagcgccattactcactcactgtcttcacccgatactccgaagcaatcgccaaagattttcgaacgactttagatctctgtctcactgaagaaatgcacggacgcccccgtaaagccttaaaaccagaggatgaagttgcttctgctgccaaagctcaaaagcttcaagctctccaatctctctttctttcgaatcaccataaccgcaagtaagtttattcttcatttcttcccattcgatttctttctttattactctaatactctgattatgtatatatttagatgtacatatctatgcatatgttttgtcgtttggttttttcattggaaagaaactgtttcagttacagtaaggaagccctagatgtgaatgcgaagcttcttgagattaatcctgagtcctatacggcttggaattacagaaagctcgcggtccagcacaaactcactcagtccgacttagatcctgactcggtcaaatctgttcttgatgaagaactcagagtggtactctattatattgttattattgttgttattttagtggtggtgtgtttctgcgaaactgttgccaaggttaggtttctgagtaaccaatgctgagaatcaacttttgatgatttgagttggttttgtttaggtagagggcgcattgaggcagaatttcaagtcttatggtgcttggcatcataggaaatgggtgctcagcaagggccattcttcaatagatcatgaattacggcttctggaccgattccagaaagcagatgccaggaatttccatgcttggaattacaggaggtgaagttttaggggtctcccatttagatctactgcaattgttgaattcttaatgtgtgtgtactgattacaaattttcttagatttgtggcagcatttatgaagagatcagaggaggatgaattgaattatacaactgatatgatagagcacaattttagtaattattcagcgtggcataatcgcaggtatgtacataaaaatctttagttgacaagattgatgtcgatcccatattttgtctgattgagcaagctgagatcatgctattctttctgtcatgcttctagtcaaatactggcattggttttggtggttcaagagctatgtgtttcaagcatcaacttaggttacatttttaaataaatgatatgcaagtatatttaatgtgtgggttgttcactttttgcgtatttcatgcacaaaattatacacctatagttctttgtgtaaaatgtcaacaaaactgtttttcaattaattgaaaacatgcagtttacttctttcttctttgctggaaaagaaggttcaagggttctttccgaaagagaaggctttgagtgatgaatatgagcttgtgcatcaagctatttttactgacccagatgatcagagtgcttggttttattatctctggcttcttgatcaaacgatgaaaatagaatctcctttacttatttcttcttggcccactcatggttctgatgtctctctatcaaaagagtggtgccatgctagcttttcggtgtcttcgtctcaaaatctccattcagattcagaaacatttccacttattctttattttagtgaagtagttgaaggagtaagctcaactacagtaactgttgaatcttcattttgcacaagcaacgatcttgtctggaaaccgatttccacaaataattctaatgcttccaaagtttggattgcacatgtgaagttccctagcacagagccccagcattcagaaacttttcatatggagattagcctcggaaattctcaaggcattatgtcttcaggtggctttagatataatcatcatacaaagatagcctttaaagtttgtgtacagtctcttagcaaggagaagaatgaagtgcaggatgaagggttgatttcatggaaagatgaaaattttcacaattttgaaacacaatctccagagcttagtccatttgttaatttgggtaaacttaatattaatgaggatcatgagcctactgcttctgactggcgtgcagagactataactaatgaaatagccctctttagggaattattgtcagagataacctggtaagcttgtcttattcattgaataaagaaatatgcttaagcaattttgtaccttaataacggcgcttttttttttttctctctggggatagtaaaattggaaagcttacactagcaaggctgctgaaggctcatgatgctcttttgtctcaatctgctaacaagagggtccattcagaagaatctcttgcactttatactgatttgattgagctagatccattccactcattgtattacaaggatgaatatagcctagtgcttcttgagcaggtgattctttctctttagtttttaactttcgcttttgacgatgctgtagcaattaggaatctgattcatagataggcaatttttagtctgttagttcactgctcacactgcttaatcaagtccaatttctggggtaggaagttgctagtttgtatagttttttttctcaacattactttttctgtttatggaagtactgttctggttaggactctctattcatgatggtgattcctaagtatattttcatcatgctttgtcgggttatgtaatgtttcttcattgcaaaagtacgtgtcataggtaccatgcattcttagcagagagaactttcatttgctgaatgcctgaattctcaaagccttatttattctgttatttcgattattttcaggtaacttccagttgggagtctttgctgagatattgttatcactatagaagagacttgactttgtcaccacttggtaactctgtttgtttacgtttaaataacttatccttatcaaggattggctctattgagaaattattgtgggttcaagtactggatctcagtcacaaccaacttcaatcaattgaaggtacacccatttacttcatcctataaagtgaattattactctttagatttttgtagtggaagtttttgttcatatcatcaaccacttatttggaagctaacttttgggctcttttctcaaggattggaggccatgcagcttctctcttgcttaaatctgagttacaacaaacttcgtagttttaccgcgctggcacctttaagaccgataaagtcactaaaagtgttggatgtttcgtataacgagataggttcacactcgattgatacaacaaggtatatatgtccttctcctctgtctcatactgaagaaaatagttggaactctaacgagatcgttgctgggaacgacaatgtaatgaaatattgggatgccgttctgatacttaaaggattaaacctgaaacaattagatgtcaagggtaatgccattgctgatgaacagtttaagtcaattttgggcaagtcttttccagcacttaagtggctagatggtgaagtactgcactgagctcaaattcttttgttgttgttcattttacaaattctcttgttgatttcttttttttttctttagaatttgttagaaaaaaatatataccttgtttggggaactagtattcttcaaaatcagataatctttaccataacttgtagtttttctggtttctgtgttgcacctcgagaccacaaggcttccaaattttggtgaagaaaaaacgagtagagaaaatgtagaagaaaagaaagtagaaaataaaacataataaattgtcatttggaaagaaaaattgtataaaagtcacttaattcaaaaaaaaatttcaaattaaattttaaaattaatttattatttttgttgtccactttttatttttcttacattttccctaccttcttcaatgagttctttgagcataaattttaaaatgctccccattaaccataactattttattacataactatttaaaattattgagacataaataattaattaatgattagagaaagataattgcggcataagtctttaaaaagtccaatttgatatagataagtttttaatctcaaaaattgattacatttttattataggatggtattgcataggtgacaagtctttctattttcttttctggtgggctcccatacttttttggacttaggctaagttttttggttcccacaaatattaggtaagaaaatattttgttggttaattccaaaatcttttattaagattattaaatgaaagaaaaaattatagtgattgtataactcatgtatagcataacagcaaaactgtagaaccaattagaatcagaaagctcattaggtaagttttagagtaagaatcaaggagaaaaagtagcataagataatcatatgctgaaaaaaccccaaggcactatccatacactatactttcattcatcaaactaagaaatcataatacaataatgtcatcagaaataaaaacacaaaccaaacaaagccaacacaacacaataatgacattattacaaactcaacacaaccaaaaccaccaacttggagaatccagaaaacaagccttagaagcaacaccatcaaccatgcaattccacctgaataagtaaaaaaactgaaaatcaattatcaaaaccagagtaagataatgtgaatgcgatgaagctataggcatgtttaatcatccaagaaccataacaagaatgattattttccaatttccatggtaaccaagcaagtgactttaagtttgcttatcataaaaacaattatttagcacaaagatttcttcatgcatgcttcagaagatttcttcttcttgcaatttatttaaatattaaagtgtgttttttcttttccaataattaaaatgaatatgtagggttatcttttccaagcaaagctcatttttgtaaaaatgaaagaaaattgagctaaacaaacagcttcataagactgaataaattcagacaagttgttaatgaaaatatcataagcaaaagaacaacatttaacaaatatgaaattgaaaaactgataaacaatacctgaaacaacaggggagtttgaattattgagtgtagagaggatctttaagcatggttgcaatgtgagaaagtcgaggacagtcctcaatctccaccttttttgaactgataatgaggctaagtttgtcacgcgatactgtcaacttggggcatagcttgatcgaaattgtcttaagcgaattagagtcgttgatccaacttggaatttcctctaagctatcacaccgccatatacgaagttgttgcaggctcttcacttgtctaagtccttggagctgatcatttatgtcagcaatatgatccaatgtcacagaacggaggctgtgaagggactgccacatatttggatcaccatttgacatgttaatgatatgtagtgtcctcaatttggagagaggagcaactgtgctacaagttgttgatgatggctttttgagttcatttggttgctgaatttctttccctttatttgatactatagtctgtttgaaactagatccacctgaaagaaataataattttaatgtaaaacttcattgatcaatgataactacacttagcacataaaaaagattgagagaaaaataggtacaaacttgatgatgatgatgatgatgatgcttcttgtgttgctgccaatgccatagtctgtttgaatggcttccaactagtgtttttcaacaatagtagttcttctagacaaggaaaaagaggcatggaagtgagatttgggcaatcctcaacaaccaatttagaaagacaagtaaatgtagcttcttcttcttcttcttcttgttcaacattttctgcagcatcattccagtaccatccctttacttctggcaaattagtaaggcgaatctctttcaaggatgaaaatgttgttgttgatttgttctccacaatgtattgcagcttcatcaactcatcaactatcaacacttcaagttttgaaaagtgttctagtgggggtaagaactggcatttgttgcatttcgataatgatagcttgacaagatttttaagagacgaaagccatttcggaaaatttctaccaccataaccagataaacaaaattctctgagactcctatgtggtctaagatcttctagtcccttttcgcaatcatcttcctcaacaatttcgtcaatatcccaactcaatgttaaggatgaaagatgcttcttcttgaacaaatatgcttgtgatgtcttatcacttatgtgaaatctcaaatttgtaagtttgagctttcctctcaactcatttagatcacttagttcattgagcttcccacttttctttgagacagagtacttattcaacacagattctggtaatattttcttagggagagagtcaatacacttatccaacaccaattctggtaagcttctttcaatccccttatccaacacaaattctgataatcttctaagtttagatagtttgtgcagtccctttggcatatgagtcaaagaacatgactcattttcgagatttctcagaccatttagcttagtaataccactgggcaattctctgagattactgcaatgattgagtttcaaagtctgcagatttttcaactcaccaatacaactcggcaatgacttgatattaacattttgagaaagatcaagataacccaaattcttcaactcaccaatagaatctggtaacaccttaataccagaattgtgcaaatccaacatctttaaccacttgaattttagaataacatcacaaattgagtcatcatttgatctgccttcaattgcccatcgaaactgcctaggcaaaatcaaactccaaatcatttttgatttagacaataatgaaattggaatctgccaagatgaatctaaatgaaaatcgaaagaaacatgacgaattacaccattaaacttttcttccttattacaaacaattgcataaggttcttctcccactttcctagcaagatcatgcattaaattctgcattttgcattttattaccttcccaaactcatctttctcagtttcttgaaagaaaaatcttttaagtaaatactcaaaactataataaccatttatgtcaagattctccaaatgatgtttctgcctcacataaccctgtgatgcccacaaatacacaagtgtgttcacctcaaattcataatctttaggaaaaagtccacagtaagcaaaacacagctgcaaagacttttccaaagttaaataactcaattcaagagttttcaaaacatcagaagcattttctaatatctctgaaagtttctcatcatagaatctttgccactcttcttcaggattcttgaaaaacaacatgctagcaattgtccgtatcagaagaggaattccttcacattttctcacaatatctagtccgattttttcgatttcatcattgcttggatgctctccttgctcaaaagccactttcacaaacagtaaccaagcataatcttcatctaatctcttcaactcatgacttaatctctccttcttctcacttgtaatctcagcaacttttctacttcgagtagttacaataattctgctcccattcccatatgacatcaatgccattaagctcttccatttctcttcacgctcattccacacatcatcaagaatcaaaagatatcgcttgtgtcgtatttcatttcgaagaagtatttccaactgatttaactcattgttttctgggtaagtactggttatgtatgcaataatcttctccataatcactttcacatcaaatgtatcagacacacaaacccagattttaagatcaaaatgtgattcaactctctcgtcattgaaaatgagttgagcaagtgctgttttcccaattccaccaattccaacaatggaaataaccgttggattctgttgcagattctccttctccttctcctccaacaacaacaagttcagtacaactgatttttcttcatctctccctataaccatatcacgaggtaaagaagattcagtttgtctccacccaacattcaatcgattattcacgacacctttatacccactcacttcttcaataatcttttctacttcatcatcatcatcattcaaatggttaggattttgagataacagaataattgttgagattacaagtaaacgtaaaggaactccttcacatttttcagcaatggctttcccttttgctcaccaattctggtgataactcctcctcgtttaaccccacaaaagctcttcttctgaaaacatcccaagaagcttctccattcaaaggacccaatcgatagggttgagcagaactcgtacgtagttcgtcggcaagcttttcacttctggtggtgactaagacgcgagtaccccaagcacaacggattccgaggaaactgagaagattataattctctgtattccgaaacatatcatcaatcaaatcatctatcacgatgaagcatttctttttatctatggcttttccgagttcttctagcaaccgacgctttggaacatcgtcgcgattataagctgggacatctccaccggcggcaagaagctgtctgataatctcaatcaaacccgagttgtaattaccacccatggaaacccatatacatttatggaatcttttcttctccatatctttgtagatatttcgaacaagggttgtttttcctattccagaatcaccaaaaatggtgatcactctagcattcttctcccccatcccaaagttatttttgtttataagtttcatgatctctgctttgtcattttctctcccaacaataaactttgcttcatctgattcaccacttgaattaataatagtattgggcaaggatgaatgtagtttcttcgttacatcttcgaattcatggcagagtactgtcagaggctctgagactgagttcatgaaagtgactacttttttgtttggaaatacgtaacgtgtttccaatgccttcttccacattttcattaccaattccaaactacttctgagtagattttcatgatcatggctgttaagtacaactaatcctccttgttgaaatgaagcatggacaaaccagagatcgttctccagacgagacaagtaatcagcaacagtgctcttgtatactggaaactcctcattatctaagagacgcaaccattcaagcacagtatcagcaaggaccaacaagtaggtaagactaggattaagattaggagaagaagccatggaaattaagatcaaggagaataattaacaaaataatcaaagtatagtaatagccaataacacagagtaggtagatagctccaccatagtccaaaaatttaatgccagtctatttatatattattaaattttaactttactatgttgtttttattaaatatatttttttccttattaatacttatgttttaaattattttttcttacataatatatatttattattataagcatgggaatctacaatagtttataaatatgtatgaatgaggtgtaaacatggtttagtacttattacgatcataattaaaccgaacttttctttaagaatatagtgactgcaaagctggtaataaagcattacaaattattatactatttatatttgaaatgttgaggtgaggaccagctttgcagtcactatattcttcaagaaaagttcggtttgattatgatcgtaataagtactaaaccatgtttacacctcattttcatacataaattgggtaggagtatcaaaatttgctttataaaagatagggataggaatagacaacatctaatccaattgaattgaattaaactaatttaattcaatctaattacaaaacattaaatattcaattacaattagattggaggttaaaagttgcattttaattggatttgatcaattattagatattaattttaaaatctaattaaaaactgttctaatcttgttttaattattttaaacttttagttgcattattgtaacgatggtatatttatggagtattaaatttaaataaaagatgatatttagttcatacgtattttttttcttcatatttttaaattaatattaaaatttaagtatgtaattagatgtttaattaaaaaactgatcaaattcaattaataattagattaaattggattttgagatctaattagattggatcggatgaagattttttgaatctaattactaattggattgaatcaaatgaggagagaaatattgaattggatggaatgaacactcttaaattaaaaagtatttttcttggtattatattgggtgaaggggtagggtacatgtgggtagcatgtgtatttttctgaagtctccatcttaattagtgttttctgatttgtctcctttatttaaacccttctctttttttttttttttttaattattggaagatgaaagtgaggatttgaaagagagaatttgagagaaaagggaggagtggctgctgtattagggttga

SEQ ID NO: 113319 - DNA, 3133 bp, Cannabis sativa
tgtagttttcttgttgtattcgtgctgtttctatgaaaaaccgtaaaaaatgtaatttttttttaacaaaaataatgtcttatgtaattattcctattaaaatttccatctttttctatctcaactactttcactcctatttgtaaaaacaaagatggcttcttgctctgtttcaacagagaaaagaacaacaaacaatgctacttctaatgaagatgatcagatgatcaatcaaatgatgatcttgatcagtagtactacatcgtcgtagtccccctccagccagcagcggcggcagactgcaacactgcggttgtctcggcagcgaaatattattcttcgacataacccaggactgcacgggcgcattcaaaaattgcctgctcggaagattgggaagaaagaaatagtacccgtgccttatttattggccacaacgaagcgcgtcgtggtccatgacttggtgtattaccaacaatggcactaccactatatggggagaggtgatgtgcacaatctccgcgcaaaagtttacaattgcctatgaactaatatgtgagtacaagaatttggaatcgttcatcgctctggagaagggcaacatgaacaacccgaccctggatatttgggtcaaaaagattaaacggacctgcatttactgccacaaggagggggtcgtacctgtgatttctaagaagaaaaaggagattaattggcttttcttgcttcttggatagtggcttggatttctttcactgaatcaactccagtacttttgcaagcatactcggaatcatcgcactagggctaaagatcgagttctttatcttacgaatctgggcttgtgtaatcctttatttttgcatgtaatagtgtcatgtagtaatgtggactattctagttatgtgtgttttgattttataagagaaaaataagcaaaagactttgaatattatctttattactcgataattaaaaagaatacatgagctgaatctatatataggcagtaggcaactgagttagttaggatgagaacctaactaccttaactaactgacacttactcctaacaactaaataacaaacttaacagtactaactaactctaataggccccctcaagatggattgtaaatgttaacgacacccatcttggatacaatgttgttgaaatgggaagggagaagagcctttgtgaatatgtcaactagattgttgtgagaggagacatgcatcagttggagagaaccttgcttgccttttctcgaatgaagtgagtcgatttcaacatgttttgtccattcatggtagagaggattctcacttatgtggatggcagccatgttgtcagagtacatattaggcgtggtggaaatggggacaccaaaatctttgggaatggcaaggatccaagtcagttcagatgttgcatttgccatagctcagtattcaacttcaacagaggatcgagatacaacttgttgtttctttgatttccatgagagatgagggatttaccaaggaaaatgcaataccctgaaaccgatctctttgtgtcttgacagttgccccacctcaagctcctctagactgggagcaaagatttgcggaaatgcaagatcgtattcgccagcaagacgaataaattctgaggttgaggtagcagggtcctcctgcagtgcctccaccacaagttcatgtcgctttagttcctacggtgccagcagattaacctgttgctggcaactatatggagccattgtatgagagatttcgcaagcaggcacctccagtttttctaggaggtccgaatgttatgaacgccgagcagtggctcactgttattgaaagaatcttgaacttcatgggagttgttggaaattaccgagtaacctgtgctacatttcagttctaggaagacatgctcgtgtggtgggagttagtgtccctcacccgagacgtcactgttatgacctgagaagagttccgggacttgttcaacgccaagtattataatgaggcggtccacagtgctaagcgaaaaagaattcactgagctggttcaaagtgaaggtatgtcagtaacagaatatacgacgaagtttgatcgtctagccaagttggctttaggtattgtgcccacagacttcagcaagaaagaaaagtatctggtgggtttaaatgcaaaaatttgacatgatctggtaattactacgaatgaagcgacatcgtatgcagaaatggttgataaggctctgtgagccgaaagtgcagtgaagtttcttcaggagccccgagggactccaagtgttggtggaacccccgctcttcctactctttatggtagggatagtggtgactccactgctaatcagaaaagaaaggctacctcagcttccggtggttcggaacagggtaagcagttttgagggaacctaggcagaggtagacgccagggttattcttatcttgagtgcgcacgttgtaagaaacatcatcccggagagtgcaaccggaaaacatgctttcagtgtgacacggttggacatttcaagaagggtttcccttaggcgatgaaagaagagcagaagcaagaggcaaaatccgtacctatttgggtgtttgctatcactcaagctgatgctgcagccagtccttctgtggtgacaggtcagcttcttgtcaacaactcccattatgatgtgttatttgactatggggctacacacttatatgtggcaacacaggtaattaatcaattgggtaggccttgtgactttatcaaaagagggttttgaaccctactgcctagcggggaattgattatctctaaaaggcgaattaggtctatgttagttagagtggaagatagggagttgagtgctgacttagtagaactagaactagcagagttcgatatcatacttgggatggattttctatccaagtattcgaccaacattgattgtaagcggaaaatgctaacatttcagagggtgaaggtccatttgcttatgttggatctgttcaagggtctcgaatcctggttatttcagtcttaaaggtgaaagatttactacacagtggatgttgggttttatgccctaaataaaactctgtttcaatgtaa

SEQ ID NO: 113320 - DNA, 1559 bp, Cannabis sativa
ctctctctctttctctctctctcgctctctcttatttctcttagatctgattacaataatcattgtaaaattgcaaaagggagaagttacattatgtgttgcgccatcttgtcgaagccacgtcggtctgtactctgtcggcttgcaccaatttaagaaagaaccttattgggtcagggctaagcagctttatgagtgaacttgctggagggagtaaggaaccatcgagaagctttggtgacttttagtgagagaggaagagattattagagtgagagaggagagatttgattactgacaaattatttggtgtgttcttgttctgtgtggaaagggaagggtcgggtatttttcaatcaatgccaaacatcaattatgacaatgtcaacactgatgtttgtgagggaaaatgttgtctctttttcaaagttttaattttaaaaaataaaatcacattgtcgtcactaaagtgtctccattgtcactaataaatcatttaataaaaatacaaaagaaatggtttttactagtgatgacttgtcattgttgtcactgataaccctaccttcagtgataactttcttttgtcattaataatagcgtcaattatatcttaaattcttatagtgcctttgctacagaaaagatatgagggttagaggactgaatgagaggagtcattgttctgttgcttcatcgcttcaataattaggctaattattataatgcgtgatatatagtaaataagatcctcataaaatattttaaatagtaagaacaattggactcgctcaagaatggccttgccattcgagccctttatttagggctaactagatttctgtgctaccttatcggcaagagcacaaaatttccatttctttttcttttgtgccattctatttctagaaaataggtgaagagggaagaaaggaagaaggaaaaagcgtttttgatgtttcagagaagaagaagagagataaagaagaatgaaaatgtggttctcaactaacttttttctttgcatgaagatgcctatcaatccaagatgcttaagatgtggagataagtgcattgaagatatgatccatgtagtttggacctacctgatagctactcaagtttggaaaaaagataacttgtggaagaaagtcaaatgaaatatcactgaaaaccaaagcttgctcattgagtgttgtttgctttccttctcagttgatgaattcaatttatttatggttattgcctaaaaaatatggcaagaaagaaacaagtggacctttgaaggaagaaattaaaaagctagtgcgttggtggattagtgcagcgagcttttaaaagattttaaaggagagtgcttggagtctaagaacaaaaaggaggcggtcagatggtctcctccccctatttcggtggtcaaaataaatgtagatgcagggctgaacacattgtttatgtaacgttcccgtttcaagcctccattggatccttacacccacaaactaatggctcttatacacgagtacgccactctagctgctttatggactgatgactga

SEQ ID NO: 113321 - DNA, 3906 bp, Cannabis sativa
  modified_base (32)..(34): a, c, t, g, unknown or other
  modified_base (3323)..(3324): a, c, t, g, unknown or other
  modified_base (3729)..(3750): a, c, t, g, unknown or other
aataatctggattacattgaaatagagttttnnntagggcataaaacccaatagtaaggccccgtagaatcgacctcaaatgccacaacaatgatcgagttcaaggacatgaatcccaagatgctacaactaaacgtgtagaaaatcaaattgctaagttaactacgttcgtagaacatctaacccaaaagaaaaataggaccgtatctgattcagaagaatatgctctaaaaccatgtgtaagaagaataatagaggcacccttattagaacactttagaatgcctcaaaggagttgtacaaaggcaagatagaccctagggctcacctatccaaatacatctgactgatgctagtaaaggtgagtgatgatgcaaactattttcctttaactttgacaatctgtttgaagattggtggaagagattatctcctagattcgttcgtaattgaaaggatctgcaaataatttttaagaacagttcatagctgcaaatgattatgacatggaggttagcccattgatcgacatcaagcaacaaacaagaaaaatctcaaaaagtacattcagagaatgatagatgtagctgccaagactaaagtcaatgatgatatgaagttggtggccttaaactcaggaatatctgctggatcctttttgtggggagagttacaaagaaagaggtctaacactttgtctgatttcctatccatgacccagggtttcatatatctagaagaagcttatgttcatacttatggagtacttctagcaccatcaacaaatgtcagaaatacaatctaaactcctcatatatcagctccagctatcgttcctctgggagacatgctcacaactcctacaatttacagacttgctatcttcggacaagtagctgtgtagacaagtttctgttgttttggggaggcacaaactagatacaatcatgcccccggacaatcgaaccaataaacaaaagttatagaagtgcaaaggctcctagttggagtgaagctccaaagagggggaggagtcatgaaccaagatatttctagtatactagtctaattgatacttgggaaaatatttataaagcaacttacaatatggtcaattacaagaaacctctacctatgtacaaaggtggagaatacaaaagggatcaaaataaaaaaatgtgaataccacggtgatgttgggcacaccacaaatgagtgtggttacctaaaagatgaaatcgaagagttggttaaaaatggtcatttagccaattgggtgcggataaccatcatatagcttggaaaaggagtagcacacagatagattttcattattgaacagcaagggatcgtaaatcctcctcgggtcatagtttatcctcaagctttgggaatacaaattccaatcatacaagcccctcagggggcacctaatgcccaggtgcctagacccgtcattactcccaaactagaaaatatgtatccacccggagtcacttcgcccactgtagaaggccacatggcaaccatatccaaaggcccacatattgccaaaagtaccaaaaatgcttaaaaaatatatcttaatgagctagatcaagaagaaacatctactcttgtacaaacacctactcaacatccttgaatgatgaatatcctaatcactttcatagaagaagatgtccatcacatgcatttccctcacaatgatttgatggtgatttaagcgcaaattacaaacaaatgcgcatttagaatttgggtggacaatggaaattcaattaatattcttctcaaaacttccttccatgcaattgggttagtggaaaccaatctgatgccttgtccaattcaacttcaaggtttcaatggaaactctttactgccaatggggaagattcaacatccagaaaaattaagtggaggtgtatctagtagaagcacaacatccaccttcaaatactacgcatttgtagtagtggattatcccaccgccaacaatgttatcgtaggacgactagacttcgttgacttctgtaacttccattcaacacttttgcatgaagttcccaagtgataatggaagcatcagagtaataaaaggtgaccaaaaaagtgtaagaaagtattataatgtcttggttaagactgtattcatggtctaagaagagaaccaagaagatctcagaacacccgtccaaccaacactagaagtaatttaggaagaagatgaattatacccctgtgtaggggtaggaagtgttataatgtcttgactaagattgtattcatggtctaagaagagaaccaagaagatcgcagaacacccgtccaaccagcactaggagtaatttgggaagaagatgaattagacccctatgtaagggtagaaagaatagtcgaaccaatggaggaggtggaaaaagtttgcatcaccgaagaagatcctgctaagaacatccagctttgtatcatattcattaattatcatatcccactatatcaagttttaactcctaggatcgtgtccgaggatcatatattcttaatatgaaaagataataattgacgatcaagcatttaatgtatttttattatccacgaaagtaggatacgattttgatatctatcaccatggtgtgacatccacatcagcatagagtcagagcctcatgggtcgagctccactagatgagcccaagtcaatatattatttgtatttaccaccagtaggcaaagtctaatgaataagatttaggattcaaacatttgttcatgcaagtgtttgcttaggcaaaatttaggattcaaatatttgtgtaaattataaggcttttccagtcttattgtaataatattgaatcgtggactagtacttgttaacgtttcaattacgtaaaaattctagtattttttctttattatttatttattttttagcttttatatttgattagtttctaaggatattggtaaacagttcttgattaaaaacaataggttaagttgttgaagggggaggtaattatcgtacacataacataatatgttggaaattaaaattctctaagggctcaattggtacgccataaggattgtattgtattaaataataaataacactatgtttggataaaacaatgtatggtattaattattagagaaatgctaaaaggcaccagtggtgccaagcaccctcctacgtgtcaatatcgctattggtctaattaagtatcaagtcccatatagtttaatataatagcttttaggaagtatcgctagccaatcgcaaggcgacacgtcttaagggtgctaggcaccannggtgcccaatagcaatgctctaattattatgatcaaaatttttaatataatgtatgttgtattatttaatacataacaaatgatccgtattagcttgtagtataatatttacaaaggattcgaggtcaaaactaatctccgatctggactcagacccggacctgaacctgaactcaaacccggacccggacctgggacttggacccaagactcagacctggacccaaactcgaacctgggacctagacccgaacccagatccgaacttagatccaaacttagacccagaccctagacccgagacccgcgacccaaacctgggactcgggacccgtagtttgtgttggggtcgagtgtattaaaaatatataataactttatacaatctattaatacaagtcaatnnnnnnnnnnnnnnnnnnnnnnataatactaatacaatataatacaatccaacacaatataatacgacgtacacaatattggatcagatccatctaatattttagatccagtatgtattggatcagactggatccatccaatcaagaaaaaaagagtaaaattttaatgtgaattttt

SEQ ID NO: 113322 - DNA, 4389 bp, Cannabis sativa
tgtgtttatttacattattttagagattcatatttaggatgttaaatagcatacatggtagtaaatctagatccttgtaaaacatattccaatagtatcatgtcgtgctaaattttttcaagggtaggcccgacatgactcatacacccaaaattgttgtgtcgtgctttactcgggtcatcacattttcttatacatgctcaaatgttttaattttttacattttatttttacaattaatgagataattactaaactatatgtattttttgtaactttaatttattttgtataatttttcaacaatatttaatagaaaaatcatataaaaaatattagaattattgaaatttaaatatttattattaataagatttttaacgtatcgtgctttcgggctagactattcatgcatacataccatgctttttaagcttatcgtgtcgtattatgcttaattaagtccatattatttttcaagatcaagttgagtgttgttgattttagtatgaaaaaatctttcaagaaaggtattaaattgacagaaaattgtggtgacttcagatttagtgttcataggaaataaccatacaaacttggtgaaatcatcaacaaagctcacataatacttgtattgcggaattgaatttaaaccaataaacgaatattatttgataacaatctaaactgtacaatgagaaccaaaacagctatatatagtatagtagagccggttaagtgactaaccaacttaactaaataaactaatagaaaaggaaagatccaaccaaacttaccaacttgtcctaacaaaatgaaaaacagttaagaactataactactctgatagtctattagtagacaataatacactataacttgttaccccctcaagatggacggtataggtcatagacagacatgttatttatatgtgtagttagaactgtggagatcatcagtttggtgaaagcatttgctaactggaggttgctgggaactgggatcaatcgtatggccgagttgttaattttgtcacgaaaaaagtggcaatctaattcgatatgtttggttctttcatgaaaggttagattgttggcgatatgaatagctgattggttatcacagtatataaaagcttgttttgtttgagggattctgaggtcagtgagtaggtattgaagccaagttatctcactggtagttgcagcaagcgctctatattctgcttctactgaactacgggagacaataggttgtttcttagttttgtaagaaactaagcagtctctaatgaagatgcagaatcttgtagttgagcatctagtaatggggcaggaagcccaataaaagtcagaaaaaccacgggagagaaaaatttggtgagtacaataggccttgttcagggtggcctttgatgtacctaagcaggtggtgaagagcttgcaaacgtgtgttgcgggggttgctcatgaactggctaagacagttgacagcgtaggtgatgtcaggtctggacagaatgaggtagagcaattttccaacaatttgtctataggaaaagggatttgttagtgcttccccttgttgatcatctaacttcgttcttggatccatgagagcttttgcaggtttgctacctgcatatcctgtctcttcaagaagctcaatggcatatttgcgttgagataaaaataggtcatctttgcttttggcaatctcaaagccaaggaagtaacgtagcgatccaagggccttgagtttgaaccgtgagtgtagagattgttgaagctgacgtaggatagctaagttgggtctagtgatgatgatatcatccccatagacaagtaaggctatgaaatcagcctcatttcctcgagtgaacagggtatagtttgcttgagcttacttgaatccttcttggataaatgcatcgaataacttcttgtaccactacctggacgattgctttaatccatatattgacttgtgaagtttgcagacgagattagtttctgcagacaaagaactaggtggggtaagtctaggaggtaaatgcatatatagattgacaatattgttatttctaatcttatcattatacaaagcaggttcattaagagagggtttagaaatcgaaccatccaagaacctgagtttgttcttcccaaaaatggccaactgcattgccctactccaggacatataattgtcttgttcggtgagtaattgagagaccaagacatttcctggattatcaacatgatggagatagtaaggattaaaaggatcttccagtggattcctttgctgaatcgtaagattgatggcttccatgattacagtatggttcgagttgtctccaattgcaacaggatttgtctgatcattgttcgacatttttaagtggaaagaagatcaaacaaagagtttgatctgagaaaaatagaggaagagaaacacagagtagtcgaagaaaccagctctgggaacaggcacgccatggaagaagaagacacctcggtcaaaatcaagatcgagggaaaacttctctttcccgctctgataccatattgtggaattgaattaaaaccagtaaacgaatattatttgataacaatctgaactgtacagtgagaactaatacatctatatatagtatggtagagtcagttaattgaataaccaacttaactaaataagctaatagaaaatgaaacatcaaaccgaactaaccaacttgtcctaacaaacataaaaacagttaagaactataactactctgatagtccatctgtagacaagaatacactataacttgttaacttgtatccatcattgaatgtgtaaaaggaagggccccacacatcaggcaaaattaattcaaatggcatggtgattttattactagtagttttgaagctgaaatgatagagtttgccgatttggtaagcattacaaaaatcaagctgagtacatttatgattaggtacaacagtagacaacactttatttaggataggtttggagggatgacccaacttatgatgtcaatcagtagcaagatgttgactgtcatgcacagggttgtagtgaacttaaaggtttgaggagtggttgaatcagcagatttggtggagagatccttggatatggatgaggggacatgtagcttgtagagtccttcacacatgtttccccgaagaagtacttgcttggttttcttgtcctttataagacaacaaatatcatcaaattcaagaatgacttggttatcttttatgaattgagaaatgctaagtaaattttggtaacacttggcacatgaagaatatcttgtaatactaaagagtgtgttggtgaattagcatgaattgaactagaacttgcatgcaagataaggagagaggatccattacctataacaaccttatccttgcctttgtagtctgcaatagtggtgagattttgaatcattagtcatgtggtaagtggctccactgtccaaataccaggcatgagagtgatctgtagtgttgttggtttcagtcatgagtagggtttgtggggaatcatcactgttctgggtgggtggggagttggattgagggccagtgaagtttatgtcaaatcgaagaaagcacttcaccacagtgtgtcctgtcctgccacacaattgacaaacaagcttatatcctcctcttcttccacctctataagagcctctaccacctctagttgaaccacgattaccacgattataagaagttcctcgacctccattgttgatgcttgtgctggcaagatttgcttgaatgttggtcaaggtatcagataaaagttgttgaattcttatttcttgactttgtaacatgaattaaacttcttgaaggtttaaaggttcagatctggacgtgagattcaccacaattgcttcatattctgatcctaatccttcaagaatgtataacacaagatcatcattggacagaggttggccagttggagcaagactgtctgcatattgcttcattttcagcatgtattcttcgattgattgtgctcctttctttgttgactgaaggagtcctctgagttggagtaatcttgatctggattttgtagcaaaaagttgagagaatgtattccagatcttagtagaggtttgccaattgatcacatggcccaacatgttgtgagaattagagttcatcaaccagtgcatgataaattagtcaaatcgtatccattgttgatatactgggttaggagtgttacctgtaagattttctagaggtgcaagtcttgttccatgaacattgttaggttataattagcctatgtctcgggtcttcaaagttagcattatctcgtctattggtgtctttt

SEQ ID NO: 113323 - DNA, 1449 bp, Cannabis sativa
ctattgtgcggattaaattggatccaaaaaataaaatccgcacttagtgcggattggatgttgtttgaccaaaaaagtgcggattagatcggatgaacagccctaacaaagagattcaattggattgtttgagcatgttgggttattttatttttctaaaaaatgaatgttgagcatatgttgggttatagtttttgatcctatcattattatttctgtgttaatttagtgtgttttttgggtttgggattttgacgaaattgtagttttaaatcaaatgagtgatgaactttgtgtgtttagatcaaagaatatattttcattactttatcacactcccaataaataaattaaaatagttcaatctttaaattatagaaaaaaattataaatttgagcttccaacaagtgagataaactttaactattttacatatttttttagctcaataaataatgctaagctaaatatagcgataactattcattgagctaacatattttaatattatttttttaacttttctatatatgtaatattttatgaattatttatataaagtgaataaaatatattaaaaatataatatttaaatgatatagaaaaaaatatagagaaactaatgtatggtataatgtaaaaatttgagataaaattaatattttaaaaaataaagtagagaaaccgatgagatgagagtgttctaagattttcttttgaaagagagagacctaataaggagtcaagagagaaaaatagtaaagccgcctactaagctacaagattagttgtattgatcattttcaatttagttttggtcattttctaaaacctaacattaaatagtttagtttcaattaaattgttttttgatagatactattttggattatgtattatgtagaaattattgattagattttttattttgttaaatgataatttaaacctatattattcaaaattataaaataatacctaagttaattttttgttaaaataaaacttaataaataacttgacttatgtgttatgactaaacgaattacatattttgcatgtatacataatataaactagcttcaagttggtaattacatggttatgacttatgtgttatatcaaaaataaatattaataaaaaatgagcttaaaatattattttgtatcattttagtattattttgtatcattttagtaattacatggtctaacttataatttaacaaaatagatggtcgatcaaatatattgcttttacaaatcacatgatcaaaaataatatttacccaattattctcctatcttccaatgctatcacgacactcacatatagcataaaatatgtgcatatatataaattatgggatatgattttgtcctgtgatgtactttcacggaatgtattctgtggtacattaaatgagtctcagggtacattaaatgag

SEQ ID NO: 113324 - DNA, 2694 bp, Cannabis sativa
  modified_base (2618)..(2636): a, c, t, g, unknown or other
aaaaatctaaaaataccgatccaaaaagtagagcaaacgaaccacttgtgatcagggatagtcatgagccaaaaaaagaatcacttatgatcgagttgtccaagatggtgagcatataaaataagcaccatcttggggggatgttagagagtcccacattgtcaatgggtgaaaagataatagaatatataagaggaatgagatactcctcctattgccaattggttttgagatggaacctcattcactttatttccaaattctaacaactatatatcatatttgattttctttttcatgttataaagttgaatagtattagttttcaaaaataattaaatagtatttttcagccgaacattagcattgtgaagaatattataactaattgttaattacttgagtgaccttttttttttataaagcttgttactcttttcctagttgtcaatgactagagttagttatctttcttaattctctatttctcattacatttgcctttatattaattgttgttaactgtgatgaaaataaccacaattcattcaattcccttccttccttttctctttttcttcttctgttcttaaccaattatgtatcagaacagggtgtcaatgacgacctctgcaatgcttcttcaagcttaacaattgttctacaatcgtatttcttcctccactatgactatgccagagcaactatattctttttggcagtctcaagtccttcccgctactagagctcatgatattgaagatattctcctccgacgacatccacgaccagctccacacgtgcttgaatcaccaggttcctcaaatatgctacataatactgatttctctttggatgcgtcttggtcaatttcttctctctcactcttgactaatgtcatttatctctaaaccaatgattagtcatgtggttaacaatgaatcatcagctgaaatctaaaaaacattggattagtttttcaacactcgatccaaggcgataatgattcactaattgatgtctctgctccagaacacaaagaaagacctctttctattgatcaatacatgttaatgatgaagagctatgttgatggtcttcgagctacgaggaatcctatatctgaagaaacgttgattctttatgttcttgttggtgctgacagtgagaatgagtccattgttgttcatctgacatcaaaagatcacacgagtcttcaagaatttcagtttatgatccaaaatcacgggatgcatcttgaactcacaaaattcacaacctgattgtttctcaatgccctagctaccaatcttgctggagttagaaatccccctccttttggttcttctcagactggtcaatcatctaactatgagccaccacaaaattcttagtgtcgtaggggaagagggttcagttccaatcgaggttatggatacttaactagttcatgtttgatttttcaactgtgtagtaaactaagttacttagtataaaaatgttatcagggttttgatgttagtttccatagtgtcaaagactcagtttcccaccctcctgatccatcaccacattaatttgtggtctcctcctcctctatgcctaatgatgcttagtaactagacaattggtgcctcagaccatgttaagtaagccttacagttaccaaagtggagacatgttatggatgatgaataccaagtgttatacaaaatattgggcggatgatgtggcatgttcctttcggtgacacgtatcctcacccagagacatgggtggataaaagagcttcatgagtcaaccacccaagatgtattcaagtcggtagaaataacagacatgctaagagaaactagccgcacatcatcaacacgagcaaagctggtatgagggaactcgtatgaaccgcatacatgccagttataggaaaaatgtatgacataaatacaattaataacagtgtttatttaaatatgtaattaatacccagtcaaaagagaattccaattctatttcctttattttaggaagatgagttagtttgataaattagtgggatgatagcttgaggggattaaatcccagtttgaacatcctctataaatagtgaatcagttctaccaaaaagaaatctgaaatcattctttcaagtgagcctagacgctgctcaatttcttgtaaagctttcgagagggaacaatactttttgcgtctctactcataagttaaatacaataataaggggagtaaccagaacaatgtggttgaacctctataacacattgtgtccttgattttactgcatgtcatttgtatatttctctaatcttataaacttcttgtcactttaagtactcagcatcattgacaaaaagtgaggtcattattttggtactttcattagagttgaggactcaagaacacagtttgattagtatatttagtgaagagagcaaatggttgtagaaactcgaagaacttaagccattgatcttttagatccaatggcaactattccaaatgctcacaatcctgccaattcaagaaaccctcccgtggttgatccaagcaccaaaaacactggtactaatggtgttactgttggaaattattttacnnnnnnnnnnnnnnnnnnnacaagtatgttgattaacaccgtaaatatgaacttcctaaaacgattatgaaataaac

SEQ ID NO: 113325 - DNA, 1986 bp, Cannabis sativa
  modified_base (27)..(28): a, c, t, g, unknown or other
gttaaaccaagaaatgccgttagatanncacttttaatatataaagatttaactgtaatatttttaattttgtatattttttattttttaaaaaaaaatatagtacatttttttataataataaaaatttattttttttcttaaaaaaaactttctattatataacaacatttaatatatgtagatatatattgtacatatttttatatttagcgaagaccgtcaacaagtaggaaataaaaatataataactgatgaacttttctagtaagttaaaaggctcattgaaaggatcgccaagatagggaaacagaaaattcgtttgttgtgtattttaataataataagaacaataattttcatacaaataataataataaagtgtttatctaaataaataacaatagtacagtagagctgcgcatgaaaatggatgtaatgcaatgcttaacaaaaaaaaaggtgggtagtttagtatttttcattttaagaaaatgaaaagagaagaaaaaataggtgatgacacattaaggattgcattattgggttgggtgatagtgatggccagtggccacagtcattaacaccatcatcagtttcatttgcatctcaatatagaaaagcaccaaccatttgtcttttagtattattgttgagaagttgatataagatttttcagctctcttcatccatttctaacctctcattttatttcttccttttgttttccaaagtttgacttgaacaaaaacaaaaatatcaatttggtaaaatgaaagtatttttactgataatgaacaaccactaaaaaactttacataaaaaaaaattaaatttgtaatcaattttaacttaaaacaaataaatataagaagaaaaaatatatcaagtcaacttctattttgctcaattacgttattgacctttatatatatatattttgcaaaataatcaaaatggactttaaactcaatttaggtcaaatattttttaatagctaaaatgcttttattttttataatattaatatttactctgacttttaggttcgctatgcttctttttctttggtgttaactcttcattttcttagtgagagtagcaagatttttctatattctaggaattaagatttgagtttggttcgttatctttttcttcctaataaagcggaagttgtcttatctatttcttggccctcctcatatgtggatgacaaacttatttggaattttaaaaagtctagatggtgctctgttaagagcggttactagttggctcttcattataaaggcttgggttatgcttctccctcaagggagtactctggatgatggaaaaaaatctgtatcctgaatatccctctaaaagtgagattgtttgcttgacaagtgtcctctaattagattcatacgaagataaatttggctactcatggtctcttatctgatggtctttgtcctctttgcgagctccatgaaaagactattcatcatgcctcgtgggggtgtccaactttaatgtcttgcaggaaactttgtgattttgagttgaataactctcttcccactcatactgattttcttagttttattcacaacgttattgatcatttgcttaaggaaaaaattgaataagttattgccattttgtggcgtatctagtctaagagaaataaaatggtgcataataacattaaatcacctcctgacttggtggtgagttgggctcaagaatacctttggaacttccaacatagccgtgctcgggctaggcatcctccctttttgggacaatggacctctttgctttctgatgaggttggtttgaaatggtcttcttcgttggttggttttatcaaggttaaccgtgatgctgctgttagacaatttatatatataaactgaaacatatatgattaagtataaagtgcggaattaataaatcatatatgcactataatttaaggatcgaaatacctccagc

SEQ ID NO: 113326 - DNA, 3215 bp, Cannabis sativa
cttcaattaaacatagcacctcagcacttatctagagtctcatctgatataaaaataactcagtaattgaagctgacttaaggcctaacataatcgaatcaagatctcctgttaaaaagtggtgtgccatgctgtgttaaattaatcaaaatttgacatgtcaactaatttattatttataaaaaaaattaaacctctaattgaatcaacaaaagtagttaacatacttaatataaattagattagttgatgtgtcaaattttgattagtttaatacagtatgggacaccaatttttaacagggaatcttgattcaacataatcatgtttgttatctgattatattggcagttgtatgatttatcgtcctaattttctgcgtttcacggtaatactcattaactaatgttatcttaaatttatcataaatgttttcgtccagttctaaaattttgcagaaaactgaataatttctcccacagagtactgtataaagatattgtgtggaattggaattagatgttacttctcaaaatttcttgttctaatgttattattttccttccccaaagcatattcaatttggtatacatgcagaattatgattattactattaatttatttaagaaactgggacattcctgatattattgataataaatataattattttacatgaatgttataaaagatgaccatttatcattttaattcgcactgagttggtttatttatttctttatttttaatcctctatttattcgtagtttatttcttcatctgaataatgtttaggtattggataaaatgcacgctcgtggtagtggtcctcgagtcatgctaacaagacaacctactgaggggagagctcgaaatggaggtttgtattccataatctcaacaattgtatttgcatacacatgaatatatatagtgttacaaacatacaaaattatccatttcatgtagtttaggcatagagttccagatttagcaacatatgttatgatgttattggtttcataggtctacgagtaggagaaatggagcgagattgtttgattgcctatggagcaagcatgttgatatttgagcgcctaatgatttctagtgatccttttgaagttcaggtatgtgatttgtaatgtgctttgaaatcatgcaatatattatccttcaatctctttttttttttttttttggtggcaatctttcagtcattttaaaataccctagtattcacaaatcttactcacatttgtatattgttcctacaaattactaaactttacttcatgttatgtgaggtaaaagaattgtgttctcttaatttttattgaaaaaagatttacacatatacaaaactaggaatctatccttactaaactgtcgccatgaatttattattatgaacaaaacaaatattagttaacgtagaggtagaggagtaaaaatgagagaaaaatacagctagggacagatagtgggacaaaagtaaatattaaacagcagcagcaaacagagacattatgcacttcaaaatactctcaattcctttcctttccctttttccctttcattccagtagtaacaactaacaacaattttgtgataaaatttgaacacatgatgtaagtcctcacacttctctcaaggctttcttgatgtcatcctcaatggcaagaggagcagtgcttgtgccatagcgctctatgacttggccatctttgtccactaagaacttggtgaatttccactttatcctagatcctaaaaatccagatttacttgttttcagaaatttgtacacaggtgcagtgtctggcccattgactcgtacctaagataaagagggtgcactatacaattaggaaactatagttactgacaattatacaactaaatctcccttcaagttggagtatagatattaatcattgccaagttgttacacatataatgaactcgatcaattcctgctgtaagaaaacggggaaacgacttcctgcttatttctagactgccccttcaatcaattcctgtggagcaggctactaggcgagtcaaacctacacacaattgcttttgcgtaaactaaaaggaaattggagagcatctagactatggagtgcagccatgcttgatgtttcctgggcagtttggatggagagaaacagatcaagttttggcttgtaacaaggttttataagtcagaaggtttggagggccttaccagagaatggggacttatcctgcaccaagttaatcctagtttggtccaagttattagttgattgtatgtatttttctccaagataagtgaggctgcctaataagtttgagaggaggctagtctcaacatatgacctccctccctttttcaaaatataaataataagtactaatagtttaagacggaaataaagtgtcttccatgaatgtaacatcaatggagataatactaagacagggacaaaaatacttcaaaccattttgaagacgagaataaacagaaaatacacatttcaaagacttgggatcttatttagtgacatgcgaacgaacatcccaaacataataattactaccaaatatgctaggattaatggaaaataatgacttatctggaaaaaatgattttgtttgggatgtccccatttagaagaacgaatatgcgagcgattaatgagaaagcatgttgtggaaacgatatgaacatgcatttgaaataagagggatcattttattttaagaagatgtctccgtttacattctgctacactattttggaatgcaatatccacaatataggtttcatgaagcatgtcattctgaaccatgcatgtgtgaaataaagttgatgtactatatgcattatcgcttcacaaagtacgaatgggaacattaaatagatttataatgttagcacaaaatataaaaaattattcataatgattattcattaattataattaagttaacgagaataatcatggcctaaatctaggtttagacataataggataggactctaaatatcataatgaactaatttaaaatgagcactaacacgcttatgttttgcaaatggaaatgaccggggttattttgcttcataatttaaaatatgtcttcagtttttaaaagcagaaaacagtttttaaaaactaatagggattgtttggcaaaaatttttaaaaacagttttttaaaa

SEQ ID NO: 113327 - DNA, 2106 bp, Cannabis sativa
  modified_base (2036)..(2071): a, c, t, g, unknown or other
tttttggggttttgaaaaaaaaggtatagtttttttagggttttaattattggtttaaaaatcaaattttttgattttctaagcatagaaaatcaaatttcccttttataacagccttaaacaattctttgataacagcctcgctctaaacattatgctatatttaagattaattatacatcattatattatatgtaaaaaaatatgtttaatttaattgtatttcaataattattctaaaatttatcctcaaattttcaatatcaatccaaattaatattttgattaaattgattttgcaaatgggagcctagctatttttgagataataataataataatacgtctttattatgcatattgttttaatatgaagaatcttaagaaactagcaaattattagtgcatatatatatttacatgtacactggaaaatacgacaaaattgattgtaggttgttaagtgtttcgtaagaaataaatattgcaaattgttaacgtgaatattttaataaaagagtttaatgcgtattattattattattattattatattagatacatatatatggaagagaagtagcaggttaaagatatgaaaagtaatagatgagattaaatttagattagagtgagagaaacgcggcaaatgaggttggaacagtgctttcttaaccaaacacagatgtctccacctcacctctattgggccgactctctctcctcgttgggcccatatatgatgtccacgtgtgattgtgatctgtaaccctctccaattccatacctgggttccacgtggtcagcacaccaatccaacaatctttcatcattaacaaaaattatgggtttcataacaagtatttctatataaaaaaatgtacttctatatataaagaattagaattttagaaaccccaaaaattaaatttaatgttgctcaaaatttcgtatgcaagctagcatagtttgtaattttgtgtttattttggtctttccttttctacaatgattaaaacatcaataaaaagtcaatgaagcacctaattggctaattagctccccttaccttccattgttttttattttatttttaattaaaacttattattattatcaagctgtctaccaattagtaccttaattaattagtcacaaaataatgaattaatttaatatataaatagttagagaaccaattgtgtattttattttcgttgcctttttattattgtattaatactttttgactagtgaaccgagaattgctgtgtctcattaatctcaaaatatattttgacctgcaaaattttgatcctttttcaatgtgatttttatttggacactccaccgacagaatttctcagaaaactttaattagtatttggccaaaacttattgcaatagcatctgtttgttcaaacattacttatcaattttatccacttttcctatattttcttcctttttttggatgcctatttattacaagtccgttctctataatcttaataataatattttcggttctgatttttttttttttctatgggtatgatcttaattttgttcaatgaggaacaagaatagttaacgtatgttacaacaacttataaataaaataattagtaaatttattctctcaatttttgtatttgataatattgattctgtcttttaaaatatacagtttgttaaaaattctacctgacttttatatttatagaaatttagtctttaaattaggttctatgatctatctcattattcttttaaaatactagtgtgtttttgtaaattagtaattttatcttttaaattttgacaattatcaaatcgtaccctcttaaaataaaaaaataaaaaaaggcttaatatttttttagtaaatcttaacaaattaatttagagttttttagtaaattacttaccaattttcttgaggcatcctaatttataattctttatttttttatgatatgatcatctcttttagtttttcagttcattcttaaatatatctattctatataaannnnnnnnnnnnnnnnnnnnnnnnnnnnnnnnnnnnattcatgggtaactttttatttatatttaataaaa

SEQ ID NO: 113328 - DNA, 1915 bp, Cannabis sativa
  modified_base (1406)..(1410): a, c, t, g, unknown or other
  modified_base (1858)..(1880): a, c, t, g, unknown or other
ttttttgagttatttcggtttgtaatttttatcgattttttcggtttagtttgggcgggttattcggtttggccggtttacgaatttttttgtacaaccctagttttgatagaacattgctaacataccatcactaccaggactcttaaccggactcatcgattttaaggctacacgtatttcatctggtgtaaaaggttgtgtaaggttgccattcattgcagcagtgactgtagtgggaatggtgtttaaagtgtgctaaagtgtcgatgagtttatggaagttgctatgaaaagttcttgaaaataagctgaaataattgttgttataccctgctttgagtattttgtaacaccagctacattttttaatgatttgattgcattattgttgcgtctcgaggtagcatgtgcatgaaagaacttcgtattttggtcaccattttgcatccaatccactcgtgatctttgctgccaaaaagtctcttcttgtgctaataaatcatcaagaatggtctatgaattgttgagctcctccattgagtcatgtgtcctgttgttgttgttatttattgcagaaattttttgttgcatttttttaatcccctgcttcatattcccgtacttcctggtatgccaaagctgtagtgatgaggaacagctttgcagattattgataaaaagctctgaggcatttgttgaagttgagaaattctagttttgctttatgataggagcaacttcaccatccttaagccacagttttttgaacctgaatcgagaatttcgcttgacttgttgagtcgtttgattgagagtttggacaataacaataatagcacgatgatttgatctatagaagtccaagtgatgtgatcaaaggctcaaactttgttgtccatttatcattaacaaagcaccagtcaagtatctctttgatcgtatcagctttatgcgaacttttaatccaagtaagcggatcaccataaacagacaattcagacaaataacaatggtctaaagcttgcctaaagtcttccatctgtgcttcatttctcaaagcacccccttgcttgttagcattagaaagtatctcattaaaatctccaatcacaagccatggtaaaagtggagcaacatcacgtagtctcgttaaagtgtccaagaatgagatcgattagattgctctggagcactataaaaggcagtgaaatgcatagtaggaccattcccaaaagccaaataacagtcaaataaagtagtgttaaaatttagaagtgttacattgacatcatcattccaaagaaggagtaaaccacctcctagacctaccctaaggacttcaagtccattattaaaatgtaaagcatgaagaaaacgagaaattacattagaaataagtttannnnncataataaataatacatgaggagactgctctttgacaagcaaacgaagatgaaggaatgcgctcggattccccaagccccgcgcattccaactaatgattttcatggctgtttgcggggctgtgaaccggctgctgctgaattgtccataaaacccgagtgatccacttctagaccagaaacactctagtttggctccaccccaggtgacaaagttggagagagcaaggcttttgttggtcccctgcattgtttcaatgttttcctcagagagagattgtcagattgcctctttatgattcagtttggggatgtgttttccttatcatttcacggagtactttattaataattctcccatatattgccacaaaataattatcgcatatttaatagtacgtactctttacaataaaatagttacgaattacttgttgggttttatgccnnnnnnnnnnnnnnnnnnnnnnnaatcagatttacttattaataagatcggaagagcg

SEQ ID NO: 113329 - DNA, 3919 bp, Cannabis sativa
tgttaaatctaatgcaaagttactttgtaatatgaattaccttggcaattctaggatacatgtatgaagttatagtgtacttgtaatcctagcatgcatggttttctaatccaggcattaagaaatatttaacacacaaaaaaaaaaaaaaatttaaacaattagttgcatacgtgtaaaataggcggtttaaacactttttttatattataaattatttcaacttttttttaattataaaatatcttaaataattaattttttaaaaaaaatttattaaatattttaaataactatattatacaaattataaaaaaaaatttgtagacagaggaaatatgcagcactcaatcacattaagaatattaagataaacaaaaattgctatgtaatatactttgttgcaaaagtttcattttaatttttactatcaaatgtaaactttataaaaaaatttgtccctaacatagaaatttaagtgttacaaaatttaagtgttaccaaaaaaatttacataagtaattaagggcaacaaagtgaaatcttgtgtacgaccataaatgacgtcgttttagtgaacttgagcgattgaattgagagaaatcatttgactgcgtttgttttgcttgatttgaatttggattatattttcgaaaatggagaattccaccgttctcagagaatggttcgaccgagttgactccgacaagtccggctccattacagcttctcagctcaaggttcatccattcttctctcttctctcttctctgtatatttatctcgaattcattcactcataaatttttgtatgaatcagaaagctctcgccgtcggaaacctcgaattctctatctccgttgttcaacaaatgatcaggtccaatttctcgcttagctctcttcccttaacatgaaaaatataagcccatgaattttccttgtaaatcaaaattatcaatttttgcaggatgtatgattttgacaggaatggaactatgagctttgatggtaactattgtattgaattcatctttctaagcatttatttatgatttttattgatgaatctaacaattttcttatctcagagttcgttgcccttaacaagtttcttctcaaggttatattttttttccttcttttcgaaaaaacttatttgtgtacaattaatatttgtgaggctgtaacttcacactttcagtttgttgctttttctatttgcaggttcaacaagccttttcagacctggaaaggttattttagtgcttttctgttaggaatcttgtaaacatgcttatgtattttttctttaatgggtgtttaaataagctcaaatattgtactaatttaataataaaaatggctgttttaagaagtcatttgcagctaacatctttgatttgctcttacattgtagcagtaacactctttggctataaaagcagtttctcaaactcttgattctttgctgatgttgttgtttacagggatcgtattcgtggttatcttgttactgatgaagtctttgaggtaattcctaacttagttttttactgctttcaatgaaagccaagttgtacttgtatggtgacagttgactagtgatctgtggcacttatttctctactacttgtagttgtagctactgctattggtattggtattagttctttctttgcattgtctaactacttgagaaattgagactgtcactctctgtcttgattttcgtgttgttgattgttgctaaatattggtcattcgttacaggcattggtgaaaatcggattctcgctggactctcctgctttttacactgtctgtgaggtaaatcatgtacttgcattccatggatggtttttaattttcttaagtagttgaaagagaaatgttgaggggcggtgccaacacctccagagttggtggcatactgttattggtgcatttcaatatcaggtctcacatatttaaattaataaatgatatagaaaaccgataacaaactataaggcgccacattggtatggtgttgggctgctctagttgaaatgatgtatttttcacttgccgtacatggcaaaaggttgatgcatagaatttggatgatttcttagtgcagatttgcttaaagagatcagtagatgctataaatttgcttggggttttctaatggttatatataatcagttaatggatgtcatatctaattctatggtgatacacatggagatgtatatgtttaattggctttatttctctcttattgtttgtgcagagttttgataaaaagaagaatggaagattcagattagatgattttatatctctttgtatattcttgcaatcagctcggtaagtttctctcacagatacatactttttatggtaaaaaagaacaaaacttgcttgtgcataaaataaattttataaccacaatagtctgggcaattggcattgtctttctctttaattaaaatacatacgttgttccacaatctcaatcatataaatgcgtttggcttcaagtgaaactcttgaacatgtacaattttatcaaatagaccagttgaaaatgtttcacaaactcagtttctcttgttgttttgttcgttgcagtaatatgtttgattcatttgatactgctaagcagggtcgggttactcttgatcttaaccaatttgtatattgcagtgagtatttcttttaatcttttttaacagcataaacacatggattttgttgattatttatgttatataaatatataaatcatcgtgttgatatcattgttttatattcagctgcgaattgtaggatatgaaatcattgcacatttattggtgtcttccattctctacagtatcgaaggaaattattgtagtatgcatatgtttgcagttaagttatttttaacattgttttcaaaagattatatattgttttatgtaattattcaatttacaaaaagaaaattatagtatcctattatattatatgttaagacattcaaaatttatagaaagattttccaagaattggtatgatatacttattttttggtcaagaatttaactaaacaaaaaataattgtattggtataagcgattattatttttaaagtggggattttctcaatgtggaaagtaagaataggatgtcttttgtttagaaaagtatgttgtgggatagagaagttatcaatgtgggaactaggagaattggtgatggttgtatgatcaacctgctaattttatttttttatggagaatggccagtgaaatgagagatttgttagacatatcttttgagatgttgagttgagacatgagaagtttcaaccaaagaagataagttattccctttgctttatttgtagatgttacgatatctactttgctaatatagtaaaagtttgagtaatgacaaccaagtttgtcaaaacctcttgaggtatgttcttgtacttcagattggttcaatcctattctcaacaaattggacttttaagtgtgtttagtatgagagttagacttaatatgaatgagaatatcaacttaagaatctatgtttccaaatccttcattttagctttatttgatggttaaattattctagtacttgatttttatatactcttaatctaaacaccctttaacactagtacactactgcttccaagtccaaataacataacaaattttagggttggatattcgatccaatctaatatttttctcctcatagatttaaaaaattatcatctgatctgatctaattagatatcaaaatctaatccaattattaattggattgaatcggttttttaattggatattcaattacatacctaattttaattattaatataaaaatatgaaaaaaaaaatacgtaaaaactaaatatcaccatttattta

SEQ ID NO: 113330 - DNA, 6901 bp, Cannabis sativa
  modified_base (1008)..(1014): a, c, t, g, unknown or other
  modified_base (3419)..(3433): a, c, t, g, unknown or other
gagccgccgttctgggtgcgaacgacggcctagtctcaaccgcatcactaatgatgggaattggagcagtcaaacaagacataaaagtcatgattctcacgggcttcgcgggcctagtagccggagcttgtagcatggctattggtgagttcgtctctgtttattcacagctcgatattgagcttgctcaaataaaaagagagaaaatgaagaaagagaacagtgcagttgttgttgcaacaactgcactgaatgatgatgatgagaaagatgatttgccaaatccattgcaagcagcggcagcttcagctctcgcgttctcagtgggagctatagtgccgctgcttgcagcatcctttataaaggattatagagtaagattgtgggccgtggtggcagcagttagcttggctttggcggttttcggttggttgggagccgttttaggaaaggctccgacagttaagtcggcggctagggttttggtcggaggttggctggccatggctatcacttttgggttaaccaagttgattggttcgagtgggctatagatggtttttggcaacaaattatcactattcactactattatagtactagtgatcatcaacatcactagcttttcaactaattacaacttgacacgtgtcacacaaattttgttcttagttgagagggattgcatatatatatttataattataattggtccatccaacttaaacccatgtttattagtgattctctttttggaccactgcactatttattatatataatttcctttttattttgtttacttgtgttttgtgtttttttttttttttttggataaatgatataatataatatgtatctatttgtaactttcattcaaaaagatgagaaagggaaagacgatatcatgtatgttgatgcgttttttgccttaataatttttgtaatatatatttctttcgtgtaaaatcaagctttatatgaactttaataataataataataatnnnnnnnataataataataataataatcgatcaagaaaatataccaatatgtaattaagtatttgttctactcatataaatggggtttgatttataaagctagctctctctatatatataactacatatattttattatattaattttaattattatattctagacatgaattaattatatagcaaacatgagtatgttgtgcattgattgccacttatatgattaaatgaaaatatcaaatattatgtatacaccgtcatatagcaccttaattatatatagtgacgtggcaaaagttttcttcattaatattatatatttctaatttaatttgatggtttggcaaaaaaataaaaaaaaaaattatctttcctttctactaattacacacatattttttcattctctctcacttttctctatctaaccatttcttttccaatttttactctagtgaatacaattttagtggcaactatcacttttaattataaaatttgtttgtaactaaaaatatatttagttttgtcaaaaaaaaaaaatatatagttaggttaattagaatttttatctcattttgaactttgacatgtattaaattatgtcttcaaacattttagattgttaaaaattctctctgaactaatgagattattagattcaagaacttttgtcaaattttatttaattttattaatacaacgattgtccatgtacaagttgtgcctcccaaactttaatatctaccgaattgtactccctgaactttaacaagtattaaatcgtgcaccttaaatttttatttacatcaagctccgttaataaaattagataaaactctttgaatccaacaatttcaatagtttaagaaaaaaaattcggtttaaaaaatttagaagacatagtttagtacgtgtcaaaattcgagaagtaaaaatattaattaaccatttactaattataataaattgagatttttataactaataaatttttagttgaaaagtttagaagacataatttagtatatgtcaaaatttaagaaataaaaatattaattaaccatttaataattataataaattgagatttttataactaataattttttagtgacaattaagataagtatttatgtaatcatgaaggcataaaattgaaaagcctataagtatttggacgccatttcgattctgatgatgagctattggtatttaataagtttgattggattggttttgttttcaaactcatcatcatgatctaataaattaatcaataatcatgtattttcttatatattaaaccttaattaatagggttcgtactacatatatattcctccttgttagaatgggataagatgaatggggttccatttcaaatctgggaagagtagctcatttttcttatatattctattatctttctacacattaacaatgttggactttctaacaccacttcccttttgtatgagctatatatattaggccaaatcctaatatattaattaggtattattatatatttgagatgtagtttcgtgtgtgtagcttgctagagagtatcgagtggaattattaattagtaactattgtgatacataaaaaatgatgcaaatcttttcatttgaatattatgtacaaattgttaaacacatttaggttagtgccattgagagggagtagaaagacacctacggtatagtaataacgaacggtaatttccattttctagtaaagacgaactacaacacgagtcatgtaatcttttttaagtagtcgacaatttaattaaaaagaataataataattagttctacttggttagattcataaaactaaaagaatatatcatctcaaaagtaagtttttacttatgcttaaacaaagtcttaatttattatttatggagattttttggtaacaaaaaatgtggcaaactgctcacagagtttttcatgttatatgcctataaaagagtaaatatagaagacaatgattgatttgtaatagagtttaagagtttttcggggtatatggtatgtgatcagatttcgtacatattttgtaattgaagtttgttgcaatgaaatatttcttactttccaaaaaaataattagtatttagtatttttgttgctaaatagctatatatttcttgatatcattatccatccatcttcatattttttaatttttggcaacaaaatttgtctagcgcctccacggcgtaatccacaggttaagagtcgaaccccaagaattactaattttttgtttttacgtttagtcacaataacatttgtgactaaaaataaaaaaattgtaactaattatgaatcataatttctatgttgtgactaaaaggtccgtagttaaaagtattagttacaaaaattacaattnnnnnnnnnnnnnnntatttttagtcacaatacttgttgttactaaaattaaattaataataacttgtaattaatactatgttttagttacaagtaacattttttattgtaactaaaagacacatttagtcacaaaaaagttatgttgtaactaaaacattatcactaaaagtaacaattttttgtagttaatacataaaaaaaatatctctaccgctacaccatttaattattattaataagtgtaatttaataattagttacccacaaaagatccatggactacatatattattggtcacaaatacaattaactaaattcaatagaggctatcggtgaattattttgatagatattttaattaacatatccacatctctaatgcttaataattgcttatctttacaaattacagcgacatatgaatttaattgcttttttatcattcacttttggggctccaaaatttgtaaaagtgttttaatgcaaagatgaggtaaagaaaaattgtcttccattagctttgtgtcttttgtatctatttagaggaatggggcatcatacttatctgttttgatattcaataatgactgatcaaagctatttataaatttgaagtttcattttcatttttatatacaaatatttggtaaatgcatatccatatcaactatctttaagatactatttcccaaacactttttggaggattctctttacttttttgactgccatttcttaaagtaatcccccttcaaaaaaaagcttaattaactttttgttttcttaataaataacaactttctataatgtacttactttagcataaatatatgataatgtacttaaatttttaattattgttgttattagaaaaatactacaaataaaatatccacatttgttgccagtaaaagtattaaaagtaaattgataacagaaaaaaaaaaaaaaattgtcgttacaattctaagcaatggatgtcaataatttgtcattgaatcctctgaagatcactctgaatccttgtgtcgctctgatggtagtttgaagaaccctctgattggctcatttttatcgaagaatttggctctagtgtgtctgtgcactctcatacttctgtgcaggggaacgtcatatctcctccacaggacaggagcaatgagaggtgtagcttagaactgtagagggttagggcagacttctacagttcacgaactgaggtccctggttagatcgcgctcctcagattttgtatttttgtctgagctcaaagtggattctacttctctgatctatacatgcttctattttcccttctcctactccgtgcctgaaggaggattggtttcctccccctcgggattggattaagctgaacagcgatgttaaagtgggattagaaagtatgaggtgatttgggttcaaacctctcggttagactttacaaatgtgttatgcaaagaaaagcggtggcttgttgtttggctttatcggttgctaaggacatcggctccgagtttgttattgtagagagcgactcgagggtagttattaatgcttttaatgggaaggagctccactggacaattgaaaactatgtctcattttgtaatagttcttctcccttgtttattagttgtatgttctctaatattaattagtagaacttgtaactttgtagcccataatgtggtaaagtgggcgttttcccaccagaagtttggttttattctgttatctatcattcctataaatattttatgtaataaccaagaggtctaattgtttcttatatataacaaacacgcttttcttcaaaaaaaaaaaagaaattatttttttaatttggtgttgggacaagttcgccaacaaaagttgttatgtcgacacaaaaaatgtgatatcaaaagtccgtcgattgtggctttcgggggtaactttcacccttacattagtattatcttgcggacggtctctaataaatgttacttttttgttagcataatattacactagcaaaagacatttttaccattgtcgatactctttgttaacacactaaaaattgccaataaaaatatttatggcggtcattaaaactctgataagaatttaactaaaataataataattactttttagaattagaattaaatttggaataatttagttgtaattcagttatttaaaacgtattaaagtatattaatttacatataatgttttatgtaattgaaatttgaaagttgaacatctattagaattagtttcagggccaatttagcacagttatgctgtgggaaaaagttgttatagctgtgctgtaagaaaaagtagttgtagtaaaattgtggaaaaaaagctgagctgaatgtttggtaaattataaatttcaaagtaatgtgagttgttaagattgattataatgataatgataatgttataatctagtttattataatcacaaatatgtaaaaacttattttatataatattttatttttatatatttttaattttttttcaaatataaatttatatgcatttaataaaaaataaattatagtattttttattatgttttatcaaatgtaaaaaatattaaaatctcaaatatataagaaaaattttaagttgatgttgtttgttaatattaaaataaaatattacttattttttaaaaaaataagagatttaatgattatttattttattttttaatatataataaataaataaatatgattttagttaagtcaccacggttaagttagtttatttacctttcggttaagttgttatattctgttagtaattgattcccctaactaactcgcctttgcctaattgcctataagggcctcttgtaaacaatgtacaattcagttgaataaagaacacaatttctcttttttttttcttctatctctttttctcatatggtattagaagttatcttgcccacaactttcatagtagaccttccacaggctctaacaatggtgctcctccatcaacaacagagccaaatgcagcaactgagacaaatagagatcaatcctgaagtcttttcagatccacaccctccaacctcaattgttcctttaagaaatttgattctcaggccttaatctcaaagctcagccgttccagatctcattcattctcctatagatgatcacaacactgcaatcatcatgaacttctcatcctcccgttcgtcctatcaacgatgacgtttccaatcatttcttccttggtgttggcgatcatccttgccttgtcctcgcctctattctaaatgacacgaactacctcatggtcgaacctcttatgaaggcccatgagttagatttttgccattattttgcttccttaatgaagcaaactcatatttattcagtaatgtcatttttttgctctagttatttaaatactaattttatctatttaataatttgggactttttcatttttac

SEQ ID NO: 113331 - DNA, 3950 bp, Cannabis sativa
tctctctctctctctctcattgtatttttgaatatctaattgtattgttagatggatatcccaaattttgatataattaaatatccaatcaaattaattagtattttcatttagtataatcatacttataatatatatactatgtattaataccatgcaatgcatgtttgtttaaagttattaaaattactattacctaattattaatttaataataataaaattaaatctaatactattcaattatattttttcacatgtataaaatttcatctagttttaatttttttacaaaaaaaaaatataactaattaattttataaaacaataaattattatataagttcagatattttgaataatataactaataaatttgatataaaatatgattaattaattaaattaaagtctaattcaaatttaaattaagatttataaaaaattatataattttattgatacttttaaattaaatttaaatatttaaaactaattttttctaaaaacaaaaagataataaattgattgatttaacggtaatagttttaacttttaactttaacggaaaaaaaatcgttaaacaaataatttctattagatagtgttgtgaatttttcaacacgtaagtatacatatcgttttcaagtaatagactcacaagagtgaggtcaatcccgaaaagaattccaattaattactaaacagttaaattcctaagttctaattggtgacaaattaaggaagaatgattaatttttaatgcagaaataaaataaacaagaaaaagaaatatgcgaaattaacaatgatttaaagtttatggctattaacttcgattgaatttactctatatagtttaatataatttactttttaaattctaatttcgtatgatgacggatttactaaaaaatttatattctagctaggacatgtaaatctcaacctatatacaaattttttacattcgtgataaatttaaacacatgggaggcattaagtataaaaatcctaatcgctacataaaccatattggtattcttgtcctatatcaaaaactatgtcgatttcactatagtataaccaatgctcacttctcaaattttgtatcgatatcataaacagttaattgatggttaggcaattaaaagaaattaagtacgaatgaaatagatgcacatacaaaattgaggaagaataaataatatcaaactaaaataaagtgtaagacaatctctattaataaccttatttaaaagcctagctacttatagttattgtaaacatcgcataacaattgattaagagcataagaaaaatagaaaaaaaaaagaactcttcaaaaaaaataatgttgaaagtctccagagtcgttttctgcctcacattttgtactccttaatcgcctattttaatgtgttgaaaaaggggtctttatatagctaaaagaacctatttttttatagtttaaaataggcaggccgcaacactataagatcttggagtgtcacgacccgtgtcttctaggcatgcaaaccccattatgatttttccatagcgggttgcagtactacagggtattgatgcggcgcttgaagcccgttttttagcagagaggaattacagtttccatgaccttgctgccaaatttctacgttcgagcgccctagcgctgaaatccaatattgaggcgctacacctcactttccaattcttcaacattagatggtccaatcgcaccgaacgttttttatttttttctcagattatttttcttggtgctctatcaacaaaactttttttaattaattctttttgcacatatttttttcaaattcgctctatttttctctaatgcaaaccttgaaaatattaatagccaaaagtataaaattgtacaaaacacaattaaaactaattaaaaatactttaaaatcctaattaaaattatgactaattaagtcctaacaagttgccacatttaatataaaaaaatacattgactaaaattaggagattttacaaaaatactgaattttgggggcattttacaattttagtcacacaaaaattttaacaaaaatactgtcaacaccttactttttttcttttatattgtacacaccctaaaacacatacgaaaccttcatcttcaaaagtcaccttattcagcaaggattccaccactttaaattgaaagaccttggcatccttcgtttctttcttggtctggaagtagctcgttgtttaaaaggcatatatgtttctcataggccattcactctgtaacttctcgaagaaacaggttgtctaggctctaaactagcctctactcccatgataccgaacatcaaactgcacaaagactctaaaacactactgcaacatccaacacaatatagaagtctcattggaaaattgacttatctcacaattgcacggacaaacattacctttgctgtcaacaaactcagttaatacactcaatcaactcgacaacctcacttatatgctgcatacagagtattacactacctgaagaactctcctggtcaaggcctttttttttcatgcttcagcaccatcaaaactcaccctccaagcctttgcagacgctgactggggagcatatcttgacaccataagatctatatctggctactgtgttttcctaggagactctctcatttcctagaagtcaaaaacacaataaacaatatctcgttcctctgctgaagcagaatacaggtctatggccaatgtcacttgtgaactccaatggataatatctcttgtcaaagattttcaagttgacatctctctccctgctcttctattttgtgacaacaatgcaacaatacatatctctgagaatccagtgttccatgaacggacgaaacatgtggaaattgactgccacatttttcgaaagaaactcactaatggcatcatcaaactcaaccatgttccctcaaaaataaaccttgctgatatactcattaaacccctatttcctactcatttcaatgagatcattttcaagatgggtgtaaaaaaatttacacttcgtcttgaagggggctgtcaagatagttagttcatttagttaggtaattcaattaagtttgttacattatgttatttgatacttcccttgcctatataaggctttgttttattctttttgtaatcatccaattcataaataaagaattgtctttctctctctctcttatctctctaaacttacaactttttttttttttggagttaaattgattttcttttttagctcaaaattatgtttagatagtattagtagagatgctagagagtacctccaacaagcacaataaaatgtaaatagttgtattcagcatggtaacaaatattgtgtaccaaaaaattataaagattgtcaggattccttttattttactttttctttttcaaacaacaggggtccttttatctggacaaaatgctatttatttacttcagtagaaacaaaaaatttataaaattctttacatttgttattgagataaataggttttaatgatctgaaacaacaaatccgttgtagtctagttggtcaggatactcggctctcacccgagagacccgggttcaagtcccggcaacggaattttttgttggcacttttacaataatttttttgataactcacttttgcaattttatatcaaagtatatcatttttcctaatttttttttcttactttgttgctcatgcacaagcaacatcaacatgttctattgtattgcttatttcgtattcatcttgctgaagatcatgaggtgtagttgaggcaagcgtttatcatttcaagttttcatctttcagtaaatatatatatacattaaatgggtctcagggtacattaaatgagtgtcaggatatacgttactattttttaacccta

SEQ ID NO: 113332 - DNA, 2407 bp, Cannabis sativa
ctgccacggcctagggctcgggtcgtgacaaggggtctagtggacgatgtgatattcatgggtagcttgtctcttgtgattatttgttgtctctctattttgtttattcatgacgacgatgatgataatgatgagatatattttattttaaaagctaaccatgcacgaatttttataaaactactgatcctttgatattagctgtttttttactaggcttataagctcacccctatatttctcctttcaggaactcagtttggtacttatgtataagagagaatcgttaatggagaacgatgagattagcttagtccaatcttaattattaattaaatctttatttaaagattgaatatgtatataattattaatggatggtaagtaccatttaaatagcgacgaggagttagggatgaggaatatgatagattcttagtattattttggtgttttacaaaacattaaatctaattatttagtgagaataactttgaaaacaatattttctatatatattaccagacgatcctattttattataattatgctttatttaatatatgaagtattctattattttgaatatgtattttatatgattttgtaatataaattaaatgagtatttgtaattattacaacaagtgatttttttttttttatttaagcgtttatatattacaatcatgtttcacgggagactcgaacccaggacctccaacacacacccacctattacatcaagtgttaaagtatgagttttgattacttaaattatggattacatgtctctcatgccacagcttaaaattcgggtcgtcacacactctcttaaaaaaatatatataaatatatatatggtctgatttatttccattgacacatattaagcctgtctcttactgcatatgcctatttggggctctgttggtgaaacacttaggtggtgagccccacaataatccatatggagagtgccctcttcataacaaacttcaataataacaaatatctctgcagttgatagatatctatattatgtatgtgtatatatatatgtagccaaaggcccaaaaaggaaaaggaaaaatagtgtaaatgtttggcgatccagaacgtcacattatgtcggagatgaagagcaacatatagagctggctcccgcagatgccgacaacttcaaaatttcccgatatgtatttccgtgtggcactcctagtaactttcttatctttctcccaacattattattgcttttgttttctctgagccatatttttaattttctaattgctacacatgtacatatttaaacagtatagtagtatatatgtgtagaagttctatatacatatataaatatataaaatatcagttatcctcacatttaggttagttttgtacaatacattatctgtaattgccatgcacttagtgtgtgatgaacttagttggcttgttcccaaatcccaagatatagagaatattgtcaatagccaaggctagggttatctcaatctttatcgcatcctctacttaatattcaccgcgtggattttgtcacatggtttgaagaataagtttctagatactcattctttacttattcataccattagagataaaaaaaacaactgatatatatttttcaaaaacattaaatgtaaaatacaaaataaaaatgaacagggaatttgattaattttcatgtcagaatgacaggacaaaagttatttagacaaaaagaaatagaacgatatcacataatcaaacattacaaggcatgattttattttactttcttttgttcgaaaaaactaaaaagaagaattaatcattgaaaaagttaaaaaacgggaaaataggatagggctttagagagagagagagagttcacagatggaaagagctatcgagtaagggtaagacacctcgtcttttgcaggagggtaattgatgatggccacatttttctcttcctctctcaattctcttctcttctgagttttgtaaaataataataataacaataaataaaaaaacaaaataattaaaaaaaataaaatcattagttaaaataaaatcatttacattataaatacacatagagaaagagagagattaggagaaaaaaataagttaaaaaaagggaaattagcgttggaaggagtagtgtgttttgtgatgagtttattaattagccaattagctagtgcgactggatgaaggtgaaaccatgtaattaaatgttgtccattatattagtgtaatttagtaatagaagagagggccacccgaggtttttattaaagtaataatatatatatctttatatattaaaagtgcctatctaacggcattggtttaacagaatatacttcaaaataaaagaatattctgttaaa

SEQ ID NO: 113333 - DNA, 1484 bp, Cannabis sativa
  modified_base (1439)..(1444): a, c, t, g, unknown or other
taccttagtaaacctgctattgcatagaaattggtaacatgaagataatcatattaggccataatcaatagatacaattaaaatcgaagccctaactttattcactgttaaattcttatattaatttaattacttctccttttactgtttttattgttttctagtattaatttattcttaatttttgttcgaccaaatagaagtaaaagtttaattttaatgtacttaattacaatctctgtgggatcgacctcactcctggtgagtctattacttgttacgatacgctacacttgcgtgtgcaaattaccacaacaatcagcgaaaagagaagggttgagggaagagacaggtttctatgttttcatttttttttatatgtacaaaagtatatgatgctacacttatcgttctatatacttttaaatgttgttccaaaagatacatctagaacaacttttcaaagtatctagaacaacatgtgtcgcgccagatgttagagaggaaacatctcactccttttaaatggtaatatttcgaagaaaaaaaaaacaaaaaacatttaggaacgatatttttgcatttaatgagagtattttcattccaaaaagttagttatttattttgaaaataaaagaatttttatcaagaacgattttggttagtcgcatctgataccctcactatgaagaacgacgtacatttcgtcaatccagatgtagttgtcgtgccttaaacccatatttaatgtaaaataatataagagagtgaaagaaaaaatattaaaaatatgtttactcacaactatttattgagctatatttagcaaaaaaaaaaaaatgatgagctaaaagtttgaggtattatacctcacatgatatagtggcatattgaacatttttagctaaatttatattttttagttattttaactcacttgttgtgagtgctttaagtcacaaatcattgtgaaagtaatatttattttcaattgttcacaattttgtttcaaatgtgaaatttttaggtaagggtattatttttgtttgtattgtatgaacatttgtagacaaggcattttagatgaatgaactaccccttccattgtcaattggttttgagatggaacaatcattcatcatatctctaaattctaacacgatcaagggctttagagatttttgttttaagttgggcgagaatgtaaaaaaactttatgagaaggtcaaattcataattattactaaatatagaaatatatgcccgaacctaaaaattaatatataatttccctatttatcgaaaatgaatatgtccgaacctaaaattaatattttttttagtgagatatgaaatccttaactaaggtggcgtttggtaatatttttttaatcagttttttatttttaaaagtagaaaagtgaaaatattttttaaannnnnnttctataaaaccgtttttacttttcaattttataattaga

SEQ ID NO: 113334 - DNA, 2002 bp, Cannabis sativa
  modified_base (1970)..(1977): a, c, t, g, unknown or other
ttaaatattttaatgatatataatctcttttttattcttatttttttttcatctggcaattttattgttattcaaattcaaattcatcctaatatctagctttaaaataggttaattagttagttagaaaattaatcctaatcggaatcaggtggcacgtaatactgggaagggcatgtgtgctatgaatttgttaaaaagctgagattgatagttggagctttactatcgctgtgttcggtgtcgaggaaaaccagagagaaacggtggcagtagctaccccataagtatgttgatggatgttacttgaatgtgaaagtgaattctctgacctcaatcgatgccaatttgtcattttgttatgtttttttttctaacttcagtgattagatttcaattatggtgttgttgaggtgataatatttattcttaatagcaatacccatttttcacttttttatttctaaaacttgagatatgtattttcttcagaatttgagcattccattatagttttttctatatttttcaaatttatctgaattatatctgttgtagtcaattcttgccttgatcttgatcgtagtcgtagaattggttagctggtagatctttcaagttaattcaccattcaagtgtattttgagacagtccatgctacagcatcgagtttttcttttatttgaatgctttttttctttatatgttctatgttgatgaattgttgcatttggatttggagggtttaggttgctagaagcagcagctagctcccataatatgtgaagttttgtggtgacatatgatattttggcaacggtcaagctgttgagtaatagtgatcgtaaacactgtaatgtattgatgtgaatgagtcacttgtgtgtttttaagagctgcaaaaaaaaaaatgcttaatattgtactaggatcagcattacaggtttttgttgagatcatgtagtctggaggtttcacagtatatttggcaacataaaagaatttacaaatcacttctgaattcatgtcaggttatatgtaaaattctttacttttttggtagtttttttagacaaaatttttaatattgatttgaatctaaaatagaatttgtatcttgtatacaattgtgtatgtccacttcgttttgatcagatgaaaggtgaggagcctttaagtgatgagtttaactactgatgagaattgtgttcaattattttggaaaatttatcattattcactcataagttaatctatatattactaacttaaaattgtgaaaatatatttttactttttactggttgacattcttgaaagtcatcatttaacatttttttttacagtagaaagtgtgttgtctgaaacataacattatgaaaccattaatttgcattccctattttaacaactaagctggtttatctacttgtctaggttctttacatgtgtttaccaacactggctacacaaagggggattaaatatgataactaaaataagttcttgttgatacatgtttgtgcaaacaataagtattcacaaacatactttgaccaggttgagagaaatttataattaaaataatctcaatatgatacatttatgagtaaataaatataaatttgcacacacgcatggatccagttcaatggatttgatcatagaaatctctaatacattgatccagtttagtatattgttcatacaaatccactctctgtgatatatgtttgtgtaaacaataaacacacttgaacacacatacacaaacatatttccctggtcaagtagggttgatctttaagatgaatttttttaaaaagaaattcataaaagtatgttctaatttttgaaccaatagctaatcaatcacagggaaagttcgtataatttgtcctcctactattgttggtttgaattcataaaaattagtgcatgtttgacatcataactaaaaaattgttttnnnnnnnnaaaaacagaaaattattttttgaaa

SEQ ID NO: 113335 - DNA, 3338 bp, Cannabis sativa
  modified_base (499)..(526): a, c, t, g, unknown or other
  modified_base (1359)..(1375): a, c, t, g, unknown or other
tttctcaatatttaagccttacttcaatcaatctcatgtctatgcaaactttgtacaacaattcattatgtacaaatacatatatgcaaatttcttatattatttacataattcctaatttactcaaaaatattcataaactttgaaaaacacttttcattacaaaaaaatatttttataataattattcaaacaataaaaataaaataaaatttatacttattttatatttttaactataagcaaaataaaaatttaaccaaacaaagttaaaagtaaaggtgattacccctactatataaatatatatgtggtgtaatgagttgtgaaattgagaatgagaagtcttttgtttgacatttagactttagtattattctaaaattaatatgcttatattattattttctctctctatatggcaacattacatataagacaatccccttttgggtcagataggaaactcacacacatacataataataataataataannnnnnnnnnnnnnnnnnnnnnnnnnnnaataataataataataataagatctgactctatatatctctttttgactcacttctcattgtacttgggcctccaaacagtgaagtgaagtttcctccagaattgaaagctctgataagtcatgtgaaaccttcatcaatcacatgttggagagatctttggattggacaaagacttccatgagttcttactcgatcttgtaataaagtgagattctattatagcttaaaataattgcccaactacaatcgtactattgacttttacatatattctctttttttattgcttccttattctcattgaatagtgaatactataacttacttagattaatcatgactttgtttgagttagtttctcaagtaaaattgacttttgtttacagcattagagaatgtgaggcaagtagagtgatcatgactcatttctatcattagaattttgacagaaatcttaatttagtagttggatatcactatttgaattgttttttgtgtgtttggagtttgaatggtatttgttgatcagctatattttctatgatgaaaggtggtaagtgctttctttttctatggtagctctatgttatataattaatggacctttatcagcaagtctataattggtcaagactcaagtctaagaacttttaaggtcgttaaaaatgtataaaatcatgcctcctgaattttgacatgtaccaaatcatgctcctgaacttttaaggtcgttaaaaatgtctcctgaactattgagattgttagatttaatgacttttgtctaatttcattcaatttactatttcaatgattgtttatatactaaatcannnnnnnnnnnnnnnnntatctaccaaatcatgtccctcgaactttgacatgtactaaatttttttgttactgttcgagcaaaggttagtttttgggtggtttctgctaattggtgggattattttaggtctgaatcttctagttttgaggcttgattcttgggttgagcaagtttgagttctaagaactcaaatttggttcaacaatggtattttaaaattctgtgaataattattgctatttttggttggaaactaccctttgatgttgttataggtgatctagaaggcgtggttaagtttggacacaaattgggcaagtttcgaactcgtttgggttacttggtgcaaatcggttaaccggttttacaggcctgtaaaactggttaatcggattaagggcaggtttctcgaactgttcgatttgtcaatttatgttatttttaaagccttagttgggtatttccttattatttagggtgttgttataagagctagtgatagcagaacccatgatggtgagtttgggtttttcggattaaggttttagcgtgttaattactcgtttgcatatatgtgactagggcatctatcgggcacgaggttttttgttcaaatcggccaacttacttaagttcggaaacaaggtaagactcgcatagaatatattataaatgcatgttgtgtttatgattgtatatgttttgggttatatcatagcggcacaaccattgtgtcggttcaggggtacatggttaatagtgataatcaccccgaaaagtattaattggcgctatcatagcggcacaaccattgtatcggttcggcagtatgggcatagtactagttagagtgatattatggccaattggactttcgagtactattgaagctattatagcagtacgaacatagtgtcgatcccatagtgcgatcatagtgctgataatgggtgatatcatggtcaatagtaccaactgttaagaacgttcttaattatctagtaagccttgtgggtaagtgtatgagcgcctagacacaagttgataatatatgatttgttacatgcttttcttagtgagtctattggctcacagattctactttcatgtataggtaagggaaatgtgagggctgaacaagagtgaacttcaggcttggatggtgattttacatgtcgagacagcgcgacttggagtgttcggtctcgggacatcatgagttatattttgtagtcattgtataacaagttgtaaaagtattttgagaatgtttataaaagttatttgaacacgggatcccggttatgtaaatatatatgtttataaagtttaataattttaattaaaattttaatttagcacgatttttaagaaaaattctttaattagacatgtttaaagatgttagacatcactgatgtccaataatataaagatgagtcaaatattttgataagtttaacacaatgtgcaataccaatgtttaaccgggaatcttgattcaatactataatgggtctaatactttaatgatgtgacgcttgattattaatttttatattatttatttaattaaaatgtgcaggaccaataataaattatactaatttcagttttctatctcttatggaacatactttaaggtgcccctaacatttctcttttaagatatggtactttttgagaaaattataaagtatggtttcggaagaaaatctaaaatatgaactagactttttgtttttaagaaaataatttgtctatgtttgtaaaaagtaataaaaaaaaaataaaacataccaattttaaaaaataaattagattttcttgtaaaagaaattttcgaaatagggcgagaagccttgggtgacggccagatccgcccacccttgtgcctgactctattgataaggtgtctaatcattaagataaatcgttaaaataaataaataaaagcaagttaatatatatatatata

SEQ ID NO: 113336 - DNA, 2589 bp, Cannabis sativa
cccccgccattgctgccgctgcagacagggaatgtgccatgactctttctcagtgtcctactgtcaaggtatactttggggttatgtgaatgagccattttccttctctaaaacgattgcaccaaagtagggggaatcagttatgtggatagcgttgaaaggtatactgtagtcaaacgatgcctattggctactataagataagattgtaccaagtggaccctttcattccgaggaattgtttaataagttgattttgctcagacaaaggacactaaattgttacacattacgaattcttgcatgaatataaaaaacatttgcacgacaacaaacttggtaattgttttaactagtattttgcaaacgaatgtctacatttatattaaaacttctattattctcttttgtcaaatgtattacttgaattacaataacctacacgcgactactgacaatgtatggctatcacaaaacaattgatttttaattttaataccaaaatgagaatcatttgtaattgacaaagtgagaaaaaatgactcaaattggccatcaaagagtatgaattaagaaaaataatatttaaaactaatattttataagaaatgtaaacacttaatgcggcggttgtagttgtagtattaaaggacaataagactagtctttaaattttgcatttctagctagcatctccaaacaacaaaaattatccaaaaatctcaaaaacttgagcttgcacaatgaagcaatggtcctaacagagaaaaaggcataaacaaaattaagaaactccggaaattcactcgtcatcgtcctcatcagcatctgcagcagagttgaaggcattcaatctcgcgacaagcttggccttcctctcctcataagtgagctttttcaagttgttgtatctgtcacataaaaaaaaaaaaaaaaaaacaattgccactttaagttttagtttaaatcagataatacaagttccacacaagttatttttactgaccttttgtgctccttaggaggctgcttctcagacttcttaattatgggatcagcacggatagcggcatgcactttcttgtacacctcctcaatattgtcagcctcaatgcctttcttaatgtattgtgagaagtgtgactggtatttctcaggctcatcttccataagagtctacaaaacaaggtataaaaaaggaatcaggttccaatgaaatgaacacaaacagagaaggcgatctaatcataaacagaaacttttagtaaagtctcctaacataccctcatgtaatctgcaatgtggccaccaaagatgtatttgcggtgaatttcagcatcaagcttcttgttgtcttttgaaaatccagcaaacctcttgtcactgtgggggatatccaaaccaccgtccaaagcaccctacaattaaagaaatgtgaaaagaggaaatgagattcaatacaatcacaacaaaaaaaattgcagcaccaccgtcaatgaacagacaccacaaaaaaaatatattaaaaactaatgggtaccttaagagcaccaaaaacacggttgccagtggtagtcctgaggagaccaacatcaagaagggcacggaatggcctcctggtctctgcaggttctacagagtaatcctctccagtagcctgcaaacaagaacaattattaaaatatggaacaagcataacaaggcaacacaaaaacaaatacaacaaaacaaaatcaattacctcaacatttccctcatactcgtcatccatctcgagcattttcaagacacgacgagccaaaagaagtccagtgcagtaagctggcatacagaaagataaaacgatttcataacatacacagaaagatacaaccctttcatacagaaagggccaatgaaaaaacaataaaatacataattaacaaagaattacctgcagcgtagttggtaagacctacttcaagcccgtaatgagggagctcatgggcatatgctgcagccaatacatggtcaccagcaatgctggcagacacaacctgggcaatgatgtccttgttggtctaatatcagagtaaaggattgaaacatatacatagacaaatttaactgtcaaatcagtatgtcgtaaaaaacacattaaatggcaatgtgtaagccagagctgattcaactttattaccattagatccacctatgcctactaagtaggattatagaaaacttcataaagcttcagatacaataataaaaaaacaagtacgagatggcaatcattttaatttagtgattttactatatagaaatagaaatgcacatcacagttttttaatgcaatcacatagttgtaaagcttacacaagttaaaacaataacaactgcaaatagtaagacatccaaagattaaaaaaaacaataggctgcaaataaaggatacgaatcggacaacaaaacggtactttggggtgttgtacttgttcttgtcctgattaatcaatctaatcctagcacggtaatcagtctttccctctgcaaaataattcagaacggtgctgaaaatgagaaatcaatcaaattaaatggacaaatatc

SEQ ID NO: 113337 - DNA, 2182 bp, Cannabis sativa
tatcatcaaatttttaaataaaagaacattttcttaattatttttttttttaaaaaaaaaaaagacatttattaatttaattgttaaatttacgatcatcttagatattggcccaataagatcaccttgctggataccatttgagatatactcatagatcctagatccaattgcgaaaaccttggggctcgagtacccaaaaccacaaaacacaaaattaaaaatgtctttgtaattaaaaatattatatcataaaattataaattaaacatagaaaaagatattttttcaaaattaatcttttatcttcatgtaatgtaatgaattttatttgatttgtctattatcatatatttcccttttgaactattctctaaaactgtttcaaaaaaagaactattctctaaaaacaattaattgacttaaattttctttattctaaataaactcttgtgcatttacggacataatatgacctacgtacaaatataaataatcatgtctcagatttatattatatatgaaatcaatattttttaaaatgataaaataataagtagaagaaaaaaaataaagcatataacttaaaatttcacttgaaaataaagcttacagaattttcattgaagcctcgacataagtaatcgaggtaaatagtgtaagcatggagtacatagattaatagtcataatacattaatactcatcagtattaataccacttaattaactaattagtctctgaagcaagtagagcctcatacatagcaaaggcagaagtagagatggtggtagtgcaactttttgggcatttcttgacttcatatgaacagaaacaagttgggcacaaatcaagggagcaatcgcaatcatcttcactgcagcctgcagggcagtcgccttctctagagttgttttgcttacacaccaacttcccacgcttatttaccttgcagtagcagctacatgacgttggtcctgagatatataatcacacacacatatataaatgtattataagtactgaccttttcacaagtgtacacatgaatctattaaaattaatgatacttaaagataactaatttgtactactaaggaagagatttaattagctttgaatattttttctttctcattctctgcatgcatatcgtgtcccttcaaatgctatgtaaaattattaatattgattttgtgtcatattctaaagtattattagttaaagatgcgaaatcgaaaccccattttctagtagagcatggcctccttttctttttttccttccacgttgtataaattatgggtcgtctcatattttcgtaagaaggaaattaattgcggtaactttgatgtgaggattgttttgctagattatgacattttacattaataaaaatacaaaatacaaaatacaaaacaaaacacctagaactgtgtggacacgtaccggctggtgggcaaagggaactaagagaattatcaaaaacgcgcaaaaggttcacacgagcatgagctgttgtagctacaagagccaacagaagaaatgcaaaggaaactttgttgaaagccattaattattggtcgatattggtttcgaatgagtagtaaggagtggtgagtggcaatatcagatatattataatattagcaacgaaaatatataatatatatagagagagatgcggaggtagggcattagaggtaaggccaattcttttgattattttaattttatttatttgtccatgtgaatctcattttctacctaccaaagtttgtttcatcattgtcatcatagcgtggtggaccagaagagttctgtttccctgaaaaggagtagcactttttttactttttttcaaaaatacactccttttaagaaagtaaagttcattttctgacagtttctattaaatatatggtatttattattttctatgtagcatgcatgtgagtattatttcttccaccgatcaattttctttttcctactaagttatgatttttgggtatcaataatgcttttttttttcaaaaataacaataagatatatactataggaataccaatggtagtggtaccaatactttataggaataaattgataaatatgtccttttttttatccattaataaaaactattagtgtcgtaatacttttttaatcagttttctattt

SEQ ID NO: 113338 - DNA, 1621 bp, Cannabis sativa
atggaagaagctatatttttatatctcaacttgtgtggtttatgacttggtacaaaaagggattacatctctatttataggactctatggactaatctagaaatattattaaatgaccaacttctacattgttctacatagttccctctactaacacaagtgaaaaataattttagaaagtacaagagtacttaaacaaacaagaagactctagatactttagtaaatataagaatagtctagaaacttaatagcaacaagaaaattctagaaatcaacaatattaaatcaaatttaatattttaaaaacattaacacatcaatttatatctattcttttaaaaaaaaatcgtctcccctatagctatagcgaagagataagagagtaagtgatttgttaataattagtgaaatagcaatggtgatgcaaacaaggtctatgaagaagatactgttccaaatcaactcgttttgtacggatgacttactaattgaaatattaattcgcgtccctgactcgaaaagcatagccaagtgtgggatggtttgtaagtgttggtgggatttgattcactctcaacatttcaagtgcatagtaactcgtcatcatatgcaacaaccaacaagtcttgtattcagttttgataaaattacataagtatgattcttacctcatagacataacaaaaaaaatttacatcgatctacaaaaatcaacaaaattgagtccacttttaatgaattattactaataaatggaaaaggagatggtttttacatatttaatttacttacacaccaatcattcaagattcccaaaccccctcgttgcttttcatttacgtctgtcactacctgtggattagttttatactctcgttatcgagtggtactgttgacgagagcattagtcactgtatactgttctgagagtggggaatggatgaggaagggaataaatatcgataaaacatatcagagttaaatatgataaaacatttctatgaaccacctgtagctgccaatggatgattgtattggacaatgattggaatggtgagaggcgttataggagttgtggcttttgatccttcaaagataaagtttcattttattaaattaccttatgtggttgggggtaatcaatacgagcttgagccattcttggaattgggggtttcaactgcttgcattggagtggttaataggcgcctgcgtttggcctaatcatatccacttagcaagaagtccataaataatatttttgatgaacttaatcttttccaataagttacaatttttttttaaagtaaatgcaaaatacatttttgtatttttcaatcttttttaagttgaaaataattataaaaaaaattaatttaattattttttatattaaaaattattttcttataattttttattttaattttatgtaaataattaaaactatattaatttattaatatataatatttattagaataataagacactttaaatatatatatttttttatatatacttccctgatatgagactattgtaaatgttaaacttttaagttatatatatttttcatcaaatatgtgagtgatagatattatttatttacacatat

SEQ ID NO: 113339 - DNA, 675 bp, Cannabis sativa
aaaaaatataaccatgattataaagaaaaaaaatataactataatagttataataaaaatataaccattaaataatcacttgataaatattcacatttttttaatataaaaccatcaataatgtaaagtgcataatttgtagtgaaatttagtgtagaaaagagtcaatactatattttgacataattttaaaaattattttccaatagaaagggacaaaataacttaaaaagtcaacaaacttattaatattttgtgtaattctataatagattatcgatatataaaactgttgtatatgattatcgatattgatatcaaatattctttttcaatgtatttttttttctctttctttaaaccaatcaaaattagatacataatttcaattagaaaactttaaaaattagtgaggcatcattcaaataaaaaaaggagaaaaaaagataaactcaaattttacaatatatataccattggagagaccatggtttttagacagaaataatgacgaacaaaagtgactggtttcaaaaagtaggaagaaaaaaaagttctttaaacaattgattaattaattgaactcttgttgtagccaaacaaaaaacaattgattaattaatgtagagtaatcaagaaattgtactatattttttatttttacattttaatttt

SEQ ID NO: 113340 - DNA, 4281 bp, Cannabis sativa
  modified_base (28)..(44): a, c, t, g, unknown or other
atatgatatataatccaattcaatatannnnnnnnnnnnnnnnnacgacctaatacggcgttccaaaaatgttaaattttcataaatagacacaattgtaattgtactcgtacaaagtgtgacattatttagtgagaaatagtaaagggtatctttggtgtctatatgtaatatcattattgatacaatttaatatcaagttctatttattatatttaataaatattataaaaaaattattaacaatttataaagccctacctaataatgttaggcacattaatacctcataacagtaatcttatttattcatatgttttttttttttttttacaaagtacattatttattcatatgtgctagttcaattgcattttattcttcaataagaggacaaatatgtattgggattaaatatgtgattcaattttcatggttagtgatctgaaattagctaatggagattgaaataaaaatcttgttgaatctttgtttttagaggctgaattacttcacagattctatctattctgagatctaatcaacaacaatatttgatttggcacataattcttcagggggttatacgattaagagtaggtattgaaatgccataaagttattaggattgggtcaaaacgattcctcttcgggctcatcttcttgatggaagtacttttggagtcttactattcatcgtaaggtaaagatatttgtttggaaagcttgtttagattggtttcctactaagtctaatcttgcctctcataaagttcctacaaatcttacttattcagtatgtgggccgaaaaacaaagcttcattccatgcactttgaggttgtacaagtcttgcttccatagttaaggtggtagatttttctcttacatctaaagagttgcctcacgttaacattctctctttcttttgagaacatgaatttattcttcgtatagatgggatggagcggcttctagttcttctttggcacatttggtattgtcgaaactattgggtttatgaccaaaagctttttgatatcaaaggcatattgggctagtccttttcgtttgctcggacctatcaagaagctcatatgagaattggatttgtggcttctagtcatacttcaactgttagtccgactggtcggcccccagaggcaccatggtctcctccaactgaagggtggttcaaacttaatattgatgttgggttgcgaccttctaactgttgtatgagttttggattggtcattcaagacttaataggatattgcgtggcatctgcagcaacctcgacgctgggtcttttagcttcgtctatcgctgaagttatggctatgctagttgagttgcaattatactttcgtcttggattttataatattgaggtggagagaagcatgtctggcatattatggtttaattttacaaggtatttatttaatttgtgataagcttaatgtttttaagtttttgttttgtaatcgttctgcaaattttatagctcgtaatcttgtcaaactcgctctttttcctgatgaggcaagagtttggtggccaggcttgcctgagcttatttaaatttttggatttattttagcgttggcttaatgataattttcttttatcaaaaaaaagggggaataaataacacaaataaaattagattaattttggacaaaatgctctttgttactcattaattttttttgtgtcatttttaaaaaagaaccacatctttaatctataggcaaaagtgaaaaaatgcaatagttttaagggattcatttagagcaaacatataacacaattaaaatttaagtcaacaacacatacactttgtattggtgatttatatataaatatttatattgcataatattttaaaaaaataaatgaaagtaaaagcaactcattgctaaaccaaaatcacaaaattaggacatttttcttcatagcatattggattgaaatgcacttaattataatgaaaaaagtgaatggttgacttgactatattaatctcacatttcattatacccacctttaaaaccatataataatactaattcttactcctagtctaacaattttggagaaaattacaaattttataggttttttgttttcaaaaatatagttttttttaaatgctattttatgaaaaaattgaaaaaaaaaaataaaagatatggaaaaattatgtaaagaaaataagtactattatggtaactagaagaaaaatcagttaccataaatagataactaggtacttcatgctgtttttctatattttttaatttttttctaaaaaaaattcataaaataactttttttaagaaaaaattatatttttttcaaatttatattttaaaacccataaaaataaaaattctccttacaaaaaattaccaatttcttaaagtaaattttgcaaaactaaacatgacacaagaaatttattttctatatttttaaaatacataaagcattataatgaaaataaaatagcaatagttacacaaatcatttgtttcatagtatttcaatgttgttctattgaaatgaacaaaaagatgcataatctaatatattattttttttagcattaagatcctaaattcaaattcttctccatcaatctaataactaaagttataccatagataattgatcgtttgtgttgcttttgatggcctccatattttgtagcaaagttggtgccttgattttactagatgggggcattggcgaggggcgagtgaacttggtaggtttaaaaaaggcgcgaatcaagtctttaagcgttggctcgccatcttgggtgtagagagtcactctaatagtttcccaaacaaacaaaacaccaactcccataaacataactaccatcactccactcaatgcttctacaagatctgatgccatatgaagatgaagaagaagaagaagaagaagagaagaaagtggagaagaaattattttctattaagattatagttttttgggttttgttactatataatcttgggtttctatattgtaatattttagttgaaacaacttataattgttgtgttgtgtattttgtgttagtgcttagaaaaatattgcgctgagtcaatccaccaagagacacgttttgattatataacgttgaccaagagacactagtttcccaagtcaatgagtccatttcaatattttttaatcaaattatcaataaaattattcatattttaatataataacttttacaaaataccactaataattttttaaggcactaccttatagtagtactactaacattattaatgtctaataacaatgctcttaatatatacgcgtgattatctatccaataaaaacttacaccatacataataaccgatggtcaacgttatctttgaccacttctgtattcggtggaggaggaagagccgccatcttgattttgtcggacgacaggtctagaactagggccgaggtcggggccgagggcatgataggtttgaaataggaacgaatcaagtctctaagccttggctcgccctcaggggtgagaatcaaattaaaggttgcctttgcaaacaaaaggcaaaatcccacaaacattactaccatcactccaaacaaagcttctgcaaaatctgacatttcttgttcttctttttttggttattgggattgatttgagattatagcttaagtgggttttgttgtataatgtatattgtataataatatatagttgagataaaacgtaggttggaaaaatattaaatatggctttgagtcaatcgcccgagaaagacgttgtgtcgcatctatagcttagaatttaacgtcttaacaagtcatcatctcacactacttcccaagtcaatgttattaataattaaaatttataatggacagattgtacatgttaacatcttctttttgtttgtttattcaatgtatttataatttagagcctattgattcaaagattagatattaaaaatggtcacatatgacaaaatttatagggtaaactgagttaaattaagggatttatttaaaaatgctgttttttatattttatttataattttacggcctaaaatttttatttataaaacatataattttaaagtttcaaaatttcaaacatatgattttttttaaaagcaaaaagtaagaaaacaactaaaaaaatgacaaaaaattaaggaataattacataaggtaccattttttgtaaaatatttacttttttacgttcaaagaa

SEQ ID NO: 113341 - DNA, 1797 bp, Cannabis sativa
catacatgaactggagacttgtacactaaaataatatcatatataaattaatgcaataattaattcatttcaaaacgcaatgcatgatctttggacttatactggaactggcatacacttccaaacggatacttttaacggcgaaaatgatttccaatatattcattggattacgtacgtattatatatatacatttattatattttattgtatttattaattgacacaagaaaaattaattaatggagcctagcctaaatatatataacttaaaacgatcgattaattagcttaattaaatttagacaatatgggtcaacttgttcattaacaaccggccgaagaccaattgtgtgcgctatggttagattccttaacgtagttttcatttccagctgtagtccatgttatattcatccatagtttcaggaatcaggattatatatatttcattcagccaaaataaattgcaaaccttaaaaactcattgtatttattcatctatattttttttatatttatatggtcaactcaactttatgtatttgttgatgacaacgaaatacgagcacatattgactttctttgtgaagaccttatttttctctatatatatatcttatcctaatatataatacttatctgcttcagtaacagtttacccacccaccaccaccaagtttacattctatagtattttacacacgaaaacatatataatatattatacaattaattatatatgcttaaattatattaatatttttaaatgacagacagagacgagacagaaacgatataatatatcatatatgcatggaaattaataagaaaagagatttatttggggttgacgagcttcattaaattgagaatagtgggtctttattcttttcaaccgattattaaggcatgggatttgggaatatatatgcagattttggataattattaagttatccataacatcatcaaaataaaccttagtgggcaatgacagagctaaaaagtttgttcgctgagatgaaaattaaaagaaatatatttaaaaaatgtaccaaaaaaagtatgtaaatacaaaaatttatattgaaaaggaagtactgtaaatgtacataaaatgccctaaactataggtcatgtgcggtggatggtacgccatcagaatcaattaacaaaattaattaaaagagagaaataaaatggtaaccatgaccgactaaatgtacgcgcgtatatatagtcaaaattcaagaggggatcactgtgggcctcatcgatcgttattcatatgtagattgtgtcatctatgtgtatgaacatataacctgataaatggaatattgcttaagtataaagcaatcttatctttttatttatttttaggtgtgtgtttggtagaaggggtggatcatttttgcttgttgatgtgtatatatgattattttcttggaattattttatttatttatttaattattcgcacattgggagatgacaattcgaacttgggaacgtatatatgcctataataattatcttagaattattttttgatgaggatttatatatgcatgttttagaataaattttagtctctatccaaaataaaaagattatgatcaaaacgtaattaaccaatggtaggagattttaattggctaaatatatttatagttaacactttaatttcattatatatgaatattaattgtacgatataagatgcttacatttattccccatctccttttctaccatacaaatttattaaaatcacaatataaatatatata

SEQ ID NO: 113342 - DNA, 1212 bp, Cannabis sativa
ttggagcagccacagccaaggtgtttgctcaaaatggcgcacatgtcatcgtggctgacatcctcgacgacctcggcgcagctctggctgactcgataggtgggcgatacatacactgcgatgttgcaaaagaagccgacgtagaatccgccgttgaactggccataaaatggaaaggccaactagacatcatgttcaacaacgctggaatctctggccccgccggagggagcataacaagtctagatatggacaaagttcagtgccttctttcagtgaacgttctaggcatgttacatgggactaagtacgcagccagagccatgatcaaggctaaaaacaggggaagcattatatgcacatcgagctctgcagccattatgggaggtttgggatcccatggctatacactatcaaaggaagccattattgggttcgttagaagctcagcttgtgagcttggaatccatgggattcgagttaactccatttctccacatggggttcccacagatatgcttgttagtgcttatagaaagtttcttgggaaagttgatatgaaggctgaggatgtgaggaaaatcgttggtgaaaggggaactttgctgagaggaagaggaggagctgttgaggatgtggctatggctgctctgttcttggctagtgatgaagctggcttcattacagctcataatcttgttgttgatggaggttatacttcagccaatagtgccttgagctttatttatcagtgatttacacaagagagtggaatctttatgtttctttaaagtattactactgttctggaattctcttctttaagacatggctaatcataagctaatttcataagcttatattttatcttataaatattgttcaaataatatactaagcaaacatgtattgtaccttagatgtagacacataacttagatgcactcgaactcattgcatcaaaatataatgacagtaaaaatagaccatttaagagagatagagagaaaagaggggttgaagttgagtacttttgttgctatatttgaggaagaaaaatgagttgactgaaaatctgagtagatgttattagaatatttttaattaattttgtgataaatgaatatattatattcattgaatttggataaaattaattacgtaatattttatatatggtcagatttcgatactcctgatttgattttctga

SEQ ID NO: 113343 - DNA, 6283 bp, Cannabis sativa
  modified_base (5106)..(5115): a, c, t, g, unknown or other
agaaaaaaaaaaatggtgaagggttgaggctgcttctattctagccaattactcaaacaataatttataatttggaaggaatatagtctaacctaaatcaaccaacaagaacctcaaaaaatccaagatgaagctgctcaaaacttcgtccccctgtttattaaacatatcaagttagaaaggatacgaaatgatcattagtgtaataagaaataagcaatatcctttttaattaatgcctggaccaatttaaactatacctctcaaaagaaaataaactaataaatagagaagccacaatgagaagagcaaatggccttccaacaacaccagctgatgttgacctatagacagcataattagagagttagaacttagaaccacggtacttactgaagaggatatagatcattgacaaataatagaaactaaaccgagttaaaagcttcgacaggaaactgacctagccacaagctccttaactgactcggttttgagcccaaacccaagagggaagagtggatcatagtgcggatccccataattcattggcagttgatctactgtcttgaaccatgtcctcggaagcttcccagtgaatccataatccccgaaaagaacatcagcaacaccttgtccttcagatcctggtaaccatgctgccaccaaggcatccattgaagcaaggtacggttcaatcacaataggtctacccgaaatcacaactaccacacacttaacaccctgacagacgttgttgataacattgggccccggatcagccattgtgagagttgtgctgtcccctgcagtttcggcatatgggtgctcgccaacaacaacaatggcgtatgcaaagtcattcgacttgacaaactcagcatcagggttctcactgtagatcacctctgtgctcggatcaactgttgattttatagcgtcagcaatagtagttcctgcacatgaaaatgatgcttatcactattgttgtgaccatactagtttccaggaataattttttttcttacatattaaagattcatggacataagtcattgaacataggatcaagcacatggaacagtaacaaaaataatgaatggaaacattatttggcagtaatagctttagatgtgtactgaagcccatgcacacctgtctgctaaggctaccttcacgaaaaaaatcaaggacttgcaattaaactgaccccgacccattgacattacatagacaataaaaagaactaataacccaaactacacctgctaagaacacaaaacaaagacacctaataactgacctcatgcataaaattttcatcaggttaccacatatgaaatcatttgattattatgttaagatagtaaatacttgtagtaccaaacttaactgtctaatgtttttaaaagaaatatcggcactgaaatgtgattcttttgggagggtctaagttgatgcagtatttcaagtaaataacagtattttgtactgaattacaagaatgaaaaaggaaaaataccccttgtatttttgtttccactgaatccttgccatgaaattgtccaaccaccacattgataacccaaattatcagcatgagcaccagcaacaaggattttgtgaaccttcttggagaggggtaatatttgattagtttcattttttccattcttcagcagcaccattgattttcttactgcctctctagccaagtctctgtgtgcctaattaagtgccaaatcatccatgtataaaagttaatacagaaataaagggttagtggaagctgcattttgacttcgagcattacatgaaagactaggagacaaacaggtactttggagttttatacaaattcattcccttggaattttgataatccctacctggcttccaagctcgtttactaagctataatcagccaacggattttcgaaaagacccatggcaaacttaacaagcaaaatccgctgcacagcatcatcaattctctccatggggatgataccactattaaccaggttcgtaagatcactaatgaactcactgtagttgtaaggaaccataacctgtatttacagaaccaaatttagagttttatagacacattattcatccactgcgcactttactttgcataggaagaaaaactagataattcatttccttcatttcaaatctgagtaaatatgttaaccactaaccatatcaatgccagcttgaacagcagcttggacagagtatgtgtagttagcatgtggtggcgtggtaatcctgtcaattccttcccaatctgatataacaaaaccctgagttttcaaccaaagcaccaagtgcagttggcatgagatactgtgagtcaatgctggccagatagaaatacagtcaagagaaacagacaaatcaaattgatagttcataatgattaaaaaccaaaaacaggtcagaaacatggaagcaatttaatccttgtatctcaactccagattcttcactaacaataagaactcatgttaaagcttggtatggtttgaagtaaaatccttgtcagaattttccttcttttcctttacataccattttattttgtgagcacatagtaaggaatataacaatatacctaatctaactgcaaaataattaaggagcaaataaaaaactatcaatctcagtttaattatatgaagatattttctcccataaattattagtatacatagtcaaggatagaaggctctttatccttgcatctctcaaaaatatgagaaatgagaattctctgtaaccccattgctcttttaaagacaaaagtgaatacaagtaagcctacaatgtttgtttggcaaaacattctttgttgtataatttcaaaataaaacattcaaattgaaaacaaatgtgttagcatggatcgtaaattgtactcaaccttgaatttaagggtatctttgagaaaaccagtaactagctcacggtttgcgtgcattttttctccattccaactggagtaggaaatcataaccgttgagacacccttgataactgaatcagaataggcgggcatgtgaatgctgagcaagctatgcatatcagttaaagtgttgttctcgttgatgccttttgttgtcccaccatcacctacaaagtgcttcgcacaagcagcaaccttagtcctgcagatatacaagataacacaagcatataggttgccagcatcaataagtgtttgcgtttccacaaaagaaaaggggaaaaaaaacaaagacaacaataacagcactactaataataacatcataatgcaaaaattaatgaaaataaatcaaattggtattgtttttctctttggagacaagaagtcgtactttccaccaacatatggaactcctttccgggaattggaaggaatatctccctgtaaacctggaatgatctctgtcatttcttgcacaattttgtgatcctcactgtagctttcataacacctaccccatctcggatctctgcatacctgcagcaaaggtttcagttcacacaagttatgataaaaacccttatacagcaaaagatgattatatgttaccgcaatgcatggtgcaaagacataaggaatgccagtagctctgacttctagagcagtggcagcaccaatccttcgaaccagatcggaatccctgtttgcaatagctacagaatatataaaaggcaacaaaaaccaccatatcccaagttctagatagtaaaaatacaaccaactgaaagtttagcaactctcaaaaatggagcttattatgacaaaacaaacaaagagtacgaacttaaatccacgccaattactacttgccttgtagctccaaggccgacattgtgcggaaagattgtagcattatatacattattgtgtccatgcacagcatcaataccatagatcattggaatacccaaacgactagaaagagctcccttctgaaattcgtttatcatattaacccagtcttcagcactagcctcaggaagtggcgtactaccaccaccactcaatacactacctgcaaaaacaaatgtcactcattgattttacaaactgtaagttgaaaattttgctctaaaatgattggtaaggtaaagatttagatttaccaaaaataacaaataaagaagcttgtaaattaggaaactaacacagatgatatagaaccataaacagaatcatttattctaaagtagagtttgaagcagttcagaaagacataatcacaaacacattggcgtatgcataaatcacattagacttttcccataccaaaacagacacaagcaactgagaagcagagttttatgtatagtaccaatggagtaagttctcattgtcaaaacattagctacactcctgtcaatctgagccatctgaccaattttctcttctagagtcattcgattaagaaggtccctcaaccgaatcgccaccggttgttttggatctttgtacctcacgtactctgcctccgccatagctacccaccaccatatccacacgaacaacaacaacaacgatactgaaaccctagccattatcactccttttcaacaacttcttctacactgccaataacccagaaaaaaaacacacacacacacacaatagtatcaatcactataacactcccatttctgcgtttggtcactaagaaaaagcaggggaaaaaaaataaacttctacagaagctccaactacgattcaactacactaccaagctccaactacagattatttattctgatcatccaatgaaaacagtgaaagaaagcaaaaacgagaatccttatgtgtaagtaaaaacacactaaaaactaatgaataaaaataaaaaagacgataaaagggagagtcttattacactgtgaaaaagagagaaagagagagctttaagcttttgcctgtgctatttgagttacagaagaggaaagaaaaaaaaagaaaaaaaaaaaaaaaagcagtgttagtagtgagaatctgactgccttaactttcttttacacttttattttgttttgttgctattatattattggtgaataaatagatagagagagagagagagnnnnnnnnnnagagagagagagagagatgagatactattgaatattgtttagaaataaaaataagaaaagggacggtttgaatgtgttttttgtttaaagcttttattttttttttttctctgggaacgtggattgggttgggaggaacaaggtggagtgagagttagagtgagagtgggaaatcgtgtgagtgagcactaaagtaagcttagcttgggagacccaatcacccaacgtggggaggggactgacacggtggttgcttcacctcatcgccgtgcattctcaaatcaaatctcatttattattatgtcattttttaagttagaaaaagaaattacaatctattttttattttatttttttgctaattagaatttttgacatttaaactttaacatatactaaattatacctctcaatttttctggcagttaaaaattccccttcaattattgagattgttaaatttaagaacttttgtccaatttcattcaattttgtccagtaacttcttccacacaaaatggaaccttaaactttaaactgttatttgagtgtaaataaagtttaaattattattaaaaacttagttaagaggtaaaaataatgaaaatagtgcttcatcaaaatgaaccagcactcatataaatttttctactctattttttaaaatatactataaaaatttaatattttttattttgcattaaacttttacattaattatattatacattaatttccctattaatctctacatcactaaaatattatatttattaattttaaaagtataatattaattcatacacatacacatataaaacaagcaaaaataataataaaataaatttagagcaataaataatacttccctacatgtgtagagaaaataaaaataatcactatctattgcttgaaagaaaatgtaaaatagtccagttattttttaactattctctttttgaaggagctaatgtgagtgctatagttaaaaaaattagcttataaataatgtttaattatgaaagtgcaactagtagattttaatgattcaaattaccaagttatctatctttagattgattaatttcaagatatgaattatgaacatgaattaaaagtcaagctgtaaatcacacatcaatttacaagcttcatctgcactgagaac

SEQ ID NO: 113344 - DNA, 1372 bp, Cannabis sativa
gttgtcttctccgtttctccgtcgtctgcatcatcaatcgggtcaggatccaacccacgagcaactggctttcgaacggtccttcttttcttcgccgtggaagagcgagaaaggagaggtcgaagctttttttaccaatgcaaagattaaaaaaatccctattttttttttcctttacattttaacgaatttgaaattttaagagagaaaataaatttattttcatactacctcaaccttatactgtattttggcaatgtataaataatagtatttttagaacaatttaaaaataacactctgtttgaaaaaaaaaatttataaaaatgtatatataaaaaagaatttcataaaaatataagtttttgttatttttaagcatttttaaaataatttattctgtttttacactgttgactgctgcgttaaataatacttttttaagactattgtgctagagtgattttttattggagatttgcattccacaaaattataccacaaaacaattaaacttaaattaatttttttaaaataaactcactcttaatattttgtttagatttttttataatattttattttaattttaataattattttaatttcttcatatatttcgtaaataatataaaaaatatatattattttaacaaaaattctataatattttgttttaatttttcttaatatttaaattgtattttatttttatttttcatatacctattttagaatacgagaagaaagaaaaaaattaaaaagttttgtaaaaattaaaatcacatatcttatataaaataaaatatcaaaaaaattaaaagttgtataaacttaaaatgtatattttatataaaataaaatatcaaaatgagatgatttataagttttttttagtgtaaataactttcatttttaactttggagtgctaagttactcaaatgtcgattttgcaggtataagtgaaaatttcctttaaaagaaataaaagaaaaaggagaagaaaataaaataaaattaacaaagtcaaactttttaaatattaaatgcttattagatgaagaagaaacttaaactttttctaggaaaggtatagtaagtatgtctctaccaacttatgaaaagaggtaaaatacttatattttgtaacactctaactattttaggcgtgttagcgtgatttttaaatttactgtgcagctcgttgctaatcaacgaggttatcgaaaatcgtgattaattaaaatttacttatttaattaaaaacataaaatagcttacatataaaattccgggatctcatttataaaagcatttacaaaaattttactgtacatatacaaaagtcctgatgtcccaaagatcgtacgc

SEQ ID NO: 113345 - DNA, 7352 bp, Cannabis sativa
  modified_base (27)..(44): a, c, t, g, unknown or other
  modified_base (7303)..(7308): a, c, t, g, unknown or other
taggatgttaatcaaacatacttggtnnnnnnnnnnnnnnnnnntaaaatatttccaacattaattacttctaaagaataggtaaatatctgaagttgaactcctacttttgttggttgttagagtggattcgtagctaagaatgagcccttgtctttccagtgtgaaagttgtagaaacatcaattgtggctgccaatatggaagctagccgaccaaacttttgtggtgggcaaggcaacacatgtcattccttggctagaccctcctagttggccagtttattgtatctccattctgcttgatcactttgtcccttcatcaattggtaaattatccatgatgacttgattcacctattgacaggctgtactccacgtgtcattaatcttgcctatgtggacatgccacatcatgtgggaaaaattgggataacaacttacaagctgtgagaggtgatgtacggtgtagaatcttcctagctactttggcagaggctgcccagtagtggtacttcaaattagctctggggaagttcagttcatataattctttcatgttagaatttcatacacaattctcctcttctcagtaactctcatctcacttagaagacctggtagaagtgaagcaaatagtaggagaacccttgagagcttacatcaatagattcatgactgaagctacaaaattgaaaagattgattgaggaaagaaggctagtcgcagtcttaggaggcattgaacctctaggagaactatggaaagacataaaaagacttactgtagggtcgatggaagaattcttggatcatgcagatagatttataaagctcaaagaagcagtttggcgtgtagacaacgttggacaaaagaaaaatcaacaacacaccactgcaaccaatacatttgtccagctagaccaaaattcacaaaatcacaatagctcaaaccaaggtaagaggtcaaataatggcaacagatagggtaatggaaagaaaagcaagttcaatggaaactccaaacaacatccttgggattgtgtattgactttaccgacctcaataaggcgtgtccaaaagactgttttgacttcactgacctcaataaggctagtgtgtattgacttcaccgacctcaataaagtgtgtccaaaagacttttttccactttcaaaaatcgatcatcttgtggatgtaacagccaaacatgaaatcctaagctttatggatgcctattcggggtataattagataagaatgcatccacctaactaagagcacactaatttttccacagatattggtttatactgttataaagttatgtcatctagcctcaacaatgttggggctacctaccaaaggttagtcaacaagatgttcaaagaccagatcaggcgtaacatggaagtatatgtggatgacattctcatcaaatccaaaaaggctagggggaacataaaggatctagatgaatgcttcaaaatcgtcaagaaatacaacatgaaactcaatcccttaaattgttccttcaggatcaactcatgtaagtttcttggattcattgtcaatgctcgagggatagaagctaattcagagaaaattcaagccctcctaaatatgaagtcgccaaaaagatgaaagaagtgcaaagcgtaaatggttagatagtcaaactaagcagattcatttcaaagtgagcagataagtgtgttcctttcttcaacatcctccaaggtaataagaagtttgaatggacagaagaatgtaagaatgattttcaagctctcaaaacccttggagaagaaaaattaggaatctaccttgcagtcactgaatacactgtaagcattgtgctaataagcgaagagaacaatgttcaacatctagattattatatcagcaaaagactatttggggttgagggttggtatcccctgattgaaaaattaacttactgtttgatcctagccacaaggaagttaaggccttacttccaagcacatccagttcgagtctacaccgaccaacctgtacgccaaattttgctaaagcctaatgcatttggatgactactcaaatggggaattaagttaggatagtacgaaataacttaccaaccccgcacagcagtaaaagggcaagccttagtagattttgttgttgagtgcacaggtaaggaggcagacaactctaaagataatcttgagccagaaggtgaataagaaagagcacccccaatcaaaagaaaactgtgaagataaactaatctggaagttacatgtgctgaataccttgaaatatataatgactcataattagtggtaaatcatgtcctgtgcgaatgcacagctcaaggagaaacaatggtggcatatttcagtaagatccatgacctgcttgcacaatttaagggatacaaccttaaacaaattctaagagaagaaaatgcaacagttgatgcactggcaccgctagcaagcaacacattaacaaacaaaaccaacttagttccaatccaatttcaaaaagaacctagcatcacatgcacggaggaaatcaaaatgatagacaacacaccaaactggaatactcccatagcagcctatcttaaaactggagaccttctaagcaacaagaataaggctcaaaaaatgatgagaaaggttgcatgatacaaataatagaaggtgtaatgtatagaagaggtttctccatgctatttttaaggtgcataacaaataaagaagttgcacggctcttatctgaagttcatgaaggcttttgtggtaatcatgctaggggcaaagtttgtctaagaaaataccaaggtaaggttatttttggccaacgatgattaaatattcaaaggcacatgtgaaaaaatttgacaaatgccaaagattttccaaaatccatgaagcacctccaaatgagttagtgcaaatgcaaagtccgtggccctttgccatatggggaatagacttgatcggacaattgcccaaaggaaaaggtggagtacaatatgcagttgtagagtagattactttaccaaatggatggggtcgaaccattggcaacaataacatccaagaaagttttggcttttgtggtaaataaacatcatatgttggtacagacttccacaaaaaattgtttcagataatgggaaaacatctgacaaccagatgttcacaaacttctgcacaacacatggaatcatcaaaagtttctcagaagttgcacaaccccaaacaaatggacaagtcaaagtaatcaacaagacattaaaagacaccatgaaaaaatggctcaaagaagccaaggggaactggctggaggaactaccaaaagtactttggtcgtacagaacaactgaaagaacgacaaccgggcagacaccttttgccatggcctatggctgtgaggcaatattgccctttgagttagaacctccatcccatagaaaattaacttatgatcaagagactaatcatgccctcctggcagaatcacttgatgaagttgaagaaaaaagagatttaaggaatctaaagctacttgctcatcagcaaaaagtggctcgatacttcaataaacaagtgaaagaaaggaaattttttgtgggagatatggtactcagaagagtgatcctgaacacaaaagacagtgcagcatgagtgcttggacctaattgggaaggaccataccaagtaactaaagttaaaaaatctggagcatataaacttcgtcggtatgacaaaaacatggaaatagttctagtaccaaggtactggaatggtgaacacctaagaaaatactagcaataagtgtgaaaggtatggggaccacacaagttgcacaatgctcgaacaccactcttaagtggtggccttctgaccactttcaaagtaaaaactgttcaaaatcattgctcttaagcaatgtcttttggatggattataccgttcaaatgttttatgtttaaattagataaagatcatatagatcatgtaatagcttttataattcaataaatgtacgttactatggtaacaacacatatcgaccaataaataaataaagatattaattatcattcaaattgtgtcaattttatgtcttttttgcaaattatagcaagttatttaattacctaaaatgcgtacaaagggtttgcctaaacctaaaagtttggcagacagaattaaaacttgtgaaatataagtgaccaagagttataagttcgctcggtcacttgggggcaactgtacccgtacaagcattggtaaaaaacaagctcaagcaaaaaattaaattcagatttaagggaaaatattcatattaggttaacaaagcaaaataagtctaagattaaaagttgtttggccagccaattgtcttaagtaaaatgaaatttttttccaagtttaaaagccacctggtctgccatattgtactaacaaataggcccttaggacgaacagatgaaaaaagttttgaaattttactccattggagtctcaagttctttatattgatcaaatgaatcttgagcggtaatagttgaatcttcacaagtaaggttctgatgctcttggatggtagaggagtctttattggtcagctttgcttcttcctcaactttttgtgcctcgcaaaagcaaagaaagctagtacatagttctcctttgatatattcaaagttggcctcaggattttccttccagaactcatagaaaatgtctagggaagattttcccaagctctaaacttccttctgagggcttaccgctcagcataagaagtgacccattcagcatcaagagcttcctacaaggcatttttctctctcgtcatctccttaaccttcgcttcctagttttgaaggagggtatatccttcatggcattcagttccttggtcaccgcttcaaggtcctcctcgagcttggttatggacgatatgtctttaatatcttgccttagatcttcaatgatcttgtttgcagcaacaatttgcttgtttaccgcgcctaactgaaaaactctttggctcgaccttttttttagcatcctctagtgcctttttcagttcgttggtagctgttgtggcctttagagtagcaaatttagctcaagaataagtgtacgccaacttcagattaacctacacaagaaaacaaagttaaagcctgtatagagaaaagcctgtataaagataatctttaagcaaaacacttactcgggtgacctctttcaatactctatcgagcaaaaattccactcgcatctcctccacccttatgagtttctcatttacctcaagcatcacattgtcttgataaaaactgagtattttttcccttcttagtttctggctcgagtacgagtggagtgcctaatggccttagcagtctgggcccctcagagttggcctctttggaaattttgaccaaagtagtagaagcttgagacttggtattcttcttggtcggaggaacaactttaggagcagcatcaggaatctctgaggagtcagtagccaaactcctctcagtattgacctgagtagcttcaagcttggagcaatactcttaggcacagtatcatcaacttttggacgtttaatcggagacttctggctggatgcatcgccttctttttcttcaaagcatgcagcattctctctaacatgactgcattaaaagaaagaatacttgttaaaaacataatcatacaagggtaaacaaggttaaaatagaatgataaactaccatgtacatcgatgggagcaccctcccgagcaagtagtgaaggggcgtcctcatcagaagaatactcctcttcttcctcgatcaccatgtcctttccctttcctaccacctagaaagtttgacgatcaacctcatcagtgtcatccctaatccttatgggcccctcaatcggtacttgatcactctaggaagtcttcttcttcttcttcagaaccgcttgcttgattgtaacctcctcagtcactcgcttgggctccttaacttcatcagacgggtagagcccatacttaatgaaactagcctcagtagccaagaataaaatattccaagctaactctggaagttcaagtatttttgggctcttatccgaagctccacggtaaaaggggacaacaataaaatggaatatgttggaaagtgatttgattggaccttgacaaaacagtagtcctctacaaacccccaatcttggacacattcgtgtttgtagtgtcggtcagccactcacactcattctaggaaaagtagaaatacccagacctatttttcttggggctggattttagaaaaacaaaaaaaaaaaagccaattcgtgtcatgggcagatggctgaccccatccttgggaggcatatagcatgaatagtgcagatagatactttatgcccttgggggtaagttgggttggacatatgtgataataattggctatttctttaaagaaaggatgcaaaggcaacaatgcaccctgtttggcatgtggtctcgaccatgcatataatccacctctaggatttgttgctaattgtcctagactaggaaggaacacttccaccttctcgaggatacctttttcaaagagattagtcaatctcttgaaggttagcacagacggtggtgagacccaccgagcacccctcaaacctcgactgtttgaaggtcgagcctttgtatattcttcctccacgtaatctcatcttcttcttcttcctctccctcggccttgaaaggactggtagggcagacctcaccctcatccttaacctctaggacttcgatgtcccttctagaaactacttcatcctcactcaaaggcctggcttgttctacccaactgttgtaaatagtcaggcaaggtgaggatgaaatgagaagaccttgctcatagttttcttggtctgtgtcgtcattctatgtctacaaacattaagttttagatgtatgccttgcaacagtgatagcaatatcagctacggtagtactcctggcagatggatttgcttaaccctcttgaagtgtgtctacaccagattagaccctatacgttcaagaagaaggaagatagtgtctccaacatttcttcaattcctaaataaaatggtcgtacccctctccacgtatctaatcgaggtattagtggtgttgcacctcgggctctgggaactctgtatggtcactactcacttcccaatcctcaaaactagaatttaaaagattatcaccgaatgaagtgttgggttttatgccnnnnnnaaaactctatttcaatgtaatcaagattattcaatatcaataaa

SEQ ID NO: 113346 - DNA, 2199 bp, Cannabis sativa
  modified_base (2108)..(2110): a, c, t, g, unknown or other
ttggatccaaaatatgaaattcgcacttagtgcggattggatgttgtttgactaaaaaagtacggattggatcggatgaacacccctaatagacaccactaatattcaatagtaatgctccccatatggtcatagttttaacaaaatctgatctctcaatacatccccatacattagtgcaataaatagatgtgtatatatattagtaatatagtatcatgatcatgacatattttcaaagatgaatgagtcaaaataattaataaacttaaaaataatatatgatagttgtgttgtgtatgtgtatgtggaaaatgatatatatggacggtgctcagtttctcatattgtataaatatataaatagatacaaatatttattaatttatacacagttttgaagagaggaaaacaaggaggggattgagtgataacaaagggcctaatttgggtggagtgtgtaagtgtaacagatttagagaagaaaaatcataattgcatgaccctcaaaacatgtgaaccatatttctgatccattctgttgtaagcattatcataaatcacaatttatatgtaatcacacatattgtcaatttccatcgcccactatatatactcaacagatcattttcctatttaaccataaatcatgtgccacttatttatataaaccgcctgccaataatctcatttagcaaatatatcttcacactacactcacattgcattatattatatatattcatctcttttttatctctttggtacttagtgctactaaaccaataaccacacaaatttagaagaaaagaaaaccccaatttctccacacacacacacatatatattttgtaagagtaataatatgtgtacttgtacacaccttttataccacatactgtatacatatatataagaaatcattctaaccaatcaaattcatgtacaaaaaagaagtaatgtcacctaaatataagcagagaataaagagatcgtaattataattataacgttaacttgttatacgcttaccctactcatttttgttttaagcaaggttacctgaccctactcattatgctaagataatacccaattttaagttttagttttaatgtggggaaagaaatataaatttaatactcgatcgatatatacatgttaaatatgacgaaagtataaagtgccagatcctattacctgatatttttacctaattagtatatgttaagatttaaacttttttttttttatttattattaatttatagcaacgttagcaacttctccaaaactaacaaaatttttatgaattgtttgcttgggtttctcatttttaaattcttagtcattagaggttgtcggttttgtctgactaggcccgccggctctccttaggcttaagtgtggcttggtcaggatttgtggtaacgtgattaaatttttactactgcgattaattagtcttgtatttgtgacatagttttgagtgtcttttgtttatgtgactgcgattatagtcttttctatgtgatacgaatttatttcgttttgtttcattgatggtttatcttctttgtttttcaatgactcaccttcaaatcactgttaatggttgagaataacaagttctttaaggctgatgatgttgtatttgcacaatagttgagtgctcaaattaaaaggttgaatgaacttgctgcaacattttttaatgttgtgtcttttgaacagtagagaaaattgaataaggtgttcttaaagttaactgtgatactacaatctttttaatttgattttattattttagttttttttgtcaaataatccatgaatcgtgcagctgattggctagttctttattctaattctagtcatgtttccaataaaaaaaatattacgattaagttggaggttattattataattaaatactattaataaaattgtatcatttattaaaaataaatgaaagaaactctaattaacgattatatacttattatataaaatattccattaaatgtatataatataattataaaaatgtagggaaaagatgtatattaatgtgtcttatgactcttatctatatatatatatatatnnnaggtgattgttacgtgccaagccacgtagtgttagttttatttaatattttagttttttattttaattaataattaaaatagtataatt

SEQ ID NO: 113347 - DNA, 5100 bp, Cannabis sativa
ataagccacgtttcttttttgcaataactgtgtttataactaaatatttattagctgtttattttgttgaatgttgatatgaatttgatgatgctcattttcagagatctttccgagaatagcttcacaaataatgttccatattcattttctcagatgactgaccttcaatacctgtaagcagaatttgccttgtgtttgtataaacttgtaggtagtagctctcattctgtttttgctggtggatgcaggaatcttgcccataacaagctgaatggacaattgactgacatgtttgggaaactgcctaaactcaaagacatgtgtgtattactgtgtttttttatgcccttttaactattttttcccctgcatcaacttccagtgaagttggcttctgcttttactcatagcttatttaaattagatcggagcttatttctatctgtttctgtttgtctttagcttgaattccttataaacagctatactattgtcgatatattctttgttttaaatattctctatgaactccaagtgatgaatcacaatctataagttttgtgtgtaggaacttcaatgagttttaaatggactgaaacaataaatgtaggtgttacgtgtgaaaattatgtcgcgataactaaaattgttatttttcccctgtgaaatattgtcatagtacttcgttttgtgtaaaatgatatcattttgaaagaaaatacaataggcttggttaagtacttaagtttcgttgaggaagatgattttatgcaaaaaaatttaagcattagactgaattggatctgatatgttaaccatggagcttacatgctctttacttttattttatttttgtcctgtaatctcttttccctattttgttcatcttcttccttatgtagcgagtattctgcatagattttggtgttaaggatcgcactagtctacagtccttttagttgctttgtgtacttacatttcatattatatacatgttctggtaacatagctacatcttttgtgcccttgcttctccactttatgtgagatgttcttgtatatcagcaaatttgtatattgactggtaacataatggcatacagggatctttctttcaatgcattgacaggaaatttgcctcagagttttgaaaaattgtcaggcctcaacaatttgtaagaagcaaatacattaagagataactttttgaatatatagattctgtgttactaattgttctatgttgccaaccaatacaggtatttgcagaataataaatttaccggtccaataaatgtccttgccaatcttccccttgatgatctgtaagtagattgttggcacaatatgttaatttcaaattgttaggatatattgagcaactctacactctttcgttgtttgatttttggcacttgcatatacaaacatatatttgtatcttttttttttaaaaaaaagaaattactattaaaataattgcatatgctcttatgaaaggtgccagaatgttgtgcaatgttggttgagataaaagataaacagcatttagcttatttcagattaaagtgtaagataaaaaattgaaaaaggaaaagagattgattgttggataattcccttttgaccttactaagatgaacagttttgtttgcattgagaatcgtaccaagcttatagtgtgggacaggaaaactcttaattgtttctaagcagtgttgtgcatactttaaaattgtgtaagcttaactatattcttgtctagtattgttgcacaaagcttacccctcatgtcacttgagtacaaatggctttatgcatgtttatgttagtgtgggaacctggattttgtctcaagtttttagaatatttttaggggaataatttgcatatatggcagtgatattctgattaaaataagttctataagatgtacttagttcaagaagctcatactaatgcgaaattatacctctaatggatatgagaacattgtgaatataatttctcaatttctaactgacgcagaacaaaatgattatttttctccttgaaatgatggcaggaatgttgagaacaaccacttctccggctggattcctaatgagttgaagggcatacaaaatttaaagtgataatattcttcaagtaaatatattttaagtaaaatgtttaaaagattgcgtctgacatgacaatttttttttttattaaaaaaaaacaattatctataggacgggaggaaattcttggtcatccgggaaagctccacctcctcctcctggagtacactcttctggtaaaagaacagaaaaaggtgacagtaccaattctattgctcgtggattaaccatagctgggatagctttgggagtactagtgctgcttatagttataatttcactcttttcgagaaaatcatctagacattcttcacatttttatgacgaggagaggcttagccagagaaaatctttctcacttgcatctcaggagttatcaaaagacttgcgttccgatatatgcaaagattataaaggtaactctgggctttcctctgataattcttttttttttttttttgtttttgctatgaggcaacagaggaacagaatcaaaacacaaaagtatttttttttttttaaaattaaatgttatgaaattggattcgacaagagcttaatgggaaatttatgatagtgctattcatttcatgaatatattccaccaactttttctggaaggtctcttaaaaggtgaatactcaagtattcaaacatacctaaaatcagcttctgtttcaaaatcagaaagctactttctaaaatgcatgcttatggtacatttatatttcagtaatgttctataactaaagaattaaactctaattctgtcataatactgtaatgattagaaattgcttctttgtttcaattctgcttgagtttttgcattaagattacccttctctatgtaattatcttatacttacttcctggcgtcatagttccaactaactgaatgaattgtttgtcgaagatcttaggtcatcatctacttcaattgagattgcctcctttcaaaagtctccttcaaacggcggtagaactgcacatacttcaggaaagaaatcatttaatgaggctgaatttgtgaatcggttgaatgctagaagaagcatttctctccgtgctacagctcacccactaggagatttgcagaatgctactgctaattttgcatcaggtcgccttcttgggcatggatccattggacgtgtctatagagctaaatatgctgatggcaaggtttcttttgcttttataatttggtgatttctacttataatattgtttaatgttgtgcattctttcctcattaggtatacccactagttactagatgcgtacaaagttagtctgtacctaatataggtttaccaaggttcacattttgttttggtaccgtaccgtttctttatgagttcattatggtagaggtgtggccaatcttttttcagccttttgacgaaccatatactttgataacatttgctcaagaaagtggtgtttgttaaaagtagtgagagaaaactaattctgtctaattattaggttttggcggttaaaaagattgattcctcgctttttaaaggcggaaaatcagacgagttttctgaaattgttagcaacatctccaagcttcaccatccaaacattgctgaacttgttggttattgttcagagcaagggcataatatgttgatttacgagtatttcagaaatgactcccttcatgaattcttgcatatgtctgatgagtacagcaaaccactaacttggaataccagagtcagaattgccatgggaacggcccgagctgttgagtaagtatcctaagtttttaactttgttactagtaaactttgataatagctggtatataaatcaccaagaatatatggaattaaaggatcttgtgtgtctgtttagtaatgtttccataattagttggtctgcacctgattgtccatcttcatgctgccaagaaaaaaaatcttacaactcacaagcacaactgctagttattgttgtctctttcttagtattcttttaataatatcatcatcatatatattttcatttcctattttaaaaaggaaatctattgtctttcttaggttcctcttgctctttaatagtcatttctgtttaactttattgtactagtttgcataagaaaaggctcaaagatgggttgataggttcctttcgtatttattagttttttgtactttctgcatgatgtgtttgagaggttagtcttagagtcaccctaagtttatatttttgtgtccattgcatgattacggtaatcttccaagttggttactttggtatcgtcaataactgtcccgtttttgtattcaggtatctccacgaggtttgttctccaccagtaatacacaaaaatatcaagtcatctaacattttgcttgacgctgaactcaaccctcatctctctgactgtggcttggggatgtttcatcaggttactatctgaacattctttttcatgtgaatccacattcttagtatactttgcaagatatagcttggtataaatgattttcagatgttgcacataacattcacatgtgtattaattcttcttctcagaatttctgggttcctatcaaatataaatatggttccactacaagtaaatgcctgacttagctattatgaaaacttattgctttagaaaatgtccccagcagtagtgtatacctcatcaagaataacaagagttagtagtctataatgataaggatgatattcctccacgaggaatgaaattcctatgatattgcacaatctgcttctcgttagatacagatttccaatgtctcatccaatcttgttttatgctgtgtaatagacacctttaaacagagtgaaagtatacataggcagttgaaaatatagaagctgttgaaaactcatggctttgttaattaccaactgtctttaatgttataccatgcaatcttgatactcaattgaacagatattattacctttttttttttttttt

SEQ ID NO: 113348 - DNA, 3474 bp, Cannabis sativa
aattgagtgtagattttgtttttacttttttataaaataatgtaagctattatggggcataggaatttttaatgtaattttattttattaaattatttttacgtaaaaattatacaatgtaatgttcattgcatgtgagctcggtttctaaccatgaaacccgaccatgcatgcgagctcaggaatttttccccgaccatgcacagccacccgagtggcttcgagtaccgtgcccacgtaagaaatccatgcatgtgatgcatgcaagtgggacatgagtcccttgaagagcaaggtggttcaaccgccattatgactttcacaatacaaggaccttcaatcctttcttgttcgacactagcagcatgcatgcatgccagacgtccgacgtccgtgaaccatgcaagcacaactcgtgagggtctgggtctcagtcaacccgcatgttgcttatctcgctctgccccatgtagcacctgctcctctgcgtggcttccatggccaccgtaggccatggtggttgtcaaagttgcccgccacagtggtgccatgtggtggtcggtcatatcccctaatacccaaaatattaactacttaaatataaaattttcacacttaacaatatacataaaatactaaaataattataaattaaaacttatctttcaaataatataacaattgagagaaaatattacctagttatatgaataagacagaataactataaaaagatcaaaatgaaattcatctgaaaaaaatatttttttaaaaaaaataataatgaagggatggacaaaacacaaatgacaaaatgactaaatgagtgagcaaacccactctttggtaataagctaatagattattattgttttttgagaaataaatgaggacatttctcaatcttggaaagtctggaaacccagaaatggctttcctttaggcaaaagaatggatcattttttggcttttgttttcctcatttctcttctgtcattttagacttgattacaaaacaaactgattatacgttcaaagcgaaagaacaacaaaaatcaaaacacctaaaaaggatgaacacatgttttgatatccttaatctggcctatctaactttgaaattgaaaagaaagttcagttcgtgaaagatacgcccatgcgagatcagtcctgctccagggataaatccgatgaaatcagattattttctcctttcgaagtatcttcatgccatttcaagaagccttcctcaagggccattctcatccactgatgccggcatcgctccatggcttccggaatggtcagccagcttctttggcgagtactttgctctggccaaaactggagctcctcctttacaagcaaagcaaacatggcagctttgcacaaaccttcagggcaaaactcatcttgcagggttttgctcttgaaactgtagtaacccaaaaagtgctgaaacaaacacagccttaataaaataaaaaatatatactggccaaataaatcagtcgaaaacttgatacggaaaatgccttttgcagaaagcatgaagtcagtccgatacttctgtttttgctcaaacaagtaagaagatcttggtattacagtaatagtttcatattttttcacaattatgaggcatgaagtcaacattgcaagttgttaggaatgcttataagagaaagagattgcaaatttccatgaaaagttacagataccctactgataaagattttgcagctatcgtaaaataaattcaaaaccctactttttcaatgatctatgacatactttcccgagactaatgttctgctaactttagctatcgtgaaaaaactatatctgactaactagcagtatgctaaaagaactcccttcctccaaccagtgcaatgcccaatgcaaatcctgtttgtgtgacatggcaaaccaatataatgtaaaaatttacatacaagtgaagacaacctaatatcgaaaatctataaacacataatgcaatggttggaaaggatattgtgtcactgtgtaagcatttggtacacactttatgtgcacatatcattactcatcctagatataagcaccccaacagaggggaaggggttcaagatttatataggtaaaaactttatttttatttttttgaaaaaatataggtaaaaactttattaaatggatgcagaccttcataccaagatttatttaggtaagaacttgcaattctcaaaaaggaaaagatagccaatgccaattataacctttttatataattgagccaacaagttgaaatataggattcagtttcttcatttatatttcattcaacatatagaagtttcactacacccacactattcaataaataagttctttgctaattctcatttcaacaaacaccaataacatgcacaaacacaatttatcaatcatgattcattaaacaaaagagagtcattgattcttaccaataaatcccctctaactccagcttcttccacggcttcacgaactgcggcttgctcaactgtttcatcgttttcccagccaccctatgttaaatcaaatgattactagcaaacaaaaacaaaatgaagattttctcacaattcttccttttgggtagttattttccaaacacagaatttcttgcagcaatagagcttaacagtttttctttagactactctaaaggagaaaactgccaaattgggactaagaagaaaaatactatttaggtcttcaatacaaatccatcagaaccatttgtcagtttctttggctcaagtatcaacatatgcaatcaaatgtaatttctataaacttatttatgtgaatcatggaagttttaaaaagtttatatctggtgtagctgtataagatgaatagtgctcataataatgaatacaaattctttttgagagaaagatactgttgtaaaattttcctcaactctcaatagtttagggaaataaggtacaaatgctctttggttctcacatattaccaaaaatagagcaggaatacattctgtattcctgtaccattggatgccatttaaactttatccaaggaacttcaccatgggaatacttgtggaacaaagtgttattaaatacactgatccaagaaaatttaacaattagtataaccaattaagcatggtgggctgcaagcaagctcttcagaattatggctttttatatttttgaagcatggtgctgttgattgtaaacaaagacagaaaaaccagcaccagaggtgttaaataacaggtcccagagccagaaaggagaagtaattcagaaatggatcagtcttcctcttcctatttcctttctcttacattacatgcaaacactagactgccaatcagataaaagagcaaaataggtttttaccaagtctagggatgtcaccattatgcaaaactaaaagagcctattctctttttctttcttcttttttttt

SEQ ID NO: 113349 - DNA, 2563 bp, Cannabis sativa
  modified_base (26)..(46): a, c, t, g, unknown or other
  modified_base (1380)..(1390): a, c, t, g, unknown or other
aaataattttcataattaaacataannnnnnnnnnnnnnnnnnnnnaaactaagcggtctttacaatgacggttgaatgacactacacacgtgacatctgccttttttagtgaatacttacgtttctttttggggggaaacccaaaaattctaatttaaactattttcagcctttttaatcacctatataagggataaaaattggctttaaattcttttagccatttttattcttgcatataaccagagcaaaatctttctttttctctcaaaaccttcgaggaaccctttgctagaaatcatttactgaagctgtccgagcaaactcaagagtctacaaacaatgagtaggttacattttcttctctcttatgtaatttcctttaaaatcatgcattatttttttcgaaatttttgctgtaaattatgggtccttgagtttgttcttgactgactgagatttagaggacactaaggctttttaacttcttactagtatacgcgttgatcttttaagtttctaatttctcgctattttggcttaaaattatctaaaattacccattcataggcttctaaatatcaacattcttttaaacttttgggtttagggattttattattggaatgaaattccttctttttttaatcgaccttatcagcatatcaaatatgttttgccttctatacctgttgtaacaccctagtaggttaggcgtattatcatgatttaaagttaattgtgtaattcattgctaatcaagggtttgttggataacgtgtttaattaaaaatttacttaattaacttttaattaaaataataaactttacataaattgggatcccgtgtttaaaaagttacaaccatattataaattattaactacaaaagttgtcacctagcgactaatcaaaatacagcctgttgtcttgaaaatcgaatactccaggtctaatcgcctcgatatgtacaatcttcatttgctcgcactcacttcactgctgcccagacttagctttgccattacctacacatgcaaacgataattgtaagtcgacagactcagtaagaaaagtatatttataacataacataaaccagattataactaggggctcatacacccaatcataaccctatctcgcttcccacgcgtactgagtctagaacgttcatacgttaatactattgactagaatattagcctatactcggtactctagtcataccgatgtgatagcgtcaatcagtatttaagccaaacatacaatcatcgatattcaatacagctctatgtatattgatgtcgttattttaatatgttatctaagaggcattcataaatatacacgttaaacatgtaatcacatatgcatnnnnnnnnnnnaatcttaccttgattctgaattcacgtgtgtcggtcaacctgagtggaactgctgctagatggtttacaagcacttaggtcacaacatacgcaaaactaataagtgataagctaaatcacttttcggggacttagactcaaaactaaaagttttcctatcgataactagcatgactaaaacgctaaaaaaaatgaggtttcaggaaaaactacccaaaaaaacggcagacccccactataaaaacgacatgttgtttttctagatttttttgcctaaaaaaacacgaggccattttcctagaaacggcatgtcgattctacagcaaaacaagccctaaaacgtaaaactcaactaatttgaatccaaactttacccaaagctccagtacacctaataagaccataacaaatatattccaactaaaactttcatcatcaagctactaaaaataaaatcaccatcaaagaatcaagtttgagctttaaaagctcaaacaaacttggttcaaacctgctacaacccataaaataattcaaacaacctcaatagaacataaacaactcaattctaatcaacccaagacccaatagaagctagaagtcaaatttgcatgttgaaatcgaactttttcttgaaaaataaaagagaaatgagcaaaaacttaccttgagctgattctaccctaagctacaataaattctgttgaaatccctcactcttgatcagaaaaaaattgagaaattacttggtttctcttggtgctcttgtggccgaaccatagagagagagaaaggacaagggttgtttgatttttcttaatttttgtttttattttctaagtgttatcaagataactcttttattcaacttattattattgataaacttaaaattaatcaatttccactcacaaaaattaataacaaaacctaaggtaaaatgacctttttacccctttcttcaccaagaagtaacttaagactttaggggcattttagtcaaaactataacccagaataatcctgacattcccaatatctaactatattatcctgctaaaaccaagatactaagctattagagaatgtgttaaagaaaataaagtggtcattcaacacattagcattgaattgatgattgccgatcctatgacaaaaggcttgccacctcat

SEQ ID NO: 113350 - DNA, 3162 bp, Cannabis sativa
aaaatgactgaggtagacttagacgaatagaaaaaagaaaaatcaaacacaaacattgtagtatggtacctacttattggaccatatatctgtattggtattaacttatttgcataaatcatgacaatatgagtggtatgaagatgcttggtataataatcatgacaataagatttattattggaattttttttattataacaagctattattatttattagtcctaatgactagtgttaaaatgaggtaacattgtataagaaatttgtagttgcagatcaaagtgtatctcaatgttgaaataggataataagtgtattattatagaatttaattttgttattcatattcaagccaaaatccaaatttgcaaataaccacttaatcttcctatttattatagaatttctatctaacttctgtttttgttatttatagaaatacttgcagttaaagtatttaatttattaagtttgcagcacttaaatattaatattttttttcaaagaaaaagtatctgtttgcacccccataaaatgataagtacatcccaatatttttaaaaataagtttaaaataatttttaaaagccactataatatttttaatttttttttctcacattattttgtattaatttcaatacttattttaattttattttcatattttggtaaattatgtataattttttttagtataatttcatattttttttattataatatttaaaatatgatttattttttatagatatattttttaagaatatgaactggaagaaagaatttaaaaaaattaatataattaaagatacatattttaggatgcttctataatgcatcctcttaaaaagaatctactgatgcaccctacctgttttggtttctagaagaattttttaatcaatttttttttttatatttatgtatgttatagttgtttaagacatgcaagatttttagaaattatttacaaataaaattcaaacagtctattttacatgcgtataaaataaaagagttatctgtataacagacaatttgaatcttattttcaacgtgttaaatttttttaaacttttttaaaattttacaagatatcttaaataactataatgtaaataattatgaaaataaattaggctaaatttttttttttctaatgtcgaaataaataagagtgattagtgcattacttctaaaaggatgtattgtaaaattttctatattgaaatgaggggtatttataaatttttagagtgaaataatattttttacccattaatttataaatttaaaataacaagaataattggacatctctccattcactattgttgtcgttgactctgattctaatctcttctctctctacttagtcaataaacccttcaaagttcaaactcactcctttctttcaatgttcaatctctgaagaaagcgaaaaagtttattcagctaagctaagctaatctacatcatcatgtaagtatgaactaatccatttattttcataatatcctaaacgaaatttaatttattatttgaatgatttctcttgtactgtgtttgttgtaatggttttttttttttttttttttattattattttactgttcttacagtcaacaatgtcattttcaacattttaacaacccgcctgaaaaaaaatcaaaactttcatcaatgggtgaggacagaatttcgaaactacctgatggagtgatcattcacatgttgtcgtttctcccaactaaagatgtcgttcgaacatgtcttctttcaaagcgttggaaactcatttggtattcagttcccacactttttttctccaatgttactagtcctgatctcacatggtgtttggatatagaaatgttttacaattttgttgataattgtttggaacacctcaaaaagggttttgttgttgattcaatcataactagttttaagcttaagatgtttgattgttatcatagaagtaaggctggtcttttagataaatggttagcttttgttgttgagagtaaagttagggaaatacatcttaggttaaacctagatatggatctagaaaatttcgatgagtattactattgtttacctaaaatattgcagagtgcaacatatttgactgttttggagttgaattgtgtagagttggatacttcttgttcatttagttttccttgtttgaaaacattgtcattggaagatgttcggaatttagagactgctgaggatgatggggtagttaagtttttgttgggttgttcttctcttgagaaattgttgttacttgattatgttttcttagttactgatcatgatgttcagtttcgattgcatagtttaagcctcaagtttatggaacttaaacgtacatacgattattataagttaaacattcaagttgaagctgtaaatcttgaatctttggttctacatggtgttatattggatgaaatgaatctctcttcttgcaagaaaattagaaatctctcattagttgactgtccagaaagtcttcggccttcaatacaagctcttatttctgatgttcctcttcttgagagtttgactttgagcaaatgcgatgcagatttggaccatcttaaaatcactagtcaatacttgaaaagtttcaattttaagtactcggatataatcaatgttgttacaattgaatcagctctagatctagattacttttcttatgaaggatatatcaattgtagaatatcaatagattcatttaatttattgaatgggaagatagtgatttttgagcagcaggagaattatgacacaaactggtttaccaatatgatgaaatttctttcgaatctcaattgctcttggaatattgtaagcctacatgttcgtaaagataaggtaaattggtttattttcatttaattcttttctttatttgaagttcatattgtcaatattataacatatattaatttacatgtttatacatttgcatgaaggcccttatcttgccagaaaacttcaaaacgatatgtccttctccgttgcttaactggaagcatctcagagtagttatttccgaatatcgtaagccttatatgaaagtgttagatttgaaggactccttgatgtggatgtcatcttctttagaaacattat

SEQ ID NO: 113351 - DNA, 1866 bp, Cannabis sativa
ggatgctttaattttgtgggatatttgtgtcccttaatttgggacattaccaagaaaattacctgggaggagttccaagatttgtttaatgctaagtactacaatgaggcagttcatagtacaaaaaggaaagagttcaccgagttgatgacccaagggaagaatatgtcagttacgtaatattatacttagtttgatagcctggccaagttagccacaggtatagtacaaaccgatttcagtacaaaggaaaagtatttggctaggttgaatcctgaaatcaagcattatttgttgattactatagatgacacgactacctacgcttggttgagaaggcactacgagctgagggcacagtggaatttatttaggagccctgagggactaaagttgttggtgtggccactactcctcctacctttgattttggtaggggtggtattgactcaacctctaattagaagagaaaagctccatttacatcaagtggcttgagtttgaacaagaggttcttatggaactaaggccgaggtggtcgtcagagaggctcagagagtcgttacacttacccagaatgccctagctgtaatgagcatcatctgggtgaatgtaaagaccgatcttgtcttcagtgtggtgtgattggccattataaaagagactgcttgtagttgaagaaataagagctgaaacgagaggtaaaacccgctccaactagggtgtttgtccttatccaagctaatgccaaaactagccctttagtggtgataggttagcttctagttaacaactctttttactctgtattgtttgattctaaagatacacattcatatgtggcagtcaaagtaattgataagttaggtaggccttgtgactgctatgaaacacgatttggaaccctactacctagcagagaatcagttatctccaaaaggtaaatttagtttatgctaattagagttgaggatagggagttgagtgttgatctcatagaattgggcatcacagagtttgatattatactcagaatggacttcctgtctaagtatgccgctagtagatattgtatgcagaagatggtaacttttcaacttgagggtgaataaccgtttgtatgtgtgatattagtttggggttctcagattctagtaatctcagtgctaaatgctagtgatctattacagaatggatgcatctggtttataacagtggtgttagataccacctaacccgagttgattctgaagacattaaattgatacaagagttcttagatttattcccagaagaacttctagggttaccaccatagggagaaatagattttgtcactgacttggaacttggagcggagctagtttttaaggcacacgatagaatttctaccgcagaactcaaggaagtaaagttacaactttaggaatgcttgaccaaggggtggccagattaaaaccttccttggcaaagaactccaaggttccacaacttccccctgcctcgacaacacaaaaactaaaagacaaggtggcctacgttgctcctatggagctgaagtgtgcagaagaggttcgtaaccactactaggaaaggtttcgggcagatgttggggtgtcactaggtggtgcagatgtccttccacatgacatcctcatgggaaacctacttaaggactttaccaaggtaatcttcatatattttgcttttagttcttctgatcaatgctctgtttggtgaggtcttcaatggaaacctcactgagagtgtcaaaacttgttgtactagccaatttaactagtgagtcactactacaatttagttttttagtgacactatttagtgacacgcacaaaagtgtgggtc

SEQ ID NO: 113352 - DNA, 1186 bp, Cannabis sativa
ataggaataataatttataattaaccacaattttttcacttttagtcacaaattttgttgtgactaaatgtaagattttttgtagtgttagtttaattaataattaaatgtataattcatttaatgtgtacatgttctaaaaagaataaattagaattttttagggcgacaacacatatccctattattaaaggcgattttatagcacccctaaaatttatatttgttgtagtgactaacagaaaacaacgttatatttttgtagcggtgtgtgtaattatattgtgattataaagcaagaattgagcttacgtacttacctaacgagtatatagctcttaattttaggtcgaatctcactaaaatcttccagtgtatttgatcttcttttatcgatttaaatttctatcttgtttttgttcgatttgatgaatgtggattttcaaagaatgatatcatctatttgcatttaacattagggttacttgtagtattcctttggtgatcgaataagtgttcgataagatttaaggattcccacaattatttcttgatttcagtcttaatttgtaaactgttagcattactcagaattagttagtccatctgttaatacagtttataatactgttgtaacaaactctttgccacttgtttcttggttgttttctggttctctttctttctctgtaacaactccttctctatataaataacatctcttctctagacttgctcaacttttgcaagtcttgtgatttctatctttgattgagtcctgttagattgcatagataagttaacattctacataaactcattaattaatataaataaagaattgattaattaattataagtcttccttaaagaagtcttcctccatcagtctttttttatattataagtacttgagatgacttgaaattttatttactttcaaatattaattaaagcaagcagcgctatacgtggaaataattaattaacatgttctaagtttattttatatgaaattaaatgtaataatatataataaagaaggactaaatttattctcttaaatattgactaaacaaattattcaataggaatatatatttatccaattatcatgaaaaatatacacatttatatatatactaggtgattgttacgtggcaagccacgtagtgttagttttatt

SEQ ID NO: 113353 - DNA, 3174 bp, Cannabis sativa
  modified_base (1422)..(1428): a, c, t, g, unknown or other
ttagttggaccaataacgatattgacacataagaaggtgttaggcaccattggtgccctttagcatttctctaattacaccaatagtaatatgacacttaaaaaatactaaacaacaataatatttttggatgattctacaatacactttcttaaaaagaatgtagtgttgtaacctctacttatttcagcatccaaaagaattttttaatttttttttttttcatattcatgcacgttaagtatttaagatatcttacaaaatttgaaaaattttgaataatttacaatataaaaaacaatgctcaaccagtttatttttatacacgtataaattaaaatagttatgcgtgtaacacactgtttgaatgtaatttttggcgtattaaattttttttgaatttcttaaaattttacagaatatcttaaataactataatttatatgaccatgaaaaaaaaattgactaaaaaattattttaaatactaaaacgaataaagatgtatcagtatattccttttaaaaagtgcattgtagaattccactaatatttctcttattaaatatggtagatggttggtaggtaaagcattagacaattaaacttcataaattgacaaaatattagtattgtattcatttttgaaaaaaaaaaaatataggaatttttattcaatataaatgtacttcttaaaatttgtttcatattcagtcttgacgattaatataatatgtgttagtatttggtctctgcaactatatttagttgaatcattgaattgaattgaggatggagagaaacccattccactactaattttttcttctttggttgaaaattccactatatataaatctcttttaattattttattttttgtaatgtctcccatgtttatatatatacaaaaatacataaataaaataaggattgtttgtgttgtcattttcttgttcattttatataatactataattttagttcgttacttgcactataaggtggatacttctacaatgaaccttctaaaatgaatattaagaatagttagttatttatttaaaaattgattattgttaaaaaaatttattctatttcatttatgttatagttatttaaaacattttataaaattttgagagatttgaaaaaatttaatacacaaagttcaaatagtccattgtacatatttctcaggggtgcagatctctcatatctataggtctactaatactcattctcataaattggctaaatatagtctttcaatagatacaaattgtatttggctggaggaaacttcccctcaacttctaattgttgtatcttaactttgaaagtttcttgtacgagagactcttttattttatacgtgtgtaaaataaattatttgaactctatttttgacgtgttaaattttnnnnnnnttctcaaaattttacaaaatgtcctaataaatatctactacgtagatgaccatgaaaaaaattagattaaaaaatgctcttaaatattaaaataaataaaggtacatcagtggatcctttctaagggtgcattgtattatttttctaaaatatattttaagtgtatttggtaataatttgttttttttttttaaaaaaaaaaacaagaatgtgtatcataattaatttttgctttttttattttaaattaaaaaataaaaatatgtttcctaattgttattttttatttaggtgaggaatgagaaactaaggtgagaaaaagtgagtcaaggtccggcgctgagggtcgggttgagggtcgaagttggggttttgagtctaagagcacgggttagagatccaaattcgaggtttgagtccgagcacaaatttgggatttggggctcaagaagtacaggccagaattagggggtttgaggccggggtctggagcttgggctcgagtttgggtatgggggccagattctaagtgttcttaacacaagtgataatgatgaaacaaattattttttttctaaaaaaaaacaatgaataatatcatttaaaatatcataatattatatagtataaagtagtaatgtaaatacagatcgagtttttagacacgacacaaattcaacacgagtcagaagacatgagtacgatcaggcacgacacgacacgtaagcacaaaatagactagttcgaaagatacgacacacgaaaaacctgaaaagtacgatatctaaatgttcataaaatacctaattcaatctacataatccaattcaatccgcaaagtgcagatactcgcactagttcgacatctaagagagttttttagtttattttttttttcataatcacctatattgtagctatttaagactatttgtaaacttttagaaaaattttaatagtttataatgacgaaaataaagtttaaacaaaataatcgtgcgtgcaataaaatacataaatcttattaactttttagaattttttaaaatttaacaaatgatactaaataattataatacatacagtcataaaaaaataattaaattgaaattattctaaatttctcaaaattttgcataatgtttaaaataactataacgtacacgactataaaaaaatttaaactaaaaatttaagcagttaggggttgcatcagtacacctattttaatagggtgtattgtagaagcacccaaaatataggaaaatttgacaatacacctccttaaaataggtgtatcgatgtactcttatctattttgatatctaaaaaaaatacttagtctatttttttatggtcgtatacattatagttatttaagatatctcgtaaaattttgagaaattcataaaaatttaacatttcaaaaacagtgtttaaagagtctgttacatgtatgatttttttattttatacgtgtgtgatatagacgtttcaaacattgatttatatattggcaattatcctaaatttcttaaaatttcacaagatatcttaaataactataatatacataaactaataaaaaaaaattaaactaatttttatttttataaataccgaaatagttagaggttattttagtatacctattttaataagggtaaataccattttgaaccctctgttttacaaaagttactaattggatcttgtgtttttttaaatgacaaaatggaccctgta

SEQ ID NO: 113354 - DNA, 5084 bp, Cannabis sativa
  modified_base (28)..(35): a, c, t, g, unknown or other
caatgaataataaaatatttttgtcaannnnnnnngccaaaaatggaattaacaatcaacaactatctttgtacaaccaaatagcaccccgaatggcctaaaatgcaaaaaagctatacatttatattcttttaatctatataacctgtacagactatacgcatttgactccatctacaacttttgaaaccaattggtatcctctaaagatacttttttcggccatactacagcaactctgtgaagtacatctttttttattcgctcgatcagtctttctacagtcggtttggtcttttcccacaagctgagatttcgagctttccaaagtgtgtataccagacaaacaagagcagtcgctaggacatttttcctaaacttgctgatctttggtctcccaatccacctggttaaagtaagcatagtatcagctgccacatgccaggaaagccaatctttgatcccctgtaaacaggcagcagagatactacacttgaaaaataaatggtctgcatttttcagcatgtgttgagcataattcacattgctcatcaatatccattcccattattctcaatctatccttggttctaagtcgtttctgtattgctaaccaagaaataaaacattgttttagggtatttaactgaccccacacctactgagaccaagaaactttggcctagactggacatagtaaagtatacccaatttttacctgataatgttgttgttgtgtacaaatgtgatggcctacaagatccttgaaatggttctttaagttcacaaggctcctccagtaccaactactttgagtaggagccttgtaactccaccattcataatccttgaggtagacactattaatccacttcaaccaaaggctgtcctgtttttgagcaattgccaagatgtactttcccatggcagcttggttgcattcttgtattttcctaaagccaaggccaccaacagctttatattggcataatgactcccatgctattagacctggtcctgttgcacaagcttggtctttccatagaaaagctttgcatattgattccaattgccttaccactttcttaggcaaaatgagcacttggcactaatatgcatgaatagccatgagcactgaattggttaagacaactctagctgcaaaagaaagattcctggagctcaaggttcttattcgtgcagtcattttttcaaccaaagcaatgcattcattcccagaaattcttttagcacaaatgggcacccctaagtaagtaaaaggcatgtcttttagagtaaaaccagaggctgaaagaactctactaacctcctcatgtggcatgttgctgcaatatattactgattttttagggttaggttgcaaaccagacgatattgagaacaatttcaatccctgtagcatataatagatgcttttaaaatctcctttgcagaatagcattacatcatctgcaaatgccagatgattaatcttcaattttgagcatctctcatgatagttaaaatctcttttgtctccaacctctttaagtattcttgataagtattccatgccaaggacaaacagaaacggagacatgggatctccctgtcttagacccctttttgcctcaaagaaaccatgtacagaaccattaaacatgacagagaatctgggtgttcttatacagttcattatagtttgaatgaagtgatgtggaaactgtaatcccattagcatctcctctatgaactcccattcaattgtatcataggctttctggaggtcaagtttgatcatgcaatttgccttgtttgacttccttccataatgcctcactaaatcctgacagatcataatgttgtgcccaatgaatctaccctgaatgaaccctccttgagagtttgagatcagatcagggagaatccatttgattctagagcacaaaagcttaattgcaatcttgtaaatgacattgcaacaggcgattggcctaaaatctttgacagtgtttgggcacttcatttttggcaccattgtgagaactgttgtgttgatctctttgagaattttaccagaagtaaggaaggaggcgactgccctgtatacatcttctcccactagctcttaattatcctaaaaaaagtaactagaaaaaccatttggtcctggagctttgtttcctgagatctcaaataccactttcttgacatcatccttagtgaagggtctatttagtatttcagcatgttcagaagtgacttttgggcatctactcaaaatcttattggaaactttcttcctatttgccatttttgatcacaacagtgatttgtaatacgaaatgaaagcctcagtaacctgttctggttcaaataccctcattccaacttcattctgtattgaataaacctggttctgcctgtgttctttgcttgatgcttgcgtgaaatagagaagtgttgctatctccatctcgaatccagttaatcttggctttctggtgtaaaaaagagtgagtgctgctgtgctgaaataaatgagttcctaccagcaagttcttgttcctgtaacacttcatttaaagggtctttatgcagcttgctccggacttcatcgagtacatgctttgcttgaatcgaggttgcttgcaaatcaaagaagcctttttggttaatctctcttaggacaggtttcaaagcctttaacttgtgaaccacctgatacatgctggtgctattgacttgttgttgccaaacagcagctgctttactatcatattcaggatgagatttccacatcctgaaatatttgaatggtttctttccacacttccatttaggaaatagagacaatatccctggtgtatgatcataggttccctcattcaaaaacaaggcttcagcattctgtcctgaccatgctgcttgttcgtccatgtgaaaaaactaccagtagctttaatatcttctagttgacaggattgtaagcactcaatgaactcagactcagcttggtattttactctgtctcactctctcatccttggctatgatggcattacaatcccccattattatccagctttcatctgtctttagtgtctgtaaatccttccacaattccaatctatctttcttgtcattaaatccataaaccactgtcaagaaactgttataggttccatccattgttgtaattctcaagtgcataagttggctcgtgcatttgacaatatcaacaatgaaacggtttggattccaagctataacgattatgcccccttggtgccatgctatgttcgacgaaaaacaccacccattaaagacattgaggtacaaggttccaagtttgtgaacctttacccttgtttcgagaagcccaacaaaaccagcctcctgagtttgaatgaactgcctgatttgttgttgttttttctggttgttggctccccgaacaatccaaacaaggaacttatccattgccaagagagggtcctcccccctctcttgtgttatctgttttcatgtaatgtattttcaaaaagtataaatttttaaaataatattttttttgcacattttttgtaattatgttatttttattgtacgtttatgaaaaaagtcctattttattttcttcgttgctttggtttattttggtttcgtatttatttttatttttgtaaagccaaatttgttagtcttgtcttcaatttgttatttcaatttattatttgactaggttaatttataactttttaattttattaagttttgatgtattaatgaagttttattgattattaattttaatttactttgatgtattttgaagattatattgtatcatgcctttactaatttatttttgtgtaagttgtgacttgttttgtatcagtttgggtagtatgcttatgtgctcaatgtggcttgtttaataccatatatgacggttcgttttgagtttatcataagaatgatttgatattggcagtgacaccaaatccgctccacatatatcaaagataagttttttctttataaattaatattttggaatattttttaacatatagataaaaattctcattttcttatgaatcagtattgatgatatacaactctcattttaatttaacattttttttttataaataaggaaactttgtattgctcaaaacatcaattacatcccatgttttttgtacaaaaccaactgctatacactataaaactaaaactttacaaaaaattacaagttcatcacccattgcttgtcaacttcctttgtcctgcttggcaataccccttctattcttcttttactctcttgttgtactctgttaacaattaccttgacttgccattatttttggttccatagtacatcatttcgtgccccccagatccgatacaccaaagcagccaacatagtattcatcatgcttctccttgttgctgatattttcttgagtttgctgatatactgcagcagtttctgcaattcaactgcttttgttcctcactgcagcttcttcttcaattctgttaggcatttgctgctatattcacatataaaaaatagatgctctatagattcatttcccttcccacacagtaagcaagttaaatccacattcatgtcatacttgcttattctatccttaatattaagttgtgtattaattaaattttatatatttattttatataagtgcgtttttatttcactcacttgatgatgctaagatataaggatttcaaaagctatcaacaaaggaagaattttttttaatgagctgggggtgctgtttgattatgttatagctttattttctacattcctagggacagttttattccatgtgactcgtaataagaattatgcagctctagtttggcaaagcatacacttcggttagacgatgaattatactggttcaaggagcgtgccaccactgattatagattgcagcatcgggatatgaaaaaaaatgaaaaaaaataaagtgggcatctgaccatcgggccgaccatcgggccctacatcgggcccatcggaccagtcctataaatagaaa

SEQ ID NO: 113355 - DNA, 5882 bp, Cannabis sativa
  modified_base (3773)..(3776): a, c, t, g, unknown or other
  modified_base (4039)..(4045): a, c, t, g, unknown or other
  modified_base (5836)..(5855): a, c, t, g, unknown or other
gaaaatttgaaagatacatttatcattatttttattagttttgacttaatatttattcaaacccttactcaactaaatttctagcttcgtcactatttataagcttgtataataacttataagttagacttcttcaaatgaactaaaaccaaaaattgtatttcctttgttccgttgctgttactattctataactagttaatttgaaagcttttcaacggctacaacctcctaccatctacttctaaatttagtagttgcgaataaattttatatatatattttggtgtttagttaatgacaattaagaaaatctaattagtgactgtacatttatagacatacatgtcctcatataaaatttgtttagattgatttcaattttttgtttttttaagggtaaatagcgggataagtatccaaagttttgagtttgcaagcggcataaacccaatgattcttttagtagcataagtacccaatgtttgtaaaactgtaatttttctctatattttcgtcagtacagactctgttttaaatttattaagaaaaagatttagaagtaattgatactacatattttcgtccagactaaataatttaaaatttaggtcttatatgtgtactatttaagacaataacagaatctgtactgatgaaactagaagaaaattacagttttataaagattcggtacttatgccgctaaacaaatcatttagtttatgccgcttacaaatcaaaaactttagatacttatgccattatttactattttttttaataattacgtgtactctttgtttaattacacttgtaattaggtagaaatgctttttagtttttaaattaaaaggagaaagtacagaactttaatttttttttttttgaaagtacataactttaaatttgtctaacaaaaactttcaaatataattttttaacttttaattggttatataaagtataaggacaatatcatgatttctctatttatttcacggttgtgagacgcatgtaaatcacattgttcttagttagatttatatctagtttaaatacatatatatgtatattttcttattgttgatcgattttgttaaagacatgtgttattttttaagagcaattcgtaagaaaaattgacattccgcaagtgggcccttactaggtgcatttttaactcatacactaacttaaatattacattattattaaatttgatattaaaaaatatttgcactccaattacaataataaaaattatactaaaaaatactttattattatattattttctttaatataataaaaaaaaaagtgatgcatgctactggaaatttgagcattgtttctaacatattaattttttttaaattttgtcaaaatttacaaaatattttaaataattataatgtatacgactgtaaaaaaaattagagtaaaaaaatttttcaaataccaaaataaataaagatatatattgaaaaaagaatgaatgtcgttgctacaatgtcgcaacatatatatatatcatgcatgtagtctcacaacaaatttgatgagataatattgaaatctccttaaatacacatgcaacttcaaaccacctaattgcagtcttcttagagctactttaaggacttattcccaaagacatacatctattcttgaagaagtaagcccctagagaaggatggtagtctacttcgaacctaaattgctccttccatttacattccactcccaaattagataggttactcgcccaaagaaaaggtccttcacatgcaatagtactaatattgctactacatctctagaatagaggactctataattccactttcaaggtggaaggcttctaaacatttcttggtatactagtgtgggcactggactgtcattgcctctaacacaatgagtgacacactatatgttgttctctctcaaaatgcacacacttttcctacgcctacatatacagaggtaatcaatgcttatcacattacggcgagacaagattgactcaagggcggaatacactactgtgtacagtccgacccattgagcctttagttagggaaataagtggatgctagtagtggtattcctccaaaaaatgaagggataccattactaaaaatatcaactttgtaaaattttaatagtaatacatctcactcataaattagttcactgacaatctaaactacatgaaaataatgcgttttttttttaaatttcatcttaatctctcttaattcttttctaaatttaacgaaaatcacgtttcatataaaataataactcatttctacttttataaatttatatatatttccttaaaaggtaatcaaacaataattattattattattacttttggttaatgtgaatatagtgcacgtgtagttcattcctagttataattctcttccattttcacaattttttttttctttttccatttttagtttcccctttttggaaagatatagctgactacccgtgaccaaagtaagggcttttggctttggtcatatagatatagtattatatagtttgaaccaaactgcagagaaaattcaggtgtagacaaaggtagcgattatgagacattaaaattgatgtttagtatattcaacaaagaaaaaggtaacacaaaatgccacgtagtacgaaaacattgccagcgcatattggtccccacagtcaaatcatggtcagaacacacaaatcctttgatcttattggctaagaaagccagagttttggggcggtgaaagtccaaaggcaacaactaaaaactgaggaagcccatgtcaaacccacgtgagcatgacccttgggacgccttgaggacactcgctcacccccgaaaaaaacactctcctgtctcaccctcaaggggaaattatgtgctacatatacatacctattttaatatgtaacaatacatatattttaattttatttttattcctcgcggtattcattataatcatagtaggtcttctataaactttttaaaaaatttattgaaaataaaattgaaatagttgcacatcacattattatcaagctttttgatcctgaacataccatttcatatcttgctaaatttttaagatcgttaaaatttttttttgaactataaagattattagatttaaagactttgtctaattttaataaaaaaaaaatctaacatagatgaaaattcaaggaacatgatttggtacaaagttcgaggggcatgattaggtagatatcaaagtctaagaagcatagtttagtacataaacaataactgaattaataaaattgaatgcaattggacaaaaattcttaaattcaacaatttcaatagttcaactgagaattttagttgtaaaaaaaattcaaaaagcatgatttggtccatattaaaatttagcgggtgaaaatcttaattagccttataataaatgtcatcacaaaacaaaaataaaattaaatgttccattattagagataatatgtatccgtatatattaatttaattagagaataatggagattttcattaatataagtaaatcggacaaaatttattatatgatgaaatcgttcaaagaataatataatcaacaataataggcaaactatgccatttaaaataataataaagaaaatcctaacaacttcaactaaaagatcaataagccgctagcagtaatgcatttaagaaaggctaattaggatttttttccccttgaattttgacatgnnnnaaatcatgccccctgaacttttttagccattaaatattccccctaaactattgagattgttagatttaatgacttttatcaaatttcattcaattttactaattctgtaattgtctatgtactaaatcatgttcatccctagactttgatatataccaaaccatgtctctcaaactttgacatctaccaaatcaagcctcctgaactttcatccacgctagactttttttactaaaattggaaaaaaagtccttaaatccaannnnnnnaatagttcagggagaatttttaatagctaaaaaagttcaaggggtatgatttggtacatgtcaaagttcaagaggagaaaatcctaattagccttaaagaaatgcgaagaatgatagacctctaatatgaatgaacatatgacaatcacacctatcaatgacaattatccaaagatcttctaataaaaaattgggtaatgacaacccgattattcaataaattttaaaataaaaccaccatctcaacccagcctaagcccccatcaacaaccaacaaactctgccaaatcaccaacagcaacccagatccggcatgacactctaatccctacggtaattgaatcaggcccaaaggctccagctcaagatccaatacacggttcaacaccaccagatccatacccagtgtggccctcggacgaaaaacaaaagcaaattcgtggcattgaggcctcagaaccaagcaaccaaatagaaaactcacaaaaaattgagaaaactcgaaaagaaaagaaaaagcacatcacaaaggtcagggtgtctaaaataaaagctcaaccaaagccacgccataagctaaaaatgagccttggtcagagaagatgacagcagcggctacaataatttttttacatattaaaaaatgtatgtaccacgaaacacttccttataatatatatatatatatatatatatatatctatttgcaaaaaaaataaaaacaaaaagtcaaaattaatctttgaaaaaaattaaataattaatacaaaatatagtaaaaaaaaaagaatctcttttattttttattaatttttatagcagaaaagaaatatattttctattttacctgtacatcgttaataagtccaataaaatgatatatatatattgaaaagaagaattattctcataaatcataacaaatatcgtcaccaacaaaataatgagcaatacaattataaatcacatccttaaatataagaggataatcctttcgtagactaatctttgtcaaaaaatgaaccaccttattctccttacgaggaacaaagtaacaagaatcaacttgaaaaaatgcataaaattttaaatatcaccaacaagaatatcatctacattataatcattcattatgagccttaatagcagtaaaaacatttttgtgatcattttcaaaatgtgaaaaaaattgataaagtaagcaccatttaagagctaatatttctattataaaatggtataattgttagtataatttaatattaaattttacatattatcgtttaatagttcttaagatgtaaatatatatacgtgtagtattggtttaggtgtagtccataatttttcgtgtatattttttaaaatataaatccatttcatcataaaaaaatatagttcgtgttgtacgtgtcgtgtcaatatatatatttaaagagtagacctgaaataaatttggaggctcaatatttttatgccctacttgaattttgtcgtgttttattcgagctagtctattttttaataaaataagctagtgcattttcaatatatggttcgaattcaaattttacttttccacataattttataactattaagttgattactatattatatgtatttttatagttttaataatttttctatagttttcaaaaatattgtacatacaattatataggataatcattagaattattagaattaaagtatttacttttaaatacttagatggtgtttaatcagttttctgtttttaaaagtagaaaagtaaaaatatttttcaannnnnnnnnnnnnnnnnnnntttttacttttcaattttataattaga

SEQ ID NO: 113356 - DNA, 1035 bp, Cannabis sativa
agtctcatatcttattagccttaatggaattatacaagaagagttacctttttcttgtcctctttttcctttttattttctctctccaattaagctaagaatatccttattgtttagagaaaaaataaaagaaattgtggatctccaaacaaattttgtttccaacttttcattgtaactttttagctaaacataattatacttggtattccctcggtgcatgccaggtgtcctatgcctgccaccaacatagtgacccccaagaacattatatttaacaagtggtggtatagtggtggaatttcaacgacaaataatacagctcacaattcacaaaagcttatgggacaattcaaggcatgtattccacataacatccaccaataatataaccgaacaataacctacattttacacgttctcttcttgaaaagctaagcaaaagctaaactgatatcaaaactgaagctctggagtcaaactatgcatttggaaaattgttttatgtttaatcccaattggacgaacatttatgaaattaatagaaaaatcaattttcattaaatggttattatttaagatgtttaaataatctccttttaataggttattctttaacttacttcgaagagtgacattttttattaaaataagtaaaaattattattaaattttattttattcttttcatcctcttcacatttttcttattttagtactccaaatcaaacaactcttaaaaacaaacatacataagataaatttgaaagatcaaatcacaatcacaatgcccgtttcattaaaatgtgtatactgcaaactacatatctcacagtcaacattacaaatttagcaagggttgagaagtttctattgtttttcatcatggacacatcaagatttgtctatattcagaaaacataaacttttgatcatttaagaattgagaatgcataggtggataaaatttatatatctatataaaggagagatatgagacgatgacgtgtcactttaaaatctctttaattagca

SEQ ID NO: 113357 - DNA, 8374 bp, Cannabis sativa
  modified_base (8199)..(8215): a, c, t, g, unknown or other
cgctcttccgatcttaaaaacaaaaattttaatttcattgattaaataataataataaaaaaatgttaggcacctaaatttattagcttcaaccaaatgctagctaagtttagtacctgaatgaaaagagtaattgaagtgaatcaagttattgatgagatatggtgagtgttggatttgggtggatccataagcctccacatataccaagccccaacagttctataaggcttccacttctcacacaatttctccatctccaatggccgaggcagttctttcaacccatacaacctctgaacccctttcctcacaccaagatcacccaccggaagaacatccggtctctgcagagaaaatatcataaacatatgaactgtccaaaccccaattcctttcaccattgttagcatcctaagcagagattcatcgtccatctcaagaatcgacgaatctgacaaacacccatttctgaacttctccgccagatcatgaaggtaactcgcttttctcccggaaacaccggcttcccggagttgaatagccgatagtgaactcactgagtcggggatcactagtgactcgccgccgcagagcgtgacgaatcgggtgtagatcgagttcgctgctttgtacgcgagttgctagtaaattatgcttctcgacagagattggaacggtaagctatcggatttgaattccggtggcgggtgggtatcgattagggttgcgagaagcgggtcggagctccgtaaatagttgagggcgatttcgatttcgggtttggaagttaagggtttgagggtttggggcaaaacagaggagagtttcaacggtgggttttcattgacggagacggagacttggacggttggggatttggatgagagttttcgggcttttctggctcggaatggaattttaaaaaagtttggggggtttttagaaataatagcggtggccatttctggttgtgtttccgtttgtgactgaactttggcacgtttaaccattagaaaaaataacggttttccggcaaaagaagaggtaaacggttaaatgtgatatgggtagttgggtatttaacaaaggagtatttggatatggtccgactttgatcgtgctctgcaagttttgttttgattttcatattattgtttttctaaggtattataaggtttgattggttgggtcaaacaaatatttatttatttagttaagtggggagtggggacttatatgataagtgatgttgtgttgaggaagattggagaataaaatgttataggaaaaaaagaaaacctcatagaaaaaaaaaacgtttagtcacattaagcatgtgaattttttaggtaaagaaaaactattaaacgtacgatcagcctcaagaagagaggatcgcgccaaacaatgtgctatcctattagcagatcgcttcacaaatctaagagagatattaccaatctcggcaaataaagccttacacactgaaattatatggccatagaaaccatatttttattaccttgaatatcataaataacccttaaacaatccgattccaaaatgactccattccaactattggtcttgatccaactcaaagtttctttgattccaatggcctcaacctcatgtggctgtagagaactcattttcaacaaagtggcagcttgaatgacccaacgtggggagttagttaaaaaaagtggtacgtgtgaattggagcattgttatatagaattcgataattaattgtatcaacaatatgatattgaggagagtgtaagacacgcaagtgctttttaacactccctttcaagctttcgagaaagactctttccactagcaagcatcggcaacaacattttgctaatcctaacatcagcccagaggagttttgtaccttaccaatagtctattgttgcattgtagacttgtgaattatgactctattgccaagttggttcagcagctctccaaattaataggccttcaccaggtgaggttcttattggcacgttggatgataaacatatacacccgaattcaagtcaaaccatgttaatagtttaagcttgatcggcctgaatggtcccttagccacttcacccaatcaaaagacatttagctcaatatcatatttatcactcaactaacattgttcaattgatactaaagttaagtcataaatattccatccgaagtatgtagcatgggacaggtagaataatcaacaaagatcaccttgcaaggttaaatgttcaaattcgtgagtgagagatagtaaattagtacccatgaggaaagggtggatcttaaaaaaaaaaactaacgaatcttcgtcgtcaagcacaatgtttacatgtaagcttattctaatcaagcacaacaatacatagctaaagagcttgatagaacagccaagcatagcatgaaagaaacttcaatgatcaacctcaacacccgctacaactcgaagatacacaagaatctactttggggggccttgttttttcagtgagccactcagagcagcctttgtttttgcccattctttcaatgatgtagcacttctcataaaggagcaagtgttacttatctcaactttcattggagatgtttgttttgctgctgcaacacttttttgttctgacatcagtatggatgattcgttattacctaactcagtttgttgtttctcctcctcagtgctccttgatacatccctctccttccccatttcagaaacatcaggactatcttctctagcagggtttactacgttgttattcttgacattggaaaaattggcaacgaacggattgttgggcttcgccgtgatctgttgattggatgtgacaccaggaattacttgtgaaatgctaaatgaagtactctctccaatcaattgtgtccaagaggatttatgccgccaaaaagcacctctccctgtctgatttgaaacaaccttttcgtcagcaggttgagcttctagtcctactagctcttttgctttcatctcgcaggatgtgtctttcatttctccatctctttccaagttatccattttgtcagcaggttgagcttcttgtactactagctcctctgctcttctgctttccaattctccatttctttccaaattgtcttttttgtcagaagcctcaacttcttcttcttctactcctattagttcgtctgttttcattaagcatgaagtgttttccaattctccatctgtttccatgctgtcgttttcgttatcagagtcacaagaagtatctgatcttggcttaacttcctcagcaacaggcatactgaacaaatttcccgagatgctgaatggacttttcttgctatcatcaagaagttccttccatgaagatttctttgacccggaagcacttgacttgtgtttaactgatttatttgaaccaccaagcacgccttctttattttccaatgcaggagattcaaattcttttccactggttttgtcattcacaactgactttttctttttgaatggtggctccttatcattccctttcttgattgcagacacatccacaaaaggtccccttttcggtcttggttcctaaggcgacagaagtagcagagttaaagttaagaataatactaggagaatgagaaaattagttcaattaaagagtgtgtttacttgaagaagttgtggtctcccaaatgaagggactggttggtctttggtaacaacattgatgatgagattatcttcatcttcatcttgatcatggttttggttttggctttgaaagaggttattcatcactttattcattatttcaagctcttgttcattgatcccaccactctgtgactctacttgagcaacttgtttgtctttctcattttcaggtaaagaagaagaatgttcttcgcaatcacagaagtactttggaagagaaggaacatcaactcgctggaaactgtacttgtgcttaccgcttccactgaaaggcagagatttcacctgaacaaacaagaaaaccatttaaaattacaataacaatattcatcatgttcatgtgtatgcatattacaattagcaatgaaaaagcaaaaaatgtgtgtttttgattcattggttccttttcttcacatagatatgtttactacaatccgtaatgaaaatgaaaaagagtgaaggagtgagttttcttctcgtcggtgctacctatatacacctacaactaatgataaaaaagcatgtgactttttgattcatgactttgataccatacatataactataaatcgtaaccaaaatagaaaggttagtctttgattcatggggttttttttttctcattgacaatacttactaaaagtcataatgaaaaacaaaggtgagtttttgaattatataaatcttaaaaacatgttttttttatacataagaacagaagagagagagagagagaaatagaccttgtataatctggggaaatagatgcgaatgaggttggtgttatcagggtcaagttgtttccggtggatatgggaaggaggaggcggaggggcttgagcttgagcttgggcttgggctttagctttagcttcttcttcttcttcttgcttttgcttttcttgtgaccactctcgatttaagcgaatgagataatgttctttggccttttcgagtctgagtttgcctcctttccaagcgcagccattgtacttggcgaagagattggaaagtgacttgggagaggaagggagaaagtcgacataggctaaagagcgacctttggtgcggacgaagtcgacagagtcaaccactccgccagtcaactgaaagagccgactgagttcctccgctgtcactgactcccccaaacccccaacgtagatcctcactttctcctctttctcttcttccatggtgtttggattggactgaacactcttacactcaaaactctcaaccctttcttctttctttctcttgtacatttcttgacctgatattttagagtttatggtcagggattcaagaattggatagataacaaataatcaaacaatgaagacaagctacaagccatatcatatactgttatcgatgaagagtgaagacaacatttaatgataacccatatgcatatctgattaaaaaaaatagaagccaaaattcataactaaaatgcccaatgcccaatgcccaaaacccattgtctatcatatcaaattcaaatagaaacaaagaaagtaattatcaaatacataacctaaaatctaaaatgtccaatgccattttctatcatctcaaattcaaataaaaaccaaaaaaaattaatgatcaaacaaaattacaaataataatcagattcattatcatattcaaaacaataaacaaaataaacaacaaagcaatttgaaggtcaagaggcaagtcttttacttctagtcttcacctcgaatacttaaaataataacaaacagaaaacagttttacataaacataaattacttgcagacatagaaatgtattagttgcacacataattgaaatcaaagcacaaatgaaagaacagaacaccacataacaaaggactgaagacactctacaattcactaggaaaatgtcaataataaacaaatgactctcactttcaaaacaagtaaaaataaaatcaaacagatctaaaggctacaactttatataaagaattaaacaattttcatatcagagtaagaacaagaagaacctcacactaacttcttccaccttaaaatgaagttcaaaacccataatattagagtattttcataagaaaaagaaaaaagaatgataccaaataatataggaatgcatacctagaagctctctttttgtttggggctaaagaagtgtatgtgaacaaggtcttcgagagtgaggtgtacggctggccatgcgcctgaggcctaaggtttacgtgtgacgcctgcgtgaggagtggggaaggaatgaggagttacgacgaacgagagaagaaaggagaaagaaagagaaagaggattcgttggtgagatgaagcctctggtctgagaatgagtcgagagacagagccagggaaaggcgacttggtttcttcatttaggttttatacagggcattttacatatatactcaaaaatatggcaaagattacaaaaatacaataattgaataattttacttatatagtgaaaaatatgggaaagattacaaaaatacaatcatatgaataattttacatttatactttactcggtaatttttttttcttttatactacatttaggccaaaatgagtgaaacctcgtcattctcagtaactatagtcaaaaataaccgatgaactacaaaataacaaaaaaaataaataaataaataaataaccattatttcggtcatgtaagtatttaagattttttttattttttagaaatttttactattattataaatcaaaattcatttgaaaaaatgggatgtggaatctcccccatccaacaaaagtcttcttctaaccctaaagcatacttggctaagttgtgagcagtttaatttgcatgcctagaaaaacaagataggtctttgtgtttgtgtgtagaaaccaaagcagtagatactcttaatgcatcagtctctacttgcatcatcgaaagttgttgttggaaagcccaattaagactgtggaaaagagtatttgcttccgtttcatcacttctaaaacagccttgtactggtctggataatgcagcaaccacttctcctttgtggtttctaataacagctccaattcttaatttcttttctttgtcatttaatgatgcatctacattcattttaaaacaatgtatgttaggtggctgccatggtgtcaagtctgatttattggcctttcgaattgctgccatctggtttgtatggtcacgggcagagtatttgaactctgctggcacatagcagaatgtgttgcattttgacgttgatgcagcaacaaaaattcgattggcgttgcattagaaagatgctgagactgagtagcatttgattcaaattgatgttgatgcatagcatttatttcctggtgctacatagcagaaggcattatgactctatgccgatgcaacaatgaagaatgtgacaagttaacatcattatcaggacctactggtcaaagtgcattggatgcttgctggtgcaaagttggacaatcagcatgttgttaaacattatccaatgaagttggattatgttgttgctggctcatagcagcagaagtggttccatgctgctggtgcagaggagggttgttgtggatattgttgttctttaggtgtatcttcctataattattcacataatttattgcttgtgttactaaaacagcagcatcacgttttgttcccctatggagtatcttatttctttcattccaaatgctccacatgacacaaattaagagttcaaattcagccttttccatagttgtggagagatgaataaagtagtcaccattatacataccatgagcactttgaaaatcaatatgaaattgtgttgatttccaaactgattttgcatgtttacatgtgaataaagcatgcccaattgactcccaagcactcatacatcttgtgcaaaccgctgaatcaataatctttcgcttgtgtaaagcagtggcaactgacaatgcgtgttggatgaccttccaagcaaaaattttcacctttggaggtattttcaatgcccaaaacaatttccaccagtttttgtaattgtcaaatgtaagtatttaagatttcacttttaaaataataatataaaatttaattaaaacaacaatataacgacaaaaataaaataatcaaataaaataataaaaaaaatatgtctcaataattcttttgtcagtaaagacttccatatctttcaccttaaaaaatgttttcttaccctaaatacattaaaaaacaatttagaacaataacaaaaaaaataatcgttaaaaatataaaagtcaagtatattattaaacaccgaagagcacatacagaacaaaaaaatatataaaatttaaggctaattagaatttttacctcctgaattttgacatgtattaaatcatgctccctaaacttttaaggtcattaaaaatgccctctgaactattgagattgttnnnnnnnnnnnnnnnnntctaattttagtaaaaaaaaaaagaaaaactaatatggatgaaagttgtgggggcatgatttagtatatgtcaaagttcgaggggcatgatttggtagatattaaaatccgggaacatggtttagtatataaacaatcactgaaatagtaaaattgaat

SEQ ID NO: 113358 - DNA, 6781 bp, Cannabis sativa
  modified_base (573)..(582): a, c, t, g, unknown or other
  modified_base (649)..(650): a, c, t, g, unknown or other
ctctctctctctctctcttatcttcttcttcttctttcaagtctttgttgaatctaggagatgcggtcagatctagcttgagtccggtcgagtttggaatgagacaagttgaatctgggctgggttcttctcaactccaatggtagactgaccccataaaattgagatcttagtcgttctccgcatatatctcaatcatcctccctcgatttgttttctaaatcacaacttggtggatagattttccaaatttgtttattatttttttaataatttaggatataaatctggttaaatggatatttttgtgttttttagatttaaatctgagaaatataatagtgttggtggtgatggttgcattggagtttcagtgggatagtgtagtggtggtggtttcggtatgttgtaatggtggtggtggtggttgtggaagagaagagttgggtggtggtgtggtggttatgattatgggagagaaggaattagggttgagttttggtgtggtggtggtggttatggtggtagtgattttggggagagtgtgtgttacaaagagagagagagagagannnnnnnnnngagagagagagagagagaagtggttttggggtagataagggagttacgaagagagagagagagaganngagagagagagagagagacgactttattttttgtcctcctaaagaaggtgttgaaccatacattgtcaagattggtttcctttatggataggacaaaaggatatattttagtgcgataccgacccttaaggtgacgctactatgttaagtcatggaatctaaaataatgagttacactcacaaagtcatgtccgtgtctttgacattaggggacataacttgaccaaataaacgatactttattttgtaagaaaaatatgagttttttaattgcaattaataaagacaagaacaagtcttgtagattatttgatattaattttgaccgaccctaaggtagaattttaatttttggataatcttatcgtggaaattttaaattattttatgtgtttttctaagtgtgttcatgcatcatatttaaattccaaacatgatacttattttttttttatttatagtacttatattgtatttatgtcctattacttattttttgcgttatttatattttatttcagtgtaataacaaataaaaatggaacgataatttaatatttatattttctttttcgggcttgtggcgtgagattctcatgtctatcgagacctcttttgtggggtgtcttattggagacggtcgccacaggggttgggagtctccaccctccaacgaagtgattgacattattaacccatcttgctgaattggtggctcttttcgtgtttcaccttggtttgcatctttgcctattagaggtggttggtttttagcgtctggattttttgagtcttgggcaactccagtgaggggtgatgggcgaactttcctgcaagcaactagcttagttttgtatatggatacctcgatgtctcgaagatgtcaggaacgccttggcatctttgaatgatgattgtgtatttcaaggaacaacgtagctttgtgccttgtcgtttccacagacagcgccaaattattgacggtaagagctcgtcaactaaataattagaaaaaataaaatgcaaataacttagagagaatgtattaaaaaagttaaggaactcagaatgagatatattgcattgttctattaatttttcaagctctttcacaaataatttttaagaaccccttataacatttcaaaactaattatttatatttgtacctttagagtctctgaagtgtatgtggtccctaaagtaaggggcataattccttttgtactatgaagatcagcatgataggcaggtagtggagaagtggtggtcgggtgtcagtggatactctgaataagacaaaaagcatccccactacccgtacatgttgtacttttgttcctcaagaggcgtgcatgcttccaacaaccttgcctctgccgtatgttcccttgatgtcacactttttagggtgaatattccggaagtgaggttaacacttcgaaaatttagccaagtgttaaatctatgaaagcttccttatttatagggggaatatgtggaattggttaggtagtgtgtttgaatgaagggaaagacatttaggtgtgagatggagtagccttaggcatgtgtggtgtaaggaataaaggggggagagagagagagagagagagagatgacatcaccaaaatttgacagcctcgagagattagaatgcgagattaagcacactaagggcttgtttggtatgccatattgtattgtattagtattagtattatttaatacaatactatctttgggattgacttgtattaataaattttatatagttataatatattttcaatacacttgaccccaacaccaactatgagtctgggtctggttctgggtctagggtcacgagtttgggtcgcgggtccaggtcgcgggtttggatcttggtctgaattcgggtcttgggtctaagtttgggtttgggtctcgggtcctgggtctgggtcttgagtcgcgattctcaggtctgggtccaggtctaggtcccgatccaagtctcgggtcccaagtcctggttcgaattcgggtctgagtcccgagtctcaagtctgggtctgggtcccggatatgggtcaggatctcgggtttaggtcccaggtctgggtctgggtctcgagtccaggtccgggtctgggtcatgtgtccggggtctaggtatggggtccgagttcgggtcttaggtccaggtccaagtccgggtccaaatcccaaatttgggtccaggtctaggtctcaggtccgggtcccgggtctgtgtcccgagttcgggtttgagattggtgatcctgaatcctttgtaaatattataatacaagctaacatagactatttgttatgtattaaataatacaacatacattgtaaaaaaatttagtcgtaataattaatacaatacattactttatccaaacataatattatttattatttaatacaataagacccttatataacatactaaacaatccctattagataaaaagtttagacattttatttgtttggaggaatgtttagacattttttttaccccaaatgttcttatttttttaggaaaaacattaatataattaatatagcttatataatcaagatttaaaattcaacacgtatagattatataattctacagtatttcaaaacttttagtaacaaaaagatcaacaatgtttaaagcatataggcatttcaaaacaccatcataccatgccaaggtattacaacacaaaatttaagaaagttgaagctttatttctttttccctcaaagacaacaaaaaagaagttgtgtttttgtgagaaacaacaaaagttgttagtttctaaaatcaaaagtggttattttgttgcatgaaggctggctgaagttgttcgattagcctaaccttctcagctatctcaccaaaccagttcttaatgtgggaagcttcatcctcaaaacgcttcaactcatccacaattagcttgcgaaagcggagagagtatctcttctttttcgacatagccatttccaagcttctcatttcactaagtatcaactcaaatctgctcttaattgccttcatttttttctcaaagaaaaaacataaaaacttcaatcaatttataagttgataaatatttaatttagattcttaattttgaaaattacctctatataggtttggattttatcttgtaatttactttttagcttagttaagtttagatttaatgtgtatttatgtattagctagaaccaactcaaaagtacttaaaaccaaccaaattaagataaataaaatatacatagcaaatacagtcaaaatagagtgagtactttctttttttcttctagtgttactctaggaaaacctattttatttataattgtaatttcataaaaagaactatgtatattgattctgaattttttcagtttagtgcatgattaaaaatctaaactttaaccattttccaaaatttaagtataacacaaaacacatatttaagaagatctctctataatgtatcaaaagatttggaggatgtctcccaaagtgggttgaaaaaactattttgcaaagacaaattaataataataaaaataatattttggcacaaacactatttagaaaaagaaataaaataaaactctctatatattattgttattgattattagtagcgatgaaagctcaccctaagatcatttgtaacttcaccaacaatctgtctcataaactcagcattttcttctgcaacaacttgttccacctcatccttgtctgataattattaattattaaaaaacaaacacaacaaaaaatatatattggagagtgaaaagaaaattatgaaattaatacaacaacacaactcccatcttcttctttcatattgttcatatgatatatagacacatttatacatagacatgttatttaggctaatttcaaacaaaactaaccttcataatttgcttttcgcagccaagacatggttatctgaaaataaagataaatatattagatagagaatatatgtgtatatatactgtataaaacattatataaagaccatagacagtattaaaaaaaatataataaaaaaaattaatagtgtcttcttctaacttgataaaataaaaggatgtttagtagtatttgttttagtcatattcactccctaaaagtatttaaaaacaaggttttacatagtaagtgtatacaaatacaacaagaacaaacacatatacatatatattaatgcataaaagcttaaactaacatatatggatacagagaaaataaataaaatcttaaactacccaaactaatgtgcagaatctttatctatcataatcacaaaaataaattaggcatacctaaatcaaaaataaaacatacaaaactcatttccttttaaaccaaaactaaagattttctacaaatgaacactattttcttcattttcatagttcagcttcacaaagccaaaaccccttgtttcttttgtataggttttattattgtcttttttctttcttaaaaagaaaactgaaaataatagatcacgcggtgctgattatttcccctcttcttctgtgttagaagatttcgagagggacaatacactagttataggactagtctcccaaaagagtcaagcataatccatttttctaactctttgatccaaaacaaagcccataaagaatgtgagttagttgcatacctttgttgtcaagtaattaaactaataatgttttctctaaagtttatagagagagagagaaagaggagaagcaaggatcatcccgacccgcacgcatattgttccaacttaaatagaaaatctcaatggtcatcatcactaaaattaccataataccctccttgattgcattttcctttgggttttggaccaaataaaatgggaaagaaatgttatagtaattttatttacatcaattactgagtattaatataattctttattgaaaatcttaatttattacatattctatatggatatttgtatagagcttttttatttatacttttataattaattttttatttattaataaaaatggaaacaatataattttaaaatggaaacttttaaaatagaaactttaaaatagaaataatttttataaaatggaaacagcataattttgaaataaaaacaatataatcttaaaatagaaacaacttttataaaaataaaaataatctaaaaaaaaacgtaaaaaaaaaatagaaaatgcaatatacatgacaattcttgtatttgagttgggatatttaagatttttgtcaacaattatgacatatgcattgttataccttctgaactcaaaatgataacattaggggtgttcaaaataatttataaactgtcaaaaccaaataaacaacccaaactaaactgaataaatcgataaaaaatacaatctaaaataatacaatgaaaatccaaaccgtccaatgaataaattgagcggtttgaaaattattttaaaccgcccaattaacacgaataaaccaatttataaatttttcaataaaattgtatataatatattatataaattatatttatgagttaaactattttgtatttaaagtttggtcgttatagtgtttaattgaaatttagactttatagttaataatttttattgtatttagatattaaaattgaaatataaatctacattattttctttttattattatctttttattactatgtgcttaagtattttatctttactcaattacatttatctcatattaaagttgttaaaatatatattatttataaaattcagtattataatattactaatttattatttaattaatcaattaattaaatgcaaaataataaatgtaatactaaaatagttattttgtaactacagaacacaacattgtaactacagaataaaaaccagaaaagaaacagtgcaaaaaaataaaaacacataagatttttgtacgtgatatctataatccttgcagattgttacttgtgacagtcagtagtcccgtgatccgtaaggagaaataccgggtaagatgtacaatcccacatcgcttgggaaaggtcaagtgggatgattctgagattgtgtag

SEQ ID NO: 113359 - DNA, 1283 bp, Cannabis sativa
ataatactggttcaatgtaggtagacatacacataaacaatggagtgtacatatgaaatggcatgattagctttgtcatagaaactgtattgtatgtatagtactttaactattcatgaattttgcaactattcataagcatttttgacaagaaaacaatgttcgactattatagaaagtttaaaattattaggatgactcagaaatgaacttatataacatttttccttgacattaatcatcccaatgcatttaatcgacaactttttcttataattaataaactattttatttgattaactcttgcaggggctattacagatgcacttattggcatagtaaaggatgtctcgcaaaaaagatccttcaacgattagatgatgaccctaggatggtagaagtcaaatacagtggaaagcacacgtgcaccaatgatgtgggtcacgtgattggaagtagtactgcaactgcaacccaagatgatcacactttcagtcccatgtcaagcatcaccgctgatgacttagtctattgggatgacctactataatttaagaatttatttttagaaaaatcataactaaatatagatgaattacatatatgtaaaatattagcaaaagtttcatagaaaatatacttcattatttttctctaatattttcttcatagtaattttttcgtgtaaaattcacgatgaatagctcagctcaatccatagtgaacattttccttcacaatttcttttctttaacaaaactattagaaatgtataacctattagaatgaattacacatttttactacattttagtttagaaatttatacttatttgtagaaaaaaatttctaagaactttagtaattttaatctagaatatattagctaagtgaagtctacaaatatttaaatatgtaggatacaactccttttagtaaaagaaggatctagaagaaataaattttaaccacaaaatgtaagggatgaacaattatatatatcttagaattctaaattgtgtaattaatattcaaactatcaataaagcttgttattttttttaaagtcaaatcattctctattgtatacacaaccaatcaagttattactattctaccatcatcatcatattataaaactatcacctaaaataaatcaccattattaatttgaatttgtatccatgtttaatactcaaattaattttttaaactaatacttataactattgaaaaaataggatcacttttccctaagccctaaaatacccctctcattatt

SEQ ID NO: 113360 - DNA, 2629 bp, Cannabis sativa
tttttttttcttcattaaggaaaaacactttgagatatcaaaaaccccaacgaagagaatactacaagcggtgaaaaatctaaaattgatgtgtagcataaggaaaacctcacacacatgacatttttatataacttcaactataaattattatatgatcttcaaatgctcataggacttcgtggatcatttagggctgcgatggcagtctcaattttgatcttcaaatgctctttctcatcttcatcagcctgtaagtgtataccataaaacaattcaaatttaaaatgaaaccaatcgataaaaacacgtgtacagatataattatagagaaacaaacattgcggggccatctcgatatatgcagtgcagtggataagaacgaccaacatgtaaaattactaaaataggcgtccgaatatgttgcaatataatacaatttagataaagtcaagtcatatatttatatataacagaacaaaactcattgaggaacgtgttgtggggaacaaaaaaataaaaattataatggtgtcacccaccaccacacgtattaggcatctctaataaaatgatataaatgtgctatatatatatttttagtctattttcgtaaaattaaattttaataatatataatgtaatttatatttaaatattaaatttaacacaaaatataatataaattatacactatatataatgtagtttatttattaatataattaataattttttatatttttatttttatatattttaaatacttcaaatttttttatagttttataaagtttttacacattccaattaaaataaaatttattttattccatttacattttgaaacataaatttaaaatttaagctcaatataacattaactcattttatttaacataaaatttacaccaattatagacatcaacaaattgaaccacgtacggtgagtaaaagacaattttagcctaattgacttttgcgatcatgtatctgtaaatagctttatagataactacaaatttcatccacgaaaataagaataacaactttgtttcttcctaaaattaacatgattacttttaaaaaatcattttcatatgaatattgtgggttaaattagaaaacacgagaatgcatatatttatataatcatcatatcatgttaaattattagtgataaaagtacgaagaatcaaaggaaaaaccgcgtgaaagggacacaaatgtataataacaatagtaataattcttattgagaatttgaagcacgtttttcataataaaaaacacactattccacgagcttctcatgtgttgtttttattataattttcccaccgataatacctggaaatacacaacatgtttccttgggatttctggcctcagtggtctgaagtctgaacaatatgagaaatgtgtttttgtattttataatctaaacgtagcaaataactatttatagcttgtttcgattttagaatgtttaaggaaaacatgtatgggggtggaaaacaatgactgatgtgtactcaaaaaggaaaaaaagaattgttgtgaaagtataatttttatggctaaagttgtcaaaagtatagtatatcatatcattgaccaatgtttatacaaaaaattctgagatttgttttccacaaaagaatatatattcagacaatataattttatggctaattattgttgtatcattgaccaatatttatatcaaaaattctgagaattgtttttgagaaaagaacatagattctgacatttactaatactgaaatttgataacaagtaaagttggacttattattaagcttgctattcaagtctctaactagctatcatcaattacaaattaaaaagagttaatatctcaacaatatgtattacacaaattatgagatcatatgtaattaattattttcgacatatctcttctgcttatcctaatcattcaattttgtcaaatataggtacaacaaaatgttgccattattgtttgcatataattttacttgaagcttatgattctaatattggaaagttgtatctatgtttatatcttgttattataattaatgtttattaattgccattattattaatgtatatgttaaaattaatgttaacaagattattgtttttcacattcaaatagttttaatcgttatttctttatttaagtaattttgaaagattttgataaatttaaaataatttacaaaattagaaaaaaatttcaaactagttatttcacacatgtaaaaaataaaagaggcatatatgtaatacaacaatggacgaagccaaaaaataatattagatgaggtcaatataataataactattaattaaaatttatttcaaaaaataaaaaataaaaaagacaaccgtaacacaaaaattaagtattagtattacttttttcctaaatatttaatatttgtatacattaatttaatgtgtaataaaatgataattatgtgcctttggaaattgaataattattagaaataattagcaaagtaatatgttaattttttatgtatattatttatataataaaattattagtttatatatattttatatgtatatacaagaaaaatgaggtgaggca

SEQ ID NO: 113361 - DNA, 4457 bp, Cannabis sativa
caagaaaaatacaaaaactagatgtagatctccaatcatcaggatttgaagcccagtcaacatcacaaaaatctgtcaaggtaagagtagagacaggcttgaaatgtaggccaagatcaattgtgccagagagatacttaaggataatcttcacagttttccaataagattcaagtggagatttcacaaattgagagacgccatttactgtataagaaatgtctggcctagtaacagttgcatactaaagagcaccaatgatgctcttataaaaatgtgtattatcctaaagtttgcacatttgacgtgtcacttacatgtggcatagtcctgctagcctttaacacaacaagtgacttccatgcaaaaatgtacttggcagatcccatatgatgctaatatccatgagctctatataggcttccaggaaaaatcttgacgggccatcaacatgacggcgagagaatgggagattaacttaccttgcaagaatttttcacaagtaatccaacaagagagacaagtcttggaaagagcctggtcgagtagtcaatgtgccgaccatgagaaacgatgtgaagaatgattggcagggctgcacgtgcctcaatttcttcctcaaataacttttgcaaatatctctaaatgaatcctacaaatgtggatctgaatgatctacctgagtttgtaggagcttcaaaagatcaaaactgcactcaagaatataggaatatttactctttgatcactccttttatagagctaagtgtaacaaccttctccctataaatattgaatgaattcacaagtggaagggacctgaaatcataatctgacacttaagagcccttttttgaatatttctgtaaacatcttgagagttgtagctagaattcactttgtcttccttagtgatctgcatgacataatctcataatcaatagaagtaaaaggagagtaggtcattacccataactaaggggggcgaacgtctataattctatgtgttctttctatttatttattatccttaattccttgttggtgattaatcagtgtttgttaggctctgagtcagttggtaattttcccagtcaagatttttagtactttcattgagagcttcaacattcttacgaagatctcatctctttcccaatatttgatggctatggatcccaatgtttgtgttccaccacctggtgacaattttgccaactctgcctggccacctcgagcaaacccacctgatgggttccgactagaaggcctagttaatattaagcaagatcaacaaatactgggcagggccctaccaatgctagacaacctgcccaaagtaccatgggggtcctttaacaaggactacgcccaagtatacactggagaaactaggcctagggttggccaacctagtgttaatgaaccccatattgactttctgcatgattgtgagctagccaggataagagaggccatagggaaagtctaagatcatactaaactcatccatgaacaagaagaaacacgtgctactgtgagtgatgatttcgcccagcagagatgcacattccaggaatggatggatagacaagtcgtgatcctacaagcccactaggcaaagttgaaccactagaataggtaggcaaataaattgattagaagattcaataaaatggctagatctcgggttgaaaagctgcctctcataagggatccccttaatggctgaaggatcgtgggaaaacctcacacccggtgggcccaactacttaccatgcagggccacctcccattcagccaaataatgaagaaatcttttgtaaaaaggcatacggtaggactaaccaactccaagacctgtgtaaggatgaaaggagggaagataatccacctaactagggccgaagtaggtctcgcagtggggagtcttaccccaaccttaatgaggatggtaccactagccaccccattgatgggcacactaaccagaaaactcataataacaccggtcgtaataacgaagttcctccctggaatgctcaaacgcagtctgacttgaggcctagggactctgtgtttgatagaatgggccctcgagttggagaataccttcagaataacttaaaccatagatggaataacaaggatagatatatctcgtcttaaaatgattcaccaagggcacaagataggccaactcctatcgacccatacgactaacctcctgccaacccaagagaggagtcgattgaacaaaggaagactagagttgatcatgcagtgcaagcacagttggattaactaaagagccttgtacatggcctttttggtccaaagcttttctacccagaaattgacagggctcaaggatcgtctttttttgcgtgcattaatgcatttcccctaccaactaagttcaagatgctaacttggaagatgtttaccaggaaagaagatcctttggcaaatatccaatactttgagatccaaatggatctggaaggggtgataggcaatgtcaattcctggatctttctagcgaccttgttcgacaccgcacaatagttgtattctaagctgtcctccaggagatttgattctagggacgttttcaccaatgaaaaaaccatctcaattggaggacttggttaaaataaaagaaaaaggttgggagaacctttgaaagattatattcaaaggttcatgaccgaggccacgaaagtcaattgtctgactgaaaaatggcggaatacaaccattttagggggtatcgtatatctgagtgacctttggtaagacatcagaaaaagatcaaccaacaatatgagagagtttcaagatctggctgacgattttataaaacttgaaaaaactgtttggtaggtgaaaattggcgaggtagaagacagctgcccccaaaaacacagtaccaatactgcccaactccaaaccaacaacaataatggagggaaactgaataataatagttttggataaggaaatggaaggaaagggaaattaaacaattcccctacacaacaacactcttgggaaaaggaggagaagttcacttccttcaccgtcctgacagacacttctgagactatctaatggcaacacaagccattgttccctacaagaagccacctcggatgaaaaaagacatcaataagagggatcccaccaagttctgctgattccataaagattttggccatgacactaatgagtatataaacttgaaagaagaggttgagttcgtgataagaaggaataatccccacctatgtcggtatgtcggagccaaccaaaactaggcacaagtccaataaaataacaacttattggccccactggttcctggtcatttacaagtcatcatcagtggaccccacattattggggatttaaacaaagcactggacatatacgataaaactctttgtcatgagcaaagaaacaaagtcatggctgtagaggaatgaaatctaatgtagccaaaggtagaagagcctaccatcatctttactgaagaagatgatgcccatgtcagattccctcataatgaccctctggtcataaccactaaaatagggaatatgagggtagcgcactacatggtggatgatggatcctcttcgaacatcattttcaagacagtgtatgagaatatgggacttcatttgaaagatctaacaccctgtatccagcttatgtatgggttctcgaaccaaggactggatcctctagtgtatatccgattgccattgacaatcgatgaaagtcttgcacaaaatgcagtcttggtctaattcataattatagacatggaatctgcattcaatgtcaagatagggtgaccaaccctgtatgacctaaaatcaatcacttcaatttaccatatatgcatcaagtttccaatcaagcatggtgtcaggtgcctaaggggagaccaatattctactcagtaatgttacaacatcgctctttccaaagaaaaaaggaagaccttcccaccaagagctcgaacaatgagtccggcaaagggcattaatgatccacccaaggcaaggaaacagacatagatcctcgttttggggatcctaccaatagatttggacaagtggaggaattagaagaagcaaagatcaacccttccatgttgaccaagaaactaaaaattagtcaaggtttagcagtacaaataaaattcaaattgatcaaatttctaagggcaaatcttgacatttttgcttggtcacatgaagacatggtgggaatcaatccatttataatttctcatgcccttaatatagatccaaacatccatccagtacaacaaaaatggaggctacttgataaagagcaagcacaagcattgaaagatgaagttcaaaagctacgcgtaaataactgttcgaaatattttacctggatcttagatttactaacaa

SEQ ID NO: 113362 - DNA, 1514 bp, Cannabis sativa
tgttaatcaacataattgttagtaaatctggatcttggtaaaatgttcccaacatttagttggaaaattaaaggcaactagcatttcctttagaaaatcccattccatagtatcattcgccttttgaagatcgagcttaatcatacaacaaggcttgtttgtttttcttccatagtacctaattaaatcttgacaaatcattatattatgagcaatatatctcccttgaacgaatcctccttaattttgtgagacaatatcagggataatctcttttaatctagcacatatcgtcttagttgctattttgtaaataacattacaccatgcaataggtcaaaaatcactcacattgttagaacacttcaattttgggatgagggtcagcatagtagagtttgtctcctttaacaaagtacaagaatccaaaaaggaagtaattgcagcaatgatgtcttccccaatcaattccaaattgtcttgacagaaggagcttccgaatctgtccggacttggggctttgataccagggattctaaaaaccgctactttaacttcctctccaaaataattcttctccagcaattgtatatgttctatagtaagtaataggccttgttggacaagctttttgttaacatatctcctattctgcatcttggagcctaacaggttttgctagaaagataaaaaagtaacactaacctcattaggttgatctactcttgtaccttccctattagtaattgagaaaatgttattttggctccttctgtgcttgagttccttgtgaaacaactctgagtttgagtcaccctccttgatcccctggagcttaattttctactgcataaaagagtagtaggctttttgagtttcaaggactttatttttagcattcaattcttgttcctggaaggttggattaagtggatccttgtgaagattatcttggctctcctcaaactgcttcttagccaacatattagcactttgaatatttgaaaatccatccctattaatgctcctaaacacctgcttaagggattttaattttgtcacaatcttgaatatttcagtaccattaacaggttgattccaagccttttccactagctgcttataatgtggatcagcctccacattttaaaatatttaaaaggcctttttccagtaataagtgtcgggtagacacttaaaatgtcaagggaatgatcaaaaagcccttcatttaggaacaatgcttcgacattttgaaataagtctgtccaagcacggttagccatcactttatcagtcttagaacatattctatctacaccttgttgcttgttactccaagtatagtaattatccgtatacttcacatcctctacttggaaaaacgacacacattgctgaaattagaagggtagatatctcgacctatcaccaatgctttcttccttctctagaatatcattgaagttccccgagattagcaatggatctttttgctgggttttatgccctaa

SEQ ID NO: 113363 - DNA, 4285 bp, Cannabis sativa
tcaaagaacaatcaagagagtaataattaaattagaagtgaataaaagaacaaaagaacctagtatttgttgctatcacaaattcaatgtcgccaattgcctaatactacaatcaccaagtgaaaaaaaaaataacaaaccaaccaccaagtgaaagctccaatctaaaaaacaaatacatatatattatagagattaaaaaagaatgagagaaagaggaagaatgagataaaaatgggcatgtcaattgtgtatttatataataattgtacataatattaacattaacgttatgttatgggcaactaccaaaaataacctttcctatttttaatattaattaatatctttttatattctcaaaaaaataaaaataaataggcccctattattttggggccctgtgcaactgcccatgttgcagaggctattagccggggcagcttatgatatttctcacttctaagagtttgtttctaaatctgaattacaatcggtccagtttgtggataatcactttacttggaagcatggatcctctcttgagcgtcttaattggggccttgctaccaaaaactagtttgattcctttccaaatgtcactcatcatcatataggttttatggctcagatcatagagttcttaagcttgttcttaatgatgatagtataattaatagatctaaaagagggttattttttaaaactactaactcactaagccttctttctttgatacggttagttgctcttggtctaaggcttgtaatattaccaaccatttagataagctaatcaccaaacagactaactgtattaattctattaaaagctggaaacactcagttgataagtttagttctagaattggtcatattgacaatattctctgtttacccagtttttcggcaactaaatatttttagagcttaagaaagtgaaggtagtataaatagcagaataacaaatacgagattttttacgtggttcaggcattaactatccttagtccacgagtccattttattaggcaacttggccggtaactgcttttacaaatagagatacaatggattggaactccatttttcttttgttcctcttgaaaaaagaggaagcttagtaagaatattttggagttttttggctgtaaggttatacaaaatgtgtttttggataatgacgaaagaatcttctctcttcaagagcccgatcccccttgcttgtggtttttcagggatatttataggccaacttctttgcatgtgcttccttagatggatcatcattgaggtgaaatttcaaccgttggatcgataggtggcatttttcccatatggcatttaagggtgtcagatcgtacaggttgggcctcatacgcgtgtcatccaaggacttctcctttttgaatttcctttatctctagtcgttggatcatttggtcaggtacacaacaacgcgcttgctctgtatgatagcgtgtcgtgggagacaacctctgacgtcgtacctaaacaagcctaatcactcaatctgtagcccaacacgtgtaggcagagcctctacgggctaaaggcgtagcccgatttaacgtgtctcaaaatgccttggcccctctgggaaaactcatactcttctcgggagtagatggctttagttcctaaaatggagggagactttggctcacgaatacctattgtgttgctagcagtcagggaacttcctatcacagaaactcttcccgcgaagttggtgcctttatcttcccggagcatcaattgaggaaattggttagctaatgactccttaacctttcttgattagaatccacgtgtcatgattacaaaaatgcgaataacatttacccccaagcttctgaggcgtaccatggtccgggagcttgtagtatcttttcctgagcgatttcgagcacgtgggagttatgacaagctctttatcacattacgtcatcagccgccaaatggagtgccactgcctagtcggtataatttcttctattttctcgtcacggttttaaatgctaacttttgagttttgcgcgcgtgctttgtgtgtgttttgtgggatgccaaaaaatagcggcggttggatttgagcagacttttcattttctaagcacttctcacgatgcatgcaatgatgaaagtcaaccgttgggaggcgagacaccttagcttcccacttatccaactgtcagatgtccctcgggcaaacaagtcgaactattgcttcttgtggaaggcacctcttcttggtagccattgaatactttcaacatccattccacactttacattttttctacgtgttgcaccagagttgtttagcttcattcctccctctattcttgacacctccccacccaggcacgtactctgtcgacaagggcgcaacaccaggatcatcagcctcattctctcttaacaagtggtaagttttcatcatcgtttaattgttatagagctatgagggaattgtgcatgttgcgtacggctacttgcactagggatatcagtatcgtgcttgcagtctttgagagtcctggggtcctacgatgtgctgacccgttttactgttgtatcgacttatggtaggtatatcagatctgcattggataggaccagttcttccaaagcggtatgcaataatgcccctggtaggaaaaggcaaaggcctgaggcggccactcttgaaagtggggcccacccccagcgtcatgatccaccactgaggttgggccagcctcggtcataccacccctcgaccattccaaaaataccctcagtggggttcactttcccgaggaagaccattctgtttaatcctctcgccatgcagaaggagagggaagtgaacaaggctctgaaggggcgcttggaggaagacaagctgcaagttcgtagaagggccactctgctctccatggtccgtaaggctgaaactttagacggcatgcacaccctaccccctattgggccaaccatggaggttgaaccttggaaaagcacctggcttttaaggtggggagagaggctgcccccttcgccgccgagctcctggatcacgtggttgggaacgcttcagagctgcccatggagacttgggcatcctgcagcagctttgtcgtcttcacgctagcccactctaccaagcagcacgcagttggggtaaggcctcaagacattttcttcctcttttctttctttttgttatgttctgcccctattctgatactttggcctttctaccttggcttattttgaaaggtggccttactggcggagaggactgcctaagaggccagcacgctagtgacagaattggagccatgcccactgctgccttagactcttaggcatttttcttaccttggtccttgtcagcccattattttagctaattatgcaacccgatggactaaacttataagaaatccacaaagatttgtaagaaggaattcaggcgtatttttctttttcaagaattttggccaaatacgcatcttctcctcagattcgtacttaagtttagcctttgaggaaagaattaaaacgcgtttctcttgggaagacttagttgaaaatgtttcttgcttttggttgcatatgtacacttgagctagtaaccttgacaaacagacgtaagaagttacagttgtcagcaatcgggcgtaccataccccctaaatgagctgggaactttggtctcaaattctcagtcatttgcttggaacctaactcgtgtcctttgaggacaaggtttgagtgtgctctgacttagcttcgggaagcttactattcatccaggccatgtatttcctctccgtgactacttggaggggaattgttgaaagtttagcagtaatctcccggcttccatgagaaagttgtggggttgtagttgaaaacctagttgcatgactggccccaaatgatccctctatgacatggactttttaagggaaaacataggctctcgcggcacgacatacttttggtttcctagagagaaagttgggcctacatccctgcgcggacaattttcttgtgctgaggtctgtttcaataagcgagattcatgttgaattttgtagtggcaaacttttggctttcactaggaaaggctaaaggtgctaaacaaattcaggctatgactttgcttgtaaaagctggagggtgaaacatcatcaggcgtgtaacagacttcaagcagttcgttcattacgggaaggagggttgaagacgttgttgggttttgtgcccta

SEQ ID NO: 113364 - DNA, 991 bp, Cannabis sativa
tggtaataaataaaagatttggacatccacataattaataatatttataacaattcttttatttttcaggataaaaggttcgacaccccgtatacaaatgatgagactaatgtttattacattttaatttatgtttatattttttcattaagtaattagttttatataatttacgatttgtatatttttttttattaacttagttaaatagattttgatattacaaatatttttaaattacaaataatgttaaattaattatttttgttgttatataaaattgtaataatctaaaatgttcaagctggtgaaaaaaaaggcataaaatttgtattttttctctattttaaaatgcaacataaaaaaaatgttgttgtaaaacttaaattttttttgttttggcaccatcactcatagtataggtgattgtgcaaaacaatgagtaattcttcttagtattgtcgataatttttaagtgtcaggaaatatttttctgacatttttcaactgagcaattttatagatatgtttaattataaggaacataataggagttaaagataaacacctgcaataaatatatgtattaggggtgacaaaagtcactcctaaaactatagaaaattacctctaatgattattagaagcaacaagtcgctcttaaaaagtcgcctctaatatttcgcgtctacaagtactattacgagcaacaaaaaagtcacctataattatgggcaataatgttgcccctaaaagtaatcgacgaaattttgaacttgcgatagtataaaattacccctaaaaagcatttccagaaaagtattttttatttttaagaacaacatatatgtcgctcctaaaagtttttcaattaaaaaaaatatttatcatatatattaacacacaccatataaatattcatatatatatggaggaggtttcaatggttacatttttattgtagatcggaagagcggttcagcaggaatgc

SEQ ID NO: 113365 - DNA, 2452 bp, Cannabis sativa
aattaatatatatatatgtgtatagcggttttatccaaaaaaaaaaccgaccatttaatggcggttttaaccgttagcgggttttttagtttttggtttcgtcagtttcagttctaatggtgttcggtaggtcggtttgaacgggttttttaattttctagattttatgctcacccctaatggtggctaccagaaaaaccactattttattgccaactgctcgtaattgagacgatgcaatggacaatatggacccacctcttgcgatgcacacccaattgggcatagccagggttagggaaacatctgaagttggcggccatcctatgaatacggcccaacttcaggagaaaaccccatcgacgaagacaagactgaagatctcgagggcaaaaatgacgatgaggttgatggtgagaatgacataaaatttaaagatagatattacaaagatgggtattattatgagcaagattcggacgtactttagatgtctaatgagcttgctgagacccaacaaaagttggagtgcaaaaagcgttcaccctctagatgtaaaaaatactaatgcagctgtaagccaggcttgatgagctagaagaggtttctaaagaaaatgctccagaagagcctatccacaaggagagtaaacctataatgaaggcaaaccccaatgtcggaccctctgcccctgcaaaggacaaaggaaaaggaaaggtgggtgagcccaaaatcaaaactgctcctgttgctcttgggaacaatgtgaatactgccaaccaacctctatggagaaagaaggccaccgatgcccctgggctaggatgctcttctgatctgcgaggtagggttctacaagatgatgggcctggagctctggtatagaggcttactgtttgagtttgaggatagaaaaactgccctagtgattctgttaactaagacgagagggtagaaataatttctcttggagacaattggtccactattgacctctatacatgccaaatgagaaaaagctaagggagagaagggaaggccttgtagaaataatctctagaatcacatcaatgacaagatctgtgcacgtgagcttctggatagtgacaccaagcgtctggaagagcaaatagacaccttaaccaagcttatgaggaaatagagtggagtcctctcaaacttggaggacgaagatccaaaaccttgcatcaggaaggctatcaaggctctgctacttgagaactttaagattcccatattaacttgtatgagggcaggacagacccacgagcacatttttcaaaatataacaaacttatgaaagtggtgaaagctagcgatgatgccaagtgcctttgtttctcgttgacactaaccgagtcaattgaagattagtggaaaaggcttccacttagatcaattcatggttggaaggatttacagtatacattccaaaagcagttcataactatgcctgagactatgacatggaggttagatccttgaccaacatcaagcaacaggctagagagagtcttaaaaactttatccagaggatgatggaagcagcgactaagacaaaagctagtgatgacctgaaacttattaccctttagtctggattaactgttggctccttcttatggagagaaatgcaaaggaaaagcacagaaacattgttagaattcatgtcaatagcccaaagaatcatcaacttggaagatgcttatacttaagcattcagagttgctctagccatagcttcgtctgtcagcaaccttacttttactctgcaattctcagttctggttgtacaagttgccagaagtcagtttacaactcccacagtttatggacccgttacctttgggcacgcgcctgcacaaactaatttctctagctatggagtgatacaaaccagatgtagtaccgttcttaaacaagtaaaaacagaagttccagaatcaaatgtgagttagtctcagaataagagaagccaaaaaaatcagaatcggagcgaggctccgaagaaaggaagaaaccaatatgaacctaagtacactgagtatactagcctaatcgatactcgagaaaaggtttacaaggaaacttgcactatggtccattttaagaagcctcccagaatgtaccaaggagggaagtaaaaaaaggaccaaggtaagaaatgcgagtaccatggagatgttggtcataccaccaacaagcgtggccatctaaaagacgagatagagacgtcggccagagtaggggcatctcgatcagtgggtacaaatacccataatctatcccggatacggtatagctcacagacagttcgaattgacttaggcaaaaattctcagtcgaatgacttaggcacaaattcctaatcctcatgaaaagttttatggtatctctagtgattacttgatcttaagcaagtattgaatat

SEQ ID NO: 113366 - DNA, 7211 bp, Cannabis sativa
ctagggtggttcctccgccccttgggcttaagtactctcgtactttgcccctttggcatggtttttcctctaggattagaagggcgttcaagttcgaaagcactggtggtcttctgcgtcctcaagggctgtctagccgaatttgtgtcttttcgaagaggtttaggaggcgatttttgtgggggctcatctacattgcctttacctttatccttacgagaatttgaggtttcggtctcaattttcctgtgagcacgctcttcggccatgacttcccccgaagggtcatcatcggactccaccaagtcctcgaatcttttttggaggtgctccatcattctcttcattttttcaatgaacttcctttgttttgctaactctgtccgagtagcctctagttctttggtcactcgcagtaaattcaggtcatggtcatagtattaaccatctttgcaatactcatccttcacatatccatcgtcgtcatcctcctctttcgtatcttcaaggttttggtcatcatcaatgccatcaagcacgttctcggcatcctttcttcggttctcgacattggtcataccttcttctcttacaccacctggttggagaccggaggcaagggagtctacttcctccataagagtatccatgggagttttcttgcttaagttctttcgagtatttaccatggttgaggtggtgcagtgactagcaaactttcctccgctctcaatgaaactacaaaaatatttactgagattttcaaacagtaataaaacagagcttaagagagatataaaatgttaaataaaagaggtaatttttatgtggtctgggtgttaataatccctagttcacaagtccgttgtattagccttacaggcgaatgtttgaatattacaaatgttacaatataaaccctagctctgtattcctattgtttctcttgaaggagaagaaagctaataagaattttagcagaggttcggtaagtatgaaaatggtcatcctttgtacatgaaaaatgagagtatttatatgcatacatgtgggtaagggcatacccttcacccacctagggtttcgtactcaacacgccaaaagggctgatattacatcatgatgatttgaccgttggttggtaagaagcttgcccatcatgtggtgtacggctactgtaaggaattttttgtgaatgaggatacatgtttctcaaaggtttcaccttgaaaaattattgtctaggtaagtcgttagacaaaaagggagcttcaaaggcacgtacgtgcactaccatggtctaacgcaagggacacgatttgatttggtatcagaagataaataatcgtcactttgaactccagatggaatattgttaaataggtttcaagatcattgagtcaagtccttctcgaattacactaacccactaccttcctggaatactcatagcttcaggggactttaatactccttagtggcagatgaatagtgggagtcctgatatcctttctgtactcactgatatggagaaccttcgactaactcctggaagataatgtcttctgtgatgctattaaatgaaagacacatattgattgtggatagtcagaggtggcatctttccgtaattgccacgtagcaggcatccgagaatacgaataacaagtaaaattacatggctttagtatggggatgacaattcccattattttcatgtctttttgaaaaaaaaaaaaaaagaaggttgaaaataggattactacctttataagcaatggtgagattattgtgtattatgatcgtttcggccattatgtagatcactttcgaaactttttgagcaaaaaaagtaatgcaagcatggatgttgaattggattgtcttgatgggtccataaactgagtattcagtaacaagtcaacttgataaggctttttctaagggtgatgttaacgcatcaatgtttggtatacattccttgaaaagttcaggtcctggtggttttgggacgggtttctttaaaggtttatggaatgagattggtgatgagattgctagggttgtccttaattttttttccaagatggtgtgcttcctaaagtctcaatgaaattgttatctcgcttattcctacgattaaaaaatcactcctcactgtggattacaaacctatagcttgctgcaacaccctctacaaatgcttttccaaaatgctttgttctcgtctcttggaagtgctccccatcttgatccataacaaccaaggagctttcatttaaaactccttgttagctcatatcatcttaattttttaagacttgctcaaggggtacactagaaagaatgtcttggctagatgcttcttgaaaattgatctttgtaaagcctatgacactgtgattggcactttgtttcagagttgctcaagggtattttttcccctccctgtttatcaattgggtgttcatctgctcgaagggtacttcttattcgattatgatcaacaaccaggtccatggctcttttaaaggagagaaaggacttcgtcgaggtgatcccatttctcctttattgtttgtattgattatggaatacttgactcaattactccttcaagcttcgagaaaaaaaaaaaggctttgaaaccctctttgtaaagatgtgaagcttgttaatttttgctttgctgatgacctagttattttttgcgaaggtaacattactctgttcagattattcatcaaactattaataggttctgtgaagaaacatggcttgcaattaataaagccaagtcacaggcttactttggtggtgttaaggcaaattgcaagactcgtcacttgaacattatcaagatggaagatggagtatttcctctaaattatttaggggtatatttgaggccaacaaagtggagagcaggtgactgtggtgagattcttgacaaaattcagtggagattacataactgggctaataagaatctctcttttgctggaagagcccagcttatccattatctgcaaggagaagatttttggcaagctcccttaaaaactgattccaactggtacttttgaaaactcatgaaacttagagatgctattgacaaagaaattgcgttcaatgttgttttgaagagtaatttcaaagccgaacttttttatatctcgcttattgctgttgagatgaagtattatgacgctatttaacatagaatatgtgttctgaaataccgttttattgtttagcaagcattgaacaaccatctcttgattcgagatcaccttactaaatttttggatatgaactttgaaatggtggctactgatatcgcctcctagttcaattattttcagtggggcatttgacaatgaaagattggattttctggtgtaacaagcagcggcaaaatttaatatattctattaccaaagctttgattattgtacttttgagatttcttgttagtcaaggttagtctatctattaaactagccatcaaaactagaacaaagaattgattctactgttattaacatttggagcactatttgtaacctgtagttgctggttaattggtttaggtgctgtctcggttgcagctgccttcttttgtattttgttgtgtttaaaaattcttccttttcataaaaaaggaaaaccatatatctcaattttaaatttttataatcttatttaaatttataatcttattcaagattggagataccatcaattcaaactgtatttaatttgaaagtactatttttatcaatagacatttttgtatcttttaaaccggtcggtaactactagtgttcgaatttagcatttcttcctaatatattatttatcgacgacgtaaactagcataaaaatcacaatttacactcactgataggaaattaaagtctcaatatgtaccaacattgtaactaatatcagatcatccaaactccaaagtaacatcgactccacacgaccacactaagctgctcataataatgtcactactacacagacagaaaggagcaacggcaaacataagcttctaagataaaaattctaaaactttcaattggatcacatggcctgctccaatcctcaagatgatggagtagtcctaggagtgttagacctcgaaaacgatctggaagttgcacttgcactccgtcttcgactcctgctcctgcttctagagtagctaggttttttcccagttttaaagctactctggcttggggaaatacttcgggagctactccgccggtctgatgaaacgcttcgggagtagctcctcctagaaacctgtgtaggtgagggacttcttgagtagctcctcctagaaatctgtctaggtgagggacttcgtgagtagctccttctcgagcttctcctcctcacccttggtgacacactggatgatacagaacgagaacggtaacggtgcctccgttcgtagtaatagtaatctggtgagtagtccctggagcgataccttccaacataataacggccatctggcgagtagtccctccgatgatacctgcttccgtaataatgaccatctggagagtagtcccttgaatcataaggagagtaagaccggtcatggcggcgtggtgacctgctataaggagaccgtgatcgagaataggatctgtatctgtatcgcctatcatacggtgagtatgacctgagcctgtgtgatcttctacgtctgtaatcaggagagtaagatctgctcctgcttctgtcaggtgatgctcctggagagcgactcagactccgcctgtaaggagaatagctaggagatcgacgaggagagtagcttggagttcgtctccttcctgtaacaaaaaatgaatagatcaccacttggaagtattgagttaagccaactgtaatttgagatgtaacaaatgacaatgacttaccacgtattgttcttaggccaagataccgcccaggagttggagtacgcccccttcttctcctagcctgaatacagcataaagaataagacaaagagttgcctagctactcagaaagaaaacagaacgacaatacaacaatataaacttgaaactataaaagcctgttatatcattgctactctatgaaatgaaactgaaatagcagaatacataattaaaaaacaaaaaaggagagaaatgcagggcatacaaccccatagtctgatacttgatgttgtatttgatttgtttgtttagttgaggttttgattttggtgaagagctgctaacctgctgccacaaacacttcaagtggaacaagcaaacaactcaaataaaaaaaataacaaacctctcggaaactcttgatacacaacttgtaattgagcgggataacagttgaattaggttggacaacaagtaacaagtggtcaaattattaaacatgaaattgttttaccttctcaaccgtaattacacggccttcaagtacagaacggtccaagtacttaatacagcgctcagcctcttcaagttttgacattgtgacaaatccaaagccacgggattctcttgtccatggatcaaccacaagatgaacatccaccacctggaaaaaaaaaaaaaaaaacatcaataaaacaatgaaagaatagtgttataaaacaaaattccataactagaaaaaagataaaagaaaagtcaagcaaccattcataccgtcccttcagatgcaaaatgcttctcgagatctatcttcgtgatcctaggtgacaacccggtaacgtacaaattgttacccggattctcaacatcactcattggagtcctgccaaacaatatacaatagaaacaggtataattatcgaaacatcaaagtaaagccccgtataaaagcagtttatatttagataagggtattaccttgatcgacttctcgaccttgatcgggacagagacctcgagatggaccgaccgtatcgcttgatcggagatggcgagcgagaatacctgaaatattattaaatacagactcataagtaaacgaaagaccaaccagtaaacctcgacagaataaaacttcctcaaaaacaaaacgcaccttgaccttctggagtacgacatctgccaaaaatatgaaagcttgttagagaacgatcgccaaatatcgtgtgtgtactagaacaaattatatcgaaaaatttcataattttctacttaaaaattaattatcaaaattgatctttcaaggatgaaacgaaaagatcaagaaagaagagttgttcagggttaagagaagtattcttaagaagaatttgcctagaaaacgtactctgccctctgaacgaaaatatgaaaaattgaaaatgtttatagctgttcccatatgcaaaacaagaaagaattgtagtaattaatatgcgaattttccaatcacaaatcatactcaacaaaatagcaattacaaaacggtatacagaatcttctattgtttgggaaggcaaattcgaaaattttgcgtatgaatttcaataaatatatacatctaaatctaataacaaagtgtggaaattaaactatcaaactcgtaataataataaaattacgatatcaaagttagaaataaaaactcaccactgcaaagcaatgaagaaacaattgaagaagaattcagaaagatttccctagctccgcaaacctcgaagcgaaaaataccagtttaaacgaaaattggacacttaagacaggcgaaattgattttataggtgaaattcaggggaaggttctggaggatcggacgccaaaaaacattaaaatatgttataatattttagcggccctggccctggccctgccttttattttccctgtacggaagataaaaggtcttgccacgtagtgcatctcaaggagcttttggtaaaagcagttttatcgcgttttctggtagcccgtgatatgaaacaatgagatccgacggtgtaaaataaatcaatcactattgtatgtatgcatccgtacatatgtaacgtgggccctcagatttgtaacgacacgtggttgatgcaaagaaggctcatttggtttgtagggtgaattgttatataagatcatttctaatggaatatctacaattagtaaacatctcgcgttttgcggcgaatatataaaatattttaaattatatataaaaaaaattgttgttactgatatttcgcaacacca

SEQ ID NO: 113367 - DNA, 2605 bp, Cannabis sativa
atatttaataattgcttgttgtggtgtttaataagtatcccatttttgacatataaagagggaaaatattgtggttaattgcaatagattttcccaacaaaaaatctacaaaataatttttccatatattattcccatctttaaaaagaaaaataggtgtgaaaaaatgagatagaagaaacacttttgataatttttacagttgtcacatataaagtgtccatattggtgagagaagattataggtgattgaattagcttactcttagcttgatagataagaaactctatgcatctttttctttttctttcttttttttctttttttgggtctagtcagttggtgcatgctccattttgtttattatgattgccacttactcagtgggtttctctgctttaatgagtctagtctggtcacacttcaaataatgcaaccgaaaccactaaacaaattgtatgtcgctcagcttattcccactgtaatagacacatatatatagggtgtatatcatcattagtgtttttttaatttattttgcttattctctgtttattgtttattgtgtgtcacatgtatgatcaattagaatatgtcagctaaatatgattttaaagtataatagcagtcagaaagtaatccctcatgggaactggacgtgttcgatcagccaaactagttagctcagttttgtagatagaaagttgttaatacctttcatttttcctagaaaaatttgtgataataacttgggggcgaagatttgcccacttctatagtgatatccattagtaacaaaaaggatccattacattattcactctatacataaatttctcattttccacaacttccataactcataagaaactttatttggattcttaacacggatatctactacaaaatttgtctttagaggcaattattttagttgaattataaaaaaatgaaagctaaagcctttcttgctaaaggagttttaagcacctatatcggcggttattatattgttatgtaataactgttgcaataggggtcacgcaatttgtttgtcaccttatcatcaaaattctcctcgatctgtgtgctgacatcgaacaactgtcgttgcaatactccaagcctcacgggctttcctagggtgcgtggagtctatgggcaacgaaatgatggcacatatgcagtgcaagccgtaaccatcgaaagtcttcaacctttcgtattccatgatatggaagatgaatagatcactttttcaaagcaacccacatgttcaaagatgcttggaggtaaatgttatccatgttttcagatgaggaacacgtgacattttagaggagtattcgatccgcgtaatgtcttgcccaagccttcctgtatgcgaaggcccagtccaaactgaaaatgggccccaactcatcatatctccaggagccttatccttgagaataagaccctcctaccctcaaaagcccactcagccttctagaagatggagcggacgacatcatctgaacgagaaaatgaagtatataaggacaataagcccaagaggtgcgtccagaaggccttataaggtgacgtagttgatctctgacgcctgggcctaccaaatcagatcatgtcccctatgtcaggacatggtagtgcgtgtaccacaaggagagatagattccctttgttaaacgacgtccctctgacatttttgtttactgtaactacacccacgcatgacacttgtccaaattaaccgcacgagctctcctctgtatggacacttccatcccacaagccagagttctatcgtgggcctcaaagtcatgtatttaatgtatttaccccaatagtgagcctatttactcacagaaaccctcacgggtcgcgagtatgcccagacctagatctaagcctatataaacctttatcccttcatgaatggggacggatagaaacatactgatagatctcttctaagctttcttcttcattaagagaaacccaaaggaaaaatactatagcatattttaaggtttttaaagttgtaaaaccccatctgtaatacattcaaagccttaagacaaatacattgactcgtgcactaagatttattaacacctgaactacgtaaaaatctctttctcattaactaagtcgtttatttaacttcttaaagttcttaaacatttagttttcgaaaatctcgataaacaattttaaataaaacataattcaatataatactttacaatataatacaacataacaaacgaagtctaatatattgtttctcattcccattcatttttttttataaatttaaaaaataatgaaaaaatattatttatctacaataatgggtaacattgattattaatataataattattattatttttaaatataaatgaactcttccaataaataaactataggtaatgatttaaaaaaaaaaaaccaaacaaattttcatttttttataaagttcccaaatggttcacttctccatttctaaactatatcgtgtaattagctacatcgatcctttcttggaaaaaataaaagatatataaaaaaaaaaaaagagtagagagaacttgttta

SEQ ID NO: 113368 - DNA, 2469 bp, Cannabis sativa
ggaaagctcgttccgagctctatatgtttatctatattttgaatgccaatttatattatgtgaaaatggatttaggttgtgaatcccaaaaattgtgattaggattaccgccgcttggtcaggagcacccagagatttggaatctccgcgtttgcaggacatcaggtaagatattagtttgcatgtagagttaagtgcggtggcgctcatgttttatattatgattgtgactaattgagaaccaggattagggttattatcctaaaatgagcggttatatgatctagggttattacgctagtaattaaaagatttgtagtgttatgccatgcttaatatgttgtaataaagaattatgcgcctaaggcataattaagctagaatcgataaactagtacctttagtttaattatggcggtctagggttattaccctagaatattatgaaggtaagaacgtgatgatgtatggtaatattgttaatcaagtgaagacatgagatagggttattacccttaataggtgttattttgaggatgcagtaatatgttgtaggagtgattatttagtatgcaagttagggttattaacctatgattttatatgttatagtatatatagagtgcacgcatttatgttaagagttatatgtataagacatagctgggttagacctggtatatatcactatgataaaccatagaaagaacttaatgtatgggttacatatatatatgaatagggtcatgcaagaaaggcataaccaggttagactcagtaactataaccgagataaaccctactaaagccttattataaatagacgtgtgagcgtaacccgtaagtctacgttacatagacataaatagacgtgtgagcgtaatacgtgggtctatgccacatagacatatataggcgtgtgagcataacacgtaagtctatatcaaatagacaaatagtttggtggcaccattaattatgtgttatatatattgagattatgggttatgcgttcaaggcaaaagagatgaaccgttctaaggccttattgtatctagacgtttgagcgtaacacgagggtctacgccacgtagacataattaggcgtgtgagcgtagcacgcgggtctatcttaaacacataaatatgaatggtattattatatatgtcatatgttaaatataaatgttgatattatttactgtcttactgggcttggctcacgggtgctctactatgcataaaagggtaaatcagtttgtgattagccatgagagcgagagcatggcgattcttgtacatgttcatgccacactagaccaagcaggttggggtctacttgtgatgtacttttgtatctctgatttgccgcttaggtcgactagtgaaaaggacttgtaatattttgtaaaatatttttgggatcccgaattatgtcacttttgtttgtaaagtttaaagttattacaagttttattttcattctgttttagatcaaagtttaaattccccgcgcatatctatctagtaatgttgtattaggggattagggtttcattattgattagcgtagcgtgcctaatagttagggcgttatagaaggtctgccttccaggttcaaaaatttcttatagaagccaaggccctctacgattctatagcgaaaaggcttagggtgggttttcttcccatacagtgtcgtaaggggccaccacctgtacctgttagatcacaggagtgatggtgatgcttttttcggatacaaaattagtttttgtccccccatttcaggtcatagtacaaggcatgcacaccatcgtacctgcccattatccaacgaccatgtgaggggatgattcactcatcgtacctctacgcatcgcacaatggaaatatttctttcttaagctctaaatatttggtttccaaaaatctcggtaaacattttggtgctttcattgagagctaaggaaagatagaaacatgtatagtgtttgccatcacgagtctcaagttgcaataaggggaatctatccaaggaaaggaaaaaagacacagcttgactatccaccaagatttggcctgaagacgaagatttgctggccaagggcgtcaccaagaaaaaaggcctacagccatgtccaagcaagaaaaatggagaaggtggacgaaaacagtcttggcgctcttgcaatgcccatgcatatttggaaaaactcaaatccgcatgatcaaccatttaagagcacggcaggccaccagtgctctcaaaccctggcgtcccgctgctcacaaggacatgaccatgaaaaatggcaagatatgaagaatatttgggtctggcagtgaagtccaaaaaatttatgccagcaccaagtaacctacggaggactacagaatataacacacttatcaaggtaagcatttcatcaagcaacttactttagtaagatgctggagcatttttct

SEQ ID NO: 113369 - DNA, 5355 bp, Cannabis sativa
  modified_base (5294)..(5324): a, c, t, g, unknown or other
caagacacaatcgaattcaataaggaaaagacaataatcaaagtttcctttaaaaaccaactttccataagagaattgcttttcttacaagaagtttccatacaagaaaggatcaactgaaatatgcatctttccaaacatagaaaagagcaataaaaactgaatatacaaggtaagacaatcgggtatgaaagcaaaaatatcttaccataaaagaaaaaatattttggcatctaacttgccaaaaaagactttacaagaagattaaacacgaaatataaacaaacatgttaaaacactatatatatataaataatatatatcatatagaataattttatggtagtaaaattagttttgttcttatactatacaaatatattttaagcaattgataacttttaagggtacacattatttaatatggagttgtgtctcagattaaatttagtctttaaaattttgacacctcatttttcaaaaattaaaaaaaaatgaccaaaatggaaaaattaaaaagctttaattgtttattaaaaagaaaaaaaaaggttatgtagctctggtttcaacctaacatagcatcttcaatagaagaagcgattgttgtttccagtggggcttttaattacggattgtgttgctcttgtacaatcctctcttttgtttcctatttcaattaattttgttaaacggtccgggaaccaggcgactaactttttagctcgttctgctggttctattcctgactatgtttcctgtggcggttatgtcccttctggtttggaagctatcttgttagctgatttgatttaataaaaattaatttttttggttcgaaaaaaaaacatagcatctttaattggtctcaataaaaaaaatgaaaatggctctaattctcacttgagttcgaccaaaaaaagttagctctggttctcggttgagctggaccccaatcttgattttatttttctaaaagaggaaggtgtggcagtgagcaatgaaggaattggtggattggtaaacgagttatttcgaaagcaccatggatttagtttatatgaattggggaattattttttgttataaaatgtaaatttttgattgaatggtttgatttatgatgctgagaatatttaccaaatgcatttggttgaatcgtttaatttatgaaaacttgggggaaataggaaaaatatattgcaaactctatagagtcacgtatagatgtgccctttgttgctttggaaattatagcagtagcaacaaataatttttaaacttagagaagggtgttttatttttctaattatcctttccaagtgattaatctcaacaccaaatactcttgcaaaattgagatttttttttacattttttggctggaaaaagcaagagcgtcgtaattcacaccaccaatttcaaaatattattattattaacctgtgttctaaaatattattaaataataacaaaaattaaaaataatctaatacaccctaaatattcattattgttatacactcattcatttatcatccttagatttttaatttatggctgtaaaaatatccctaccatagagactgttatcccaaattgtgtacaactgacgtggtatgtccacatagtcaaaatagaagacttgtggaatacagcctgtcaagaattggacatgagtgctttgtatggtttaataattttgaagatgacaagactgccaagtagggtcaaataaggaagagttaacaactccaaagaaccttggtcggaccatcctggccggtcgatgaaggttgtatgctggctaggccttaaaaattcggttggctgactagaacgtgcagaatacccccaaacaacttaagaagttgcggggtccacaacaaggcttctagaagattctcaagctgacatacagttacgcgataggtccaacaacccatgaagatagagatattccctcaagatattagtcctatattttagggatttaattatccttttgtgtattttcaaataaaagataaaaaaatgttaatatccctattttgacgggatatctcttcctaataaaaattagaatatcttgtaagccatacactatataaaaggcatagggcacacgttaaaaaggatccagacccccagacccccttccacatgtatataacttctctttctcgaacctcacacaccacttaatgcctcttggatattaagtcaggtttcttcataagttcttcgtaagatctcactagttctttatctgtaacacattgttctcacatttataatactgaagaaagccttagctagaaatcacaaagttttaacctatgatctggatggtattatctcaagagtgaatacaactaaaagggaagtaattcattacccgttcatcaaggaggacgagcttctataaattcgtgtgttatttttattatttattattcttatttgcatgtggtgataatcaacaattaataaggctctgttgtcagttagctaaattttaagttaacattttggtgctttcattgagagcctttttttagtttcttcaaatcattctgatcaatcaccatggttctaaccagaagaactactaccttagatcctccttaggatcccatgacggtagatcccaatgttcgtgttccacccaccacaaaaggtcctactaatccagccaatcatgtgaatcctattgatcctgccattcctccaaggcaggaaccacccataggatctcttacagaaaagcaaatcagtgtggagcagcccgctgatgatactaatgagaatgtcccacgagtttatgcaggagaaactaggccaggagttggccaacttgctattggcaaaccttgttaacccaagatatgtttctaagagggggtgaattggaaaattaagctaatttctataaataaaaactttttaacacaaaactatgcaattaatcaactaaatcaagtaaatacaaataatatgacaaaaaattataaagagcaaataatcaaaattgtaaagtaaagagtttaagggtaagaaattgcaaactctcaatttttacaagtttcggtagaactaagccacctacgtccttggtcttcaaagatatagagctagatttgagttccactatcgagctaagttaacaagcttgactaacccttacaaccagaaatttttcaccaaggtatttccaaacctattacaatagttttgcaccgccaaactatcaacccctttctcggattgttgtaatgaccaagctgtcgacttttagctaatcctccgtgaaagccttgtactgggccacttttttggccaactccttagtctcggtattctgacgtactgactttgccaatagaaacaatgaagcacaatcaacacttggacaaaattaaaggagagcgtgaagaggaaacaaatcataaagtaagtataagggtttttacctagaaattggaagttgagttgaagggtggggaccctcttcaccgggaagccagtagagaaaaataaatattccctaagatcgtgggaacgtttggtgtggctagtggggcaatgagtgtctgagtacttctcgagcttataaaaacctacttttttacaattggtcttcattggttgagtcttgactccataaaagcacaagacttccttcgaggagggcacctcaaacttgttgattttacaaaaaaataccatccaaccaggagcttataggacggaggtattagctaaaacagggaaatcccaatgcaagcaatgagatctgcgaagaaattcctccgagggagatgtgttccacatgaaatatgaaccagctccaagcattgaaccctaccatgctcacggacgtagattccttcggggtggccatcctatgccacatcaatctcgaaatgttgagcattccgactccagtggcatacaactcaagcatcccatatgaacgcaagaaattctctttttggtccatctcctagatggattcgttgagtttctgagcagaagtgggataacctcaaggatggtagccaactgaagttcccctgcaaaaactcctacttgagttccctcagtggctatttctttgacaagggcgacattggacttatcctcgatttccactgcgtcaagatggaactctacattcaaatccatcactgacaaaagaaaggaagaaaaataccaagcaattagacacccactaccaaatgaaaaaataggcatcgagggaggcctccccaaaaattgcttggagaggtccccgcgaaacctataacttctaattactagttttctccagacaacctgaagcaataggtcggcaaccccggggaagctaccaaaacaacactaatgcaaaaaattctagaaaatgaagagccattttggagtcctaacaactccatgtaggcataaaagagcaaacatttttttggtgttcattcaagaacccttaatctactgttcaaccctaattccaagatccacgaagcatgcaaagcctatggaaaactgatggctacaccttaactatctacgctatattaacgctcttatggtacaagaaattcaaacacaatcctgccctagaattatgcttctacaggtaacattctaccattcaaacatacagaagatcctagacctaccttgaatttagcatttctatcctagatacaaaataacataaaattaacaaagcgtcgggatacttacttgatgtttggatggagaatggaaggttgtagtgaaaatctactcacgagcgttgaacctagtcgatcacatggtcatagttggcccgaacgtcaaagttctcaactagctaggggtggagaaagttaggatttataggttcgacgtttggaaaacggagtgaacggaggtttagaaagtactgaataaggcaatcaaaggcctcttgcattcactaattaagggcgatggcgaagcaaaagttgtttagaaaataagggttctggttgaaaagttgtagggggtttttgaaggttgaagatgatgaaaaaaatgaaaaatgggttcttgaaacctatttctacttccgttgggatccttgcaatttgaaatagatggcccagatcacttcttctagagagcatcttttgatccgacagatggggagttaaaaagattgcatttaatgctcaacccagacatttaatattcatcatttcacgtctcgtgtcctatacgcattaaaggaggggtcacctcaattgtccttgttggaaattattttnnnnnnnnnnnnnnnnnnnnnnnnnnnnnnnttattaacatcctaaataagaactttctaaa

SEQ ID NO: 113370 - DNA, 3890 bp, Cannabis sativa
atgtctccaacaacaaattaatataaataaaacaaaagtaaaaaattcaaattattgttgttgtttcacataagtattttatgaacagccctatataatacaatagattttttttttgatgaataccaagcaatgacaccagataagttggtatttcaagaggctttaattggaatcaaaactggtggtgaccgtgattaacagcgagaaaaaagaaaaaggtactatcatgtcgggtgaattcaataataaacttttgttggaattctaacttcctttctcctttcaaagcctatctagctgatggtgatgtcaaatattatgttcactagcatatccttcgttttgaccctggttcatttaaggatgtgcacataatttaccttccaccacttattgtagttcaacttattgtagttcaagctcttataattttaatttttttcctaggtgtatcattgttatttatatacttagcaagttttgccttcttcttctgttaacccctctccctttagaacaaaatgaggagctcatcatggtggaacgcatatttagttctcaccaaaaatccgcacaagagcaatgcccatctttaaagcaatggaacctgtgggcatctctcacagtgatttttctcccagaaatggctgagataaatttgatagcattgtggcaatccccacatattcgtaggttcttcaccacaagaataggctctccttctctagttgaaatgagcccaaatgcaactgcaagcttctcactatgatgtcctagtttaatctctcgttctccatccactacttcatcttcctttaccaaagaccatcttacatctggtacatagccgacttgcctaatctttattaacatctcttccaaataagaacaaatttctttgatcattgggtgggaactatcttcagccacaaaaacatgtatttgcttattcatctcaatccaactacatcctggtttcttcttcacaccgctgtcccgcataagctttctaatagttgctacttcctcccattttcctgcactagcatacatatttgccaacacgacatagggaacagcattcaaaggttctagctgaagaacttgattggccgccttcagtgctaatgccatgtttccgtgttttctactagcaccgagtaatgaagcccaaccaatagaaccagggctaaatggcattgtctcaatgaacttctccacttcatccagtttgcctgctcgacccaacatgtctatcatgcatgaataatgttctgcttcaggtactataccaaatttgtccttcatcatataaaaatacttcttaccttcctcaacgtttccattgtgagcacaagcagaaagtactgagataaatgttatacttgtaggtttgatactagtttggagcatttgctcaaaaagacggagtgattccatcccaataccatgctgagcatatcctgcaatcattgaattcaaggagacagagttgtgttctggcattctatcaaacaaccttcttgcatcatgaagattcccacattttgagtacattgtgataagagcattattcactgaaataatatttgaaggaatctcagatttgattgccaaagaatgaatttgtttcccttgagagggtgatgacaagttggagcacgcactaatcacacaaacaaagctacaatcgtcagggttgtgaccaacacgctgcatatgtctgaaacaatatagagcgtcttcagaaaattcatcatgttgagaatacccagaaaccattgtgttccaaagaaccagatccggtgaaggaatctcttcaaaaattttcctgcaatctaacataccaccaccacacttggaatataaatcaatcaagccactcccaacatgagagttttggttaaaacctgccttgattaacttagcatgaaactgaagcccacctatcaaatcctccacacatgtgaatgcagttaaaacactggccaaagtaaacatgtcaacatacaatcccctgctaaccaattcctgaaacaagttcagggctttagacccttcgcgatgctggccatatgccacaatcatcgaattccatgacacctcattcctcacctcctcacccattccatagaaaactttcttagcctcttccaagagcccatttttaccataatacgttaccagagaattgttgacagaagcaaaagaaactaacccacccgaaactgccagtgaatgcagctgcctaaccaaaccaacatccttaccagcagctgttattgcggctgacaaagtgaaaccatccatgtcaagatccatctttctcatctcctcaaacaagaacaaagcttgttgtgtctcacctcgatcagcataagcagaaatgagagtgttataagacactaaatctgggtgaggaatttgatcgaacagttggtgggcaatatggcttaatgattctttggcatatgcggcgactatggcgttgaaggagaagacattagggtctgggatgtggtcgaaggcgtgtcgagcagaggaaaggtggccgcatttggagtacaatagaataaaatgattggagagataggttgagggaggtagaagggacttgacgtatatggtgtgaagagattttcctgtgaacaggtctctctcggctatgcaggccttcaagagatggcgaaagctttgaagagtccataagatttggctcatgacttgttctttgatatctctgcaatccgtagttgacagggtagttaataaaccacaaagaatcataaaattcacttgagctattatgaaatgcatagactgatagactaattcactaaactggaccaacatagtccttctgctcctcaaaaactaattcaagaaacttttagatgaataaaaatatacactttctttctcatttctagcaacgagaagatttatccttaaaaacggcccaaccataataacaaagcaagacatatcatttaattgttttcatcaaaaaaattatgttgtacaattttaaaaacatcctggaaaacaaattaaagcaatgatagaaagaataaatgaacacaaaaacactttaaaattgagagataattttatctagaacacaattttcaacctattggctaaaagtttgaaaataaccttataaaaggtaagttaatcttaaaagcatggtttggtggtatcagattgccctgactttccccttattataataaccagatataccaacttctctccatgcaaacttgaaacttacacaataagccaaaatatatctatatataaatattattggaagttattttgactactacactaccactatatatatacatgatccctagctgatcagtctttagccttattatatttctactgtactgcttgagaaaaaaatctctataaatctctaaatacctattatatatacagtatatatatagcttgttatataaaagtggaaaaccaaggtattttacagctagtttgtaaagattattctaaacttaataattgcaaaaattgaagcctagttatttcgacaaattgagtcaagttccaattttctctgatgaaaaattcaaagatccaaaaattagattaaccaaacaaaaacaaattgaatcatttctaaaccgaccaacaacacactcattccctcattcaagagcaaaaattaaaaacacgaattcatgattcgaaatgcattttacttttttattacaaagttcacattaacaataataaaaattcaaaagagagatagattagagttagagacacaccttggaagaatgaatgtagagtgtcacgggctcaccttttcaggcagcagaacacccgtgcggcaccttgacttctctaag

SEQ ID NO: 113371 - DNA, 2217 bp, Cannabis sativa
aaaaaaatcgtacaaatatttaaaattatgtgaaactgtatttttgtaattacttttttgttatttttgtatatttgtgaaataatccaaaaaaaaaaaaaaatgggataggtaaaaacaataaaaaaatgccatgttctcttgatttggatttaaacagaaagattaaaatttcttttataaatagaaattagaaagtttgaatttgtataattttatacaattttaagttcttatttttatttttatgtttgacaataaaatttaaaaattataatatagtaatttaaaataaagtaaaaattgattgttttcaatttaattacataattcccatgcccttttaagaattagagaatatatttattgaaatattaaagagtaaaaatattagtaaaacaaacacatctaacctgataatttctactatttacactcaccaatttcaatttaaatatattttttctatcaaaatttaaatgaactaacttatcatatgaaaaaccacataaaaaaaaacatgttaaaacatacaaacaaagagttgagttaggaaaacataccattaggatctgaatagatatattgatgatgaggatgagccatagccatatatttcaacatgcatgcatgaaaaaattaatcgaaaccaaaataatgttaaaaaaaaaaagtattattctttctctggacgagtctcgctagataaattaaattatatacgtataactacattcaaaacatataaaattatttgagaagagaaaaataaaccgttcatccaattcttcgggggttgaaaatgatagccagttcggtagggttgattcgatttgagaaggctatctttttgtataatttcatttgaggcttcaaattcattgccaaccagagacatagacatatctctttctctctctctttaatttctataattaagctttgagaagtattattaggataattagaactagactttgttcatttacttcttataacttcttccttccttattcatataaatatatcatagaaaaaaacataaaataaacatacattaaaaaagaaagaaaaatcagtggacaggttagagattattttattttatattattttgtttttatcatgtatattgactcatgcctcaatattattgactcatcatcatgatgtgtaattaatctatatttatataaattattagtaaaaatccatgactttagctattagataggatctatggtctttaaatatttgtcttaattaaactttcaagaaagtcttaattagtaaagtattaattaattgtttaattagataagtaatttccttgtgaattgcgattgtcaataaaatacaaggatgcaatattaaaatattaaaaaagaaatcactttctcacattaattggcaaaatattttcaaaaaaaaaaaaaaatcaattcgaaaaattatgtatagtcagtcacaacttttttattattttttttatcaatattaaattatttagtgcttataattgagtctaatggtttctttcaatacaagaaatccaaggttttgaaaaccttggtttttatcccaattgacaacctcatcaccattagaccaaatttactacttgcatggtcacaattatataaatatatataatattcatttacacaatttttacttctttttatatcatgaaaacttaatttataatatccctctaattacaattgaaagaatcatttcaacttttagtatgacgtaaatatttaaatttaattttctattgtagataaatatttaagtttaatttcttatggtaataacaattaagttatatttctaaaatctctctaggtgtttggtcgttacatgtaaagtcattatctacttattattttcttattgatatatatttaaattaatttttaaataatctggaccaattaaaaactgccacgtggtaatttaattgacatttaatggccatgcacttacagaagtttcataattaaaatttaagtattattaccgtaaaaaattaaactcaagtatttatttgtaaccgagaattaaacttaaatatttatatcgcaaattagtcagtgtatactttaatgtaagttttttttctttgattagaataaagataaccaatttgttaataagaagataatgttagcccaagatatgtttccaagagggggggtgaattggaaattt

SEQ ID NO: 113372 - DNA, 1267 bp, Cannabis sativa
  modified_base (1230)..(1232): a, c, t, g, unknown or other
ttggtactttgattataaaagagggtatttatcaattaaaattattttagagttatatttaattaatgtgtaataaaaagagatagttttcaacttatcccgctatatagccactttgattacttatgaataatatacaaaatgatatttgtatattggaatatacaaatgatatgaatcaattaaaatcatgtataaatgattagaataactattgtcatacatttaaatttcacatactatttatacacaatgatgtgtaactcatctcaattacataattaaaaatgatagtgtaatacacacccctatatataattatctgtatatgtgtcaaaagtgtatgcaatttttgtgcatctctaacattaggtttaaagataaaggtaaaacttaaaatagcgtgttatatgtgactaaatggtaattggaatgtcagaagaaaaaaaatgattggagtggtcgtttattgtttatattttgatgatgtagttagaagagaatatacattaaaaacatatatcaatctattaatcattcatttaaaagaaattataaattaattaatcatatctaattaattcccaatcttcgtgtattatcatacatttaatttttttttttctttctttttgattttagaggttttggatattccatttctatcattgtatccaaatatgtatatatgtcttacccaatagtataggaacatccttgtagggtgtaggaaatgggtaaggagttggtctcaatggattaggtttaggatatatgatgagagctccaaagactgttgccctgagccaagaggagtgtgcatgccaccaaagagtgccttcttgtccaatgatattaaatttgtatgtatagctgtcaccacttcctatgggacattgggtcacatattctgggccatcggcccatccactctgaagttggaatattccatgcctttcatatattcaaaattttaatccaattaatacacatcactaaaacataatggactaaaaaagatatgaaattaagttaccatatgtgaatgaaatatatgtctccatccatttgattagtctatgaatctaagaaatataaatattttatacggtagtgtataatcccacattctaatttacacacgtaccaaaattataaacaagttttttacatgatagataacatagggtcatagtaaaaataaagggataattttttttttttttaaannnaaaaaaaaaaaaaaaacacacaaacacactctaaa

SEQ ID NO: 113373 - DNA, 2998 bp, Cannabis sativa
cacaaaaaatatgtgcttagaagatcattaattgttttgattgtaacaatagataattcatagtacatttgtgtcggagatataaattgttctatgtaattaaaagtgaaattcctagtctatagtagagtcatgatgaattaataaattaagaaatttacgagggtaaattttataacaatttattgaaagtttgattatataggctcatggttaccacaaagcctgtgataatatcatcttgtagaaatcaattaattggtttggttaatcaattaaaattcataaactaactatgtcatctttaagaatttacactaattataacgccctaacccgtaaggcgccacatgtggtttttataaattatcttataataataaattaacgatttacaaaaagtgaattaattaaaactttagaaactaattaaagtataacataaattcttttttttttttttttcaaaatattagtggattcagggattcccttgattacaaccttttactaaactgccactgtattagtttattacaaatattaaagtataatcaaaatattataaaagctggatcctgtgaactgagcgtaaaagacagtgggcttgatatgtacattcgccaagagacctataacttatggttgattcactctttttttcctaccaaaaaacacccgtgagtcatgaagactcaacaagaaaagcgaaaaaaatacaaatatcatatatagaataaaattctaagcagcaataaacatacactaaaacatataattttaacaactatttacaatataaacaaatgctagtaatcaactatttgtctaataaaacaaaccaatataaagtatcattaaccctcgttaccaactagttactaatatcactatcgttgcctaataaagcaaccaataagtaagaaacctaacaacagtttcaaattagagtaataactctttcgtattaacagtaattgccatatcataattttgacatgctatgaggtacaagtgatttttcttaccttaggtccaaagacaggtgtgcaagctgacttgagtggaatggtgctcgactatctctagacatatgtcacgacaacgacaataaggtaaataacttaatcaatcatgttttcagacctaaacttaaaactgaacaaacccctttcgataatagcgtagaaataacctaaatatcgataaaactcaaaaatataggtacaagaaaaacactccaaacggttcactattttcagaaaatggggttacaatctgggtaaaacagttcaccatttttgcattaccctatagaaatggttaactgtttctcactgcagaaacggccaaaaccttgtttttcaactaaaaccaacaaaaaactcctcaaaacctaatgaaattctccaaaccagtttataaacatacaaaaaatatatccaaccattcaaaccacaaaaatacataaaaatggaaactcaccattgttgagtgattttttaggttcttaaactcaactcacccaaccaaagcttaataaccttaaaaatctagaaattaacacttaaaaaaatttgaattgcactcaagaacatgctctgaacctaaccaaacaaactgttatcccaattttattctacctgacgtggcatgctcacgtaagccaagattgaggacacgtggaatgcaaccttgtcaatagtaggacaaagtctccttgcaaggcatggtagaaccgtcaagctacaagcaaaaagatttaagtaagccgttaagaagttgcacaaccatgtctggtcgaccaaagtggagtacataaatatctttacaggtttttcaaggtataaactctaacatatgttaaattaataaccataaaaataaacatgtaaacaatacatttaataaagtaaataaatttctatttgtcttattgataaatgtttatacatataagaaacatgaggttttatataggcataaaaccctaatagcgagcccttgacaagttgggtgggtggtgcctctcttcttcctttcgaccttggtcaaaagttattttgatttttatgcctaaggtaaagcccagctagaaattattcatcaataggtagccgctagttgcgatttgtgggggccctttgtcctaggcgaccattatctccgttccatttctagttgtttggagattctactagaacataatttggttaatttttaggaacattgacatcttgcccctagttgttgtttcctcttgggaggtggatattggtcttttgcccctagtctattgggcaaactacttgattagttcgacaacttccttcgctcggtgattgatttcattatgttaggtgctcgttttttggttgttatgatccatccattcttggaactctcattgttgctagtagaaagcctcaatcattacagcacgagtctcctcctgatcgtggtggagattttttgtgtgactggacttttccctaacgcatcttagaggttttcaatctctgtattgtttcccaggttaacatgtgtttgattaacggttggccacccagttctacctccagtcggtccatcataagtcctacgtgtatccccaaattcttgcacacctagtgtgactccagtgatcctggtagtgacaccagtcgtggtcacccgaccaagttcgccaattggaatggtagtatttctctgtcctcctcctgtcgagactgagtcatcaacccttgtctctacagaagcagtattacatggtggtaggcacacatttgggttattcaagttactagcgaatggtacttgaacatggggatcaactgccattaattggatcacatggtttggcagatgatgatcttcttgtttacaccatttttaatatggattgcttggatcgaggagaatgatttgagagtatatctcaacacgtttttgttaaattaatgccaatattaacgtcaatttttaaattattgatatt

SEQ ID NO: 113374 - DNA, 2864 bp, Cannabis sativa
aaagaagagaatcccttggtacaccgaatacttggtaaagtggaaaaacttgcctaatgctgaggcgagttgggaaccagagtccctactatggcaattcaaggatcacatccttcggtttaaggatggtgaagcaacggggacgtcgcaagcttgagtgggggaggtacgtcccgagtattttcgagacaagcaactagtggcaagctgcttgagctacttcttggaattttatttcccgggatgttgcacttgcttgtagcacgctgattgcaagcgatcgaggaagcgtcagggtacaaacaatatgaatatggagcaagttagcaagctgccggttttggtcatggtgatgtcactctaagtgggcaagatgcaaacccaaatcgatgggacactccccatatgcccaagtgggctgcattaatgccttggaggaaaaccaaaggcttggttaatctttatgctttttagatatttgtggctgtctataaacaaaggtcatttcctttgtaaatgttagctggttttcattgtgtaaagacactacttttaatttagtgagcttttctttggttgcctcaagtgttcttcattttatgctttgtgttcttcattaattttttgttgcctttgtgtgttcgattgttgttgctctcgagttgttggctgaacctagcaagcgaacctgtggggcgccgtaaactctgtcgacggatcgttcggagcatgtcagggaggtctttcagatgtagtgtgtggcaatttaaagacttgttttaagacatagacagattggagggacattatgaatttgtatccagccatctatttcagcagaacacaaatatgtagttgttgcagcctacatattgtgtgattagactggtgtgaatcgcatatcgttgggggagatgttattagattggttaacaagcacagcccttttccaggaggacttaatgatacatctgttgttttgattccagaaaagaggagtccagttactatggaggatttaaggcctatatctttgtacgatgttttgtataaggtggcctcgaaggttcccgctaatagattgaagattctccataatgttaatacacaaaaatgtatcatatcatcaccgttttgcataggatttgactgaataaaaatgtatcatatatcagcttatccaaaaagacatctattcctgggcttgtctagcagatggtgtgatacattaagcaaaactctagacttcttatgaaactcaaacatggacctcacacaaaaaactgataaaaaaaaatagcccatgcaaatcctctgtctatttcatggatttcttctctgtttacatatcattttggtaaaatttaagcattgggaagatattctatgtactgaaacctgacaatgtaagctatctccccacgaaactatcgtttgagcgtataattacgacagttatgagacaatgaacagcaagagcagtatctgaaatatcaaattcaattaccttgcgcctttcagcttgtataagtttattaaccacaaattcaggactaccaaactctgtgagagagttaagacgaactgggctcaccactaccccaacattgttagtactccccttatcagcctcttcaaacagagcagttgcccctgctttatcaacctaaaccatccacaaccaagccaagaagcttattcaattaaaagcaaaaaaactgaaataataaagaaaacccagtcgagagtaaagtggatgggttgcaaacttgaacaccttgatccaagaagaaggcctgaggagagtgaaaccctcctttgaatcaatgtacctctcaagctccaattcttgttgcgcagacatggccattgacaagtttggggaaaccccacttagaattaaggatagagatgagaggccgagcttcctcttgcccaaacataacaatagaggtggctgtctttgaggttcacggcgcctggaattcagagaagctcgcgggactggatttgggaaggcgggtaagaagaggatattgtagttgaaggtggaagcacatgtccatgcttttacacccattttgttttttcaaattactttagcgttcttttgtgtgtaatatgtaagagtggcggtggaggggagagatttaagagagttttttttgttttcccttttgaatttgtagatgtttcatgtggcaccataattaaaaaaagtttcactctatcaattttatgctattaattctagttatacaaattactcgtaccaaacaacattaccgctgagtaatttgtggtttatattacacttaataactactaatcacttaataaatacaaatatattttttttcttttgcagtgataataaatactaatatttgatgtaattttgtcaaaaaaaaaaaaatgcggcaaaaatctttaaaaatattactttgatacatattagtctctaactttcagaaatagcggtagtagtctctaagctcaagtttttgtaagtctgtcaatactcaatttaaccactctattaagtgttgctacgtgtcaaagatttattggtgcatatcataataataattaaaaataaatacaaattatataaaaaaattaattattttttttctttttttttttttcattttcttgttcttcttgctgcccaggaaccagtgaaccaccacccacatcccccgatccagaaaatgaaccagccatgccccaattctcacgacagaaaactatgttccagctaccctcgtcgcaaatggaccactactctgttttctccattgttgggttttatgccctaaataaaattccatttcaatgtaatctctatcatttaaatatca

SEQ ID NO: 113375 - DNA, 11760 bp, Cannabis sativa
aaagttgaattgaaaaaaattctgatgagcttttaacttataatcatttgcataacaaacatattcttcaaaaaaaaaattagattcgttgttgtccagcgtacatgtcgaatcttgattatatcatcgttgttgggagggagacttccacttttcagaatatattagataaataaaaaagaaatattacttttcttgaagccgctggtctaggcagctgtacccgtacctaagctttttcttttataatccttgtaaagttgttgtattggtggaacaaattccatggttctattttgaaataaggattaggagatagtgttgttgtgtgagaatgcgaaaccgagtgatttgttgaaaagagaaaacagcaatatggtgttctcatccaacccattgtcgcttagcgtcccggaggcagctttcgagtcctggctgcgagacagcggctatatcgaagtcctcgaccagcgcacatccgacctccaccgcctttccaccaccgccgccaccgctgacacttcctcctcctcctccgcaggcaacccagatagcatctcttcaaccgccactgcaaccggcgtctttgtctcgctcttctctagcatcgtcaccttcctctctctctttaccatcaaccctttctccaagctctcaaccgatgatttctcagggaaaaccccttcctggactactgcctttcttggctccttcaattcctactctttcccttcttcctcttcccaggctcggttgagggctcatgagaacgtcaagcgctacgcacgcaactatgcttctctcttcatcctctttttcgcatgtactctgtaagttctgcctctattttttaaattgacaattgggttttgtttgggtctcaatcaagaattgggaatatgtgatttctgtttcttttttattactaactgaattgagttaaatgatttggttttatagtaataggacaggtttggtaatggttattttgtgtttggacgatgcatggtatcttgttcgtgtttgttataggtttaatctttgtaattgcaattctattatctttagcctaggttggaattcaaagatcaatttggaaacttttcagtctaagggaactatggacttgttgacatctcaaaatttatgttaggtaccagtttgaatctgtagtggtatttctgaaaatgccaccccctctaagtctgtcaatttatgttagctggcttgaggtgaagtatgtagcagtagccgtctgttccttttaatgtgatcatatttgaattgaagagaattgaggagaagtacaaatagttgtagatgagaagaggcacctttataaacagcagaatgaagaagctggtagctattatatctgtgcaactaagagctagccccatccctgatgcaaaggaaaagctaaataaatgctttagtattttgcatgaagacaacatatattgttgttatcttttatagagctaaggcttctcagtcattagtgattcacatttttcagtgacaacttattcaaagcaaggttccatcaacaaaccagttcctccttagtaaaagaaaagtgaccaagtacttttatgttcatcttacatttaactatctttttggtgtttctttgggaggtagttgtagtttcgaatcattaatttttcagttatgtctagtggcctttacttttttttttttaattttgtttttggtgggaaccttgcaggtaccagatgccaatcaccctttttggattggtatcgtgtttggcactatgggatgtttttaagttctgcagcgagaaatggagattggatcgatatccactcactcgactctgtttggttcgtgttagtcaatgtggtgagttagttgcaattttgtgtttatcctgtatttttaatctttcttgcacttctttctctcttttttcagtagcttaagtttgataattatatagtttagcctggcaaatgttgtagagctctttttaactgcagaagaaagggcagatatctagataatttactgtccggtaaattagttgctgaaaatcttttacgggtgtaaagtacacacatcagaaagggtgcactcactaaatttcatatctgagttattttgttgttgttgaaattgaattaaacatgcgactgagtcctctttgtttctctaatttcaatttttccttccattcctctcttcttcctattccctcctctttctctaccctttctgcctctgcctgccctatctattttcctttcactactgttctgcatcacctgcttggcaatagaattctctctttcttccttccattgaaatccatcgcttgccagctatattcatatgcttgtcgaaaaaatttcacttctgttaattctttatatattcaatggatcttttatgtgttcttaaattccaataattattattacaatctgtattcataattcctgaaagttaagttgcatctcatgtttgcagttggtgcaattattttaatgggttcaaatgttcagatggctctgttctgtgcattgagcatcagttatgcaggtaattgaaagatacatttcaacattgctcatttactcctactttgcatgatgtgttctgatgaaaaatcttttatagccatgattctgcatgctgcatttcggaagctgactcctgcaaaacaacagccccgtggaagatgaaacttttagattaaaaagccaaaatattcaatgaacctatgcttggctatatgatacaaggtttgctgtttgcaacaaatggttgctccataaggcaatcacctacctgtgatgaagacttaccagatgaagattacagtaaataaattctgggatacaattgatcaaacaatcagttgcattccttcactgtctcatgcttattttgttgttctgggggctgttccaaaattctgtcagattttcatatctgaaaagaagtactgctctttgtttaatacaagtcagtaaacttttgaccatcatcttctaacctttcggtgcaatgcagcatgtagtactgcgtttggcacaacctatgtatttaattgttaaattaaatgatattcttgaattacattttatttgctgtgtttggatgattaattgtattattatgtaatttcccatcagttaatcaaatttctatgctgaagtaagtgaagtaaaattatcaaattataaagaacgccttttttatcactggttaattttcaaagaaacattttattttagcattttcaatcccaattttttattttaatttatttttgaattttccagagctatttttgtgtagggataaagaactctacgacgaaaccgactggcacattttaatgaataactatgccaaaataagaataaaatgacggcaagataagataagttgaatctccaacagattcaaacaagacagttataaaatcttagtaaattctaatcttgaaattgtaattatagtaaaaatccctataatttatacagccacgatgttgccaccttaaaaccccccaaaaaattgtttaagatagaaaagttgcaacaaaaataataataataataataacaatcaaacaaataactacacaatttctaacaatgtttatgtacattgaataagaaaaggaaaataaaaaataataataataataatagcacaaacgatgatggcgctaaatatcaacgacacgttccgagttcatttaagctgggctgagatctcttgaaacttggccttgccatctgcaccacaatattttacaagttatacagttgcaaataggctagttttgttttctccaacatttgaacaaacggcatgtgttgtgtaagattttaagcctcattcataagagtagggatcatatttaggaacaaaattaactcattctaacagataattacaaataaaggttagccatattactctttgacagataaaagaataactaaaaccataactcttgctcaagttgtatcatatttcccctatacattttttggtttcttaatatcgctgggcaaatatcatgttaaactttacctgaaactacatactagttattgtgtgattaatttatctataccaggtgaagaattttcattgtttatatcaaaattatttaaaaagataaagattataaaactactgttgtaccaaccttgagagcaaaaatctagcaagcgagcttaaatttgcatttgaatgaatttccttgttctgctgttttttcttgttctccgcttctgcaattgtgttctgtatttcttcagaagctgtcttttcagttgtaaatatgtgagaagccagttcgtgcagatctttcagcgaggattcttttgaactgcaaagtttttcttattagtctatagaaactgaaaaatatttcatgtcatgagacaaaaaagggaccggcatgaaactgatgagaaactttctgcaccttgataaccgctgaagcaaccggctgatgagaacttcacaagatcctggttttaagcgttccatattgatgagagaatttgcaactgcatgcacaatgggcccttctgaatcatcagcattgacctacgtcaaaagcagtggtaaagtagcacgttagcttctcatgtctactcttctaaacatcacatatttgggtaacattaccatacagctttcccccagcaaatttaatcaaaggctcaaagaacttgagcacaaatgcataaaatgtaaccagtccagaaaccattagtgcaatacatggagtcaatttaatttcagtagttcatgcacataaatttcatcatagtctgaacaagcagccaaggcccttagcccgagcatggttctaaatgcagctgaattgtagaagcccaaactcaagctattttatattcagtgagtaaaaaacatgggtcactcacatgcaattgttacgggcctgagttcaaaatatttcttttactctattttgtttcaatttcatagaagagcttgtactgtagaattttctagtcccaaaacattgttactaaaatattaaaagacaataataaaaggaacattgattgaagcaaaaagaaaacacattgagaacaatgtttttcaattctgacacagaaaagtactcggtgtaaactgcagaatggttacctcttttaacgcaggcataagcaaaattgccaatggtgcagaggatgatataatttttgcattttcttcatcatcactttcttggcgggatttagaaattgcttttggtgattcaaaatgaccatgtgaatttctgagaaataatcatttaataagtttgtggagcaccaatttaaaaaaagaaaaaagaaaaagaaaatttaaaaccaattacaccagtagcttgcagctaaaacaattacctggaagaatcagagctatttgtcatgtgttcccgtttgttttccaggccatcattattgaatttccccaaagcaaacctttctctaacattccctttcctgacccctccttgaattgcagcctttgcctgcgttaacatgaacacccaaatataattttcattattctagatgatagtttcatctctataaaaccaagtctggtgtccatataaactttcagaaaagaaaagactccagtggcaaaacatattttggaaatacccagttacatagtttttactctgttatcaatataggaagaagaggattgtattatctataaacaaaaattaacctctgcgagatttgtaacactgtcttcaagtgaggcagacgaacttctctcttgaattcctagcctagatcttggagtacgtggagagtcatcatcatgctggttgcggaatacaacagttccactaggcgaagcatcttcaaaagaagcatatgtgctgctagactaaacagcagacagatagcttatattaaataaaaggcaattaccgcaaagaaagttagaaacttcctgtagtagacattttgtaaagacatcataccgaagagttgggatcatgaaaatgtgcagatgactgggaaccctttggagttcgtattacaacagttcctgacccactcacagacatttcctgaaaatagaacacctcagttgctattcagttacaagggaaagcattcaataaattgaaattgagttgcactgaaagtcattttaaactttcagtcaacacaaagagttcagccagtaaatgcaatttgatagctcagatcagtcaaatcatatgtattcagtattacgttataaaaattttccaaaaagaaacaatcgttgtgttttattatatgtatttctgtttttcttttcttacatatgttcttttaataaaatctgttctttttcatccatattataaaactattttctttaagaaataataaaaaaaaacgagtagaaccaagagcccaaagtccacaaaatctttatggtaacaaaagtaaggaactaccatgcaactgggcaggagtctaagcgtgaaatagagatgaatgtaaccaatcatagagaagagatgactgaatatactaatattgaggggccagttatttcccatctaatttatttaaaaacccttccatttatcagttcaaaacttacatatagatataattgtatggtataatatgatagtgagccagaaagacttacatcctcgcaagtggattcctgatctctagaatctttcccaaaataatcttcgtatgtatttctagacgcaggcaacccttgatttccactctctgaaagtttcccagggctggcctgattatatagaagatctagctttctttctctaatctgaggtggttttacaacattccttaccgtacctgtatttggtgacccactaatgctaaaatcccatccagcatttttcaaggttttaccatgattactgcaaataaggaatagtcagtgtgtcccccagtaatgacctcacaactaatcaacagtggaaatataatccactcgcacaattagcattgcaccacaagaaatcattagtaaaaagtaaacccacctagttcgaacagtttcttccattaaatttcgtggacccttcacagtatcagatgtatcccttatggctttaggaccatttcctatagtatctgcatcttccctgacttggtactttggacgctctctgtcaataacacaaagtcagggtcacaataatgtaaaaataagtaatatatgatgcagaaatcaaacatggtatgagatgtttgttggaaaatgcaatcgtggaggtgcagaatattgtgcacaaactttgcatctcccttgtgtgatagtgtgatttaggacataaatgcccagtaattaatttatctagattactattaaaacatataatttgtcacaattcttagtaggttgggaagaatgaaaatatagaaatagaaatgggaatgagaataagaataggaatggaataaaatttaaatacataaaaaaaattgataaaaaaatcattaaattttttctcttcttacattagaatagtctttccttcctttttaaaatggaataatcattccactaaaatggtggaaagagcattccattggaatgccattccaatactttaaaaggcaaccaaacaaaggaatggaatgaaaattgtttcctttccattctattccatttcattaactcaaaccaaatgccacctaaatgtgttgtatgaatggccatacatacatccaattacaagtaaaatagccgaataggtgaactggtaaacaagctcacaattactaaagctccaatgtaaaataaatacaagatacaaggagagagttaaccaagataacataaaaagtaattggtttatttaggattgtactaaaagttttttttttcaataaatattcttaatatttttttttctcaatttcttggtcttttgtctggattaggaattcaagtgagattcgaatcaatttcttggtcctttgtctaaatcaggaattcaagtgagattcgaagcaattaccctttagaattacaacaaaaatagccaaataggtggactggtaaacaagctcataattactaaagttccaagtaaaattaatacaaaatacaaggagagagttaaccaagataacataaatagcaataagtttatttaggattgtactaaaagttctttttttcaataaaaattcttcatattttatttttttctcaatttcttggtcttttgtctggattaggaattcaagtgagattcaaatcaatttcttggtccttcatctggatcaggaattcgagtgagattcgaatcaattactctttagaaaatggtattaaggcttgttattcatttaagtattcaccaaaaatattctagtagcatttttagattagttctctcaactcctaattaaacttctacatctttctattattgtgtcgctgaacatcaacccaggtcaatatccatagtgcccagaaaaacttggatgaccatagaataaaattttaattcaaacaaaacacatgcatatacacaccttattctctcaagaagccttggactcttccttgcattcctaataaaacggtgcttcaaaagttccttggcacttggccgctgaaatttaagcaggtagagaaaggtgaaacaaacaaaaagcttacatgttggctaatttaattagatattgtaattcatcggaacaagtaaatcagaaatttgatctccatgcccaacaatggaggaaggtctaaaagcatattttatagaacaatagatttttactcattgaaggtgacaattcaaaatctaaaaaaaaggaagagtgaatgattctaagaacaattgcaaaaatctctaaaatgaaaatcatcaataccttcctaatatctaagagttcctttgtctcaaaatattgttacacaggttttcaaaatgctatgttaatgtcaagtgaacaaaaatttatctattactcaaaagaaacaacttttggcaaaattatttaaaaagcaaagcccaatagcatgagcctcaatatgtagaacatgatctttatctttacacacagcagtgcagcatccttcaaactgaaaaatagagatctttaccagctacttactttggaacatttgacatatttaagcatacatgcattcacacatgaacgaagaaatggaacagcagtaggctgtttaggtatagaagacatacctcagcaggtaccttcttcaagcaaaatgaaacaaactctttcattggacgagaaaaatgctcatccaactgcacatgaaaattcaaaaaaaccacgttattgtgtagagtattgtctggtatgtttacaaattatttccttgttcttaaatatttacaatcagttaaccagcgaatggcataaaaattgattacctgaggtggattttctcgaggtataatgaacagaacacgcattgggtgaagatcagctagtggtggttcccctttcgccatctctatagcagtgatccctagagaccagatatcagcctgcatcaagcgaaggagacccaaagtgctaatggtcaagcaaagagaatgatgtagagggagagacatgagaggatccacaaaaaacaacactaataaaataaaataaaaaatacaaaagtaaaaaagattcaaaatctgcttccaaatataccttctcattatatccttctgaattctgaattacctctggtgccatccaaaacggtgttcctacaaatgtctggtatatgttccataataaaaatagtcactaagggaacacgagaatatattcttaagttgaactcaagcttttgcaactcgtaactattcatgatgatttaaacataaatagagattgagcatggtaaagatgctaccttcctccttgatattgtcctagttaattgtgcagaaacaccaaaatccgcaacctgtaacaataaaaaactgtaaccatgatgactaaaagcaaacgaattttattgtaatgactgacacataatctaagcaggaaaatataccttaacatcaccattctcagtcaataaaatgtttgccgctgtaagaaaaaatcaatatattaccttcaaacaaaaaatcacttccaaaaacatgtatttaacattcaaagctactcctaaaagcacctatgtaaacaataataacagtaaataaatcaaactaaaagatgaaaacctttaatgtctctgtgaatttttccttcattatgtaaatactcaaccgcatgcaacaaatcacgaagaatgcaaccaattgacatttcatccagtggtggacctgactgaagctgtagaagaatataatttacattaaccttcacgaatataatatacagtatttaaatcataacattagcagaacatgcaatcaaaaaataaagcaaaaagtaataacaaaaaacaatgccaaaattaaaaattttctatcagttttttgtatcattgtaatgtgacaaaccaaatgtagctcatcaaattttgacagctaatgtttctccattcacataaatatgcaagtttaaaaacaagcaaaaataatttcaatgaaatataatagaagcaaatcaacagaacatactaggtcagcaaccgaaccaccagccatgtactccattattatccacaatttggtctggttgagataggaaccataatactctgtaatataaggagatcggcattgtgacaacacagaaatttcctggcacaatattaagacaagttaaccatgggattcctttgtaacatcatattaaattatcagctcatcaagagcagaaggtaataccttctgaatgtcctcaatctcatcctctctgaagaagacaagaagaaaaatattttagaagagctaaggtgtggataaatattagatgaaagaagcatattctacactccaacaaaatcatccacaactattttcatgcagaaaaaaattatgtgagatgagaccaacacttaaatgttgtgtccagccatattctttatttcttggtttggtagactctaaaacagggccattaactgaatagtcaaccagggcaaatcaatatgatcaacagttgtgtagcaaaatctactaatgaatgccatcatgcaggacaatgcagaaatatgaaatataatcaaaagaaaaatagataagatcatctaatctagttataatttcttgccccctttggcatgactacatgccactgtcaaattaattgaagatttagtaagaaatagtagctgcatgcagcattttatgggccgagggaaacaatcattgtaaactaggtataaagtggaacgaaaatacagggcaccacccttaccaaatagtttttaaataaatccagttcattagcaaaagcaaaaatctgacattgaaaatatagagtaaaatcttgcacatgaataaagagggaacttacgactcttccaaatctattactttgatagcaacttctttgttaagctccttgtcaaacctgtaagaaagaaaatgtgtctaaggaaaacactcaatgttcaagaaatattcagcacatgctaattctgaaaccacatcactatcctctgcgtcctcttccaccaaaaaaaacaggaaagatagatagatagcgcatttggatccagaagacataaagggctcgtttggaacgtcgtattaggtcgtatagtattgtattgtattatattgaattggattatatatcatat

SEQ ID NO: 113376 - DNA, 3349 bp, Cannabis sativa
aatagtcaaaaaggattaattactgagttttcagttattaataaataggtattggtcctcatttttgcataactttacatatgtatttttgaaccccatcatcaagaaattaaagttccaaagagaaactctcatgcaaaaattaaaagattatagtatggacttcggtacgttccgctattccttaatcttattatttaattttcataaattaattaggactaatttagatttagaatattcttaacaaatagtacatatgtatatatcaaataaatcaataacaatatatagaaggaatgagcagagagagcataacataaacataccattaagagatgttcaatggtggttttgttaagaagttgaatttctctgttttctttactggccatgtaattgagaagagtatccaacatattattattttcttcttctcctttaggactattactttcttctctgtcttttaatctctgagtgatcacaccatcgaaaaaacccttcaatttaccaaagtgaaaagtcatgcttctccttaagccaagaagatcaagcttccgaagaacagggaagtaatcagacaagttaggcttaccagcagccaccatgagattccatatagtctccttgagatctacggccatgtctgaagccccaagattctcccaatcggcggagaaaaaagtggtggacaacaagttgagagtagttttaaaaccagccacgccaatagccactgcttcatcacctgcttcacccattgtacggacatcagccaagagctcttgtaccttctgttgccttagattctggttaaagtcgagagctttaatcgaaaacaagtggttgttgcatatttttctaaggtttctccagctaggagagatgggactgaatgacattccatgattgtggtgatcgcaggctttgagtgaatctgggacagttctgttggagaagaggttgtcatgagtttggaggatttgtttggccatttctgctgaagaaaccacaattgtggtgattcggccgagctttaaactcatgattggaccatgaatgtgggaaagtttagctagagatttatggggattgtgaccaagttccaaaaggttaccaattataggcaagggttttggccctggtggaagatgttgctgagttttggtcgatgaaaacagcaagttgaagatttgctttgatataaaaatggtgagaatgagataaagcaaatagctcaaccagtcacaagtgtacaactccatattgatcttccttttccagctttggctatttggctatttatttatttaggggatgaacagcaagctccagtactttccgcttcttgaagatagaacatttgggaaattgggaccattatccatacatgccctaatatatataaaactaatttgtagatttatgttttaataaaatagggacacgattttgtactttcacggaatgtattccgtgatgtacggcagctattagatggtgaagttatttaatctgagggttgtggttgatgtatgggtaattaggattaaaaaatagtaacgtaccctaagactcattattacgtaccctgagacacatttaaaggctgtcgtacatcacttaaaggcttaagtacattacggaataaaagtacactaacgaaacaaaatcgtgtcccatataaaatattaaaattgagagaattaatgggagacgagaaaaataattttagagtgattttaaaatgacatgtcattacctcatttatgtatgtatataaacaaaatttataattaattatatttgatttaaattttaatattttttttaattttctaatttttttttaaatattttatatttttatagaaaattaaaataatagttaaatatcaatttataaatctatattttttttatagaataattattaaaataatagtaaaatatcaatttgtaaatttatgttttaatagaatatcaaaattaagattaaagagaaaaaagaaagataattttaaagtgattttaaaatgttatgtgaccgtctcatacttaaataaatgtagataaaatctttattttttttctttatttggagtaatactactacatggacccaaaatgaaaatatgcatgaaaagacaaaataagctatcggatcgtacaccgaacaacgacaatgatgattcatctgtcatttttatacaaaattttcaagatctatctatatatacacatgtctataatacgaactaggttttgtgataaagtttttgtggccataaataatcgatgtaatggtcataatcataaacatataaatgtataataatagttaaaaaatgtaccccatcaaatcatttactatattgttttaataatttttgataaataaatatctttatacatatataaaaacaaattaaatattatattttctcaactcttctcttctcttctctctctctttttttttgtttgtttgtttgtctgtacactattgtacacattttccatgtaaagtttcaagaaggcagactgtaatggttggagattagatttgtatgcacttaaataaaccataatggagcatggaccttgttgcagtattattgtaaattaattaatgaaacagtcggaataggtggaggaagagcttattattcttattttatgttagaaagagacaatttttctttcatcttgttctccttctacaaagatgaaaattgaagctcattttatctccaacccagatctactttacttacttttcgatattgtttggttcaattgcattagacaattcaaggatatgaaaagtactaaaccaaataataataaggttaaatagcggcataagtacccaaagttttgagtttgtaagcggtataaactcaataatttttttagtggcataagtacccaatatttgtaactgatactacatatttttcgtccaaactaaataatctaaaatttggatcttatatgtgtcatgtttaagacaataacagagtttgtactgatgaaactgaaagaaaattacagttttataaacattgggtacttatgccactaaaaaaatcattgagtttatgccgcttacaaatctaaaactttaggtacttatgtcactatttaccctaataataataataataataataaaagcttttatgtatgtctagaagatggcttctcaatctccattgctgagaatttactcatttaaaattttaatatgtattttaaatatctattctatataaaatgtgcctatataactgaattcttgatttatgagaaattcattggtgacttttttttttaaaaaaaa

SEQ ID NO: 113377 - DNA, 2421 bp, Cannabis sativa
taattgaggtgtccttttttctttatactaatttaacattcttttccataaaataaattagtctaatctttgaatttcaccccttctaattattactagaaaaatgtataatgaaaagaaaatgtgtaatttgtggaatgaattttaagtttaatttttatttacaaataaatacttaaatttattgaaaattttacaataaactctcttaaaagagattcaccgatacacctctatctattttggtatctgaaataattttttagttaaattttttcttatagttatgtacaatatagttgtttaagacatcttgttaaattttaaaaaatttaaaaatttaacacgcttaaaaaagagttcaaacaaggtgttatacatatgaatattttattttatacgccagtgaaatatattgttcgaatactgctttctatattgtgaaatagttagatagagaatatatcagtacatcccgtgcatgctagagaatatattagagaaatacttaacgtatcaatatcattattaatataataaagtatcatgtcccgtatagtttaatataataacttttaaagattattactaatcaatcgtaaaacgacaaatcttgagtgtgttagactacccaatagaaatagtcataaaattatccactattatatactccgggacatgattttgtcttgtgattatactttcacgaaatgtatttcgtgatgtagagttatttgatctgagagtttgagattgatctaggcgtaattagggttaaaaaataataacgtaccctaatacttatctaatataatgagaccctctaatgtaccatgaaatacattccataaaagtatattacaagacaaaatcgtatccctatatactccaaatccaaatactatatttatacagttatttgctcatggtgccacgtggaacagagggaccacgtgggtgacccagttacaaaacagaaccatgacagaccctttaaacacagctcttttctttaattttgattggacactcaccagtccgcaccaatattcatgactccactctctcaaaactcaaccctttaatctaaaccgttggatcaaaatccaacgcttctaaactgtccgttgttttcatcgaggaacacaccagcataccgtcacttgccacgtcaacacaaccttttgtcttacatacatattagaataattcgtgccaagtcttcgtgaccgttgagattagtcgtgggagaatagatcggacggtccaaactgactctatcattaagggagataacaaaaacgccaggctttccgtacctgtttttttttcttcatcggtaatcggtaagaattagatctaacggtcaagaatggagctgtgttttaagctgaagatttgacggttatgatgaattttgttttgtctttgttgtagctactagctatgattgggagagagagagagtactatcctgtcgttcgtactgtgttgctctctgtccgaaatttgatgagccaattggcttatgacacgtgttcggaattattttattaatatttgactgtctagtgttcttttacgaaatacgtaggaataattgtcgcaatgcaataattataaactataggcagtagtagctactgattacatgcacgtataattataaatatgtaaacatataatttttcaaaagtataattaaaaaaaaaattaattagtggcataaatatgtaaatatttaaattgaatttttagttagaactaaacatgtaaatttaacttaaataatatttaagttatatttttaaaatttttgtaagcacttaattatcaagtgaagtcattattattcacatatatctttttttataggaatatttaaattaaataaaaaataaaaatttaataaggtacactaaccaagaactgtcatgtagctatttatgtaattttttaaaaaataacttaaatattattaccgtcaaaaattgaacataaatattaatctgtaattagaaattaaacttaaatattttacgtcacaaattattcttttataaagtgtacaatttacaatattatttgccaaaatatgtttttttttttgtaattgtaatattcgttatatagttataatatcatcattataaatttttaaattttttgaatagtttatgtgtcgaaagagttaattttcagtgtttaaaaaaataattaaacttatttttaatactataaactattcaaaatgtgttccatatttagaaagatgatgttttttaatttatgtataactaatactataaagatgatgtttttcagtgcttctcttgggccgaatcctagtttcatatggaagagtatttttgaaacgcaagctttgattaaggagggcgctcgtcggggggttggtccagg

SEQ ID NO: 113378 - DNA, 5341 bp, Cannabis sativa
  modified_base (5037)..(5037): a, c, t, g, unknown or other
ctctctctctctttctctctcccactatgacgaacacacccacacccattaccgtctctctcaatctctcaatgtgtaactctctaactccactcggttcctcgcgacatcctgtgacaactcacaacaacccacaacaagatccttgaagccccaaaatcgacaacccacaacctacaatttccactatcgttgtcatggataaaaggacccgagccacccacccacaattctcacaaattttgataagttttattataattatcattgagtgattttttcattgattaggttttgaaatgaaattttgggttagttttgttgattatggttgaggttaaggaaatttgttcgattttaagttgattttttgtgtttgggtaagcaattgatgatgtctgttcatttttcttaatttttctgcatttatcgacatttagtgatatcgttagctatatataacgatatcacccccaatggtttatgcataataccaattagcaacatctagcaatatttgttgcaacacgtggcgacactagcattgttgctataactaatgagcgattttatgcgatattgttaatgatgtatggtgatattatcttcaacagaatatgattaagatgtttagctatatctggcgatttgcaacatgttacgacattaggaactttttttttgtatttgttgttatgtactgactagcaacgtttaacgatatttgtggcgacatactataatatcacctctaacaaactatgcatgaggtgtttagcaatgtatggcgatttgttagcgacatataacgatatcgataattagtatttatagaaattcatgtgttgtataacaccctaacctcgaggaacgctacgtgtgcttttataaattagtttataataaactaacagtttaagtaaaaatgtgatttaatataaatataaaaatcatagcataatcacttttataatcgggggtccccttctaaaatattacaagacatgctattacagtattattacaaaaatatacttaaaagttcagaacatataaaaatacaagtcacgacaactcagcaccatctgtcagataagctgatataattcttggagaagatctctaactcatggttgtccaaacatctcgtacctaatacatgcacaacatagcatccgtgagtcacgactcaacaagaaaagcagtaatatgacatcacaactcattacacgagcatcaacaattaaattcaaacaaccagaatcaaatgatcgcacaatactcatataataaaatccaaatcaacatagatactcagttgcaatatataccagtataaaggcattcagtaatacacaattacttgtctaataatacaaccatatccattacttcataaagtaacccttcacattgttgtctaaccaaacaaatttgatgcctaacctggcatcccaatattcttattgttgtctaataagataaccctgatacctattctcagtatcccaatatcactatcattatctaataagacaatcctgataccaatcaccggtataccaaatgtcatcagtgttgtctaataagacaatcctgatacgtatcactggtatccaaatgttactgtcattgtcaaactagacaacccaaatacttagccaccggtatccctaatatgaaaaacctaacaacagtttcagtttacagtcatgaattttaatacccaacctttcggtatctaaatatcattgtctaatatgataacattttcatcattgcctaataagtaataagacaactttttcaccacataatgataataattatatcttaatctcgataataattgattcataaacaataataatcgtatcttaacataacatgttatgtagtacagttgtacttttcttacctttaagcaagatttatgcatgctagccaacccaagtggagaaattctcgatgatctcagccctatgtcacaataacggtaaactgataagtgtctattccaaaatactgcctaatacccgcataaaataatctaagattttctaccaaatcttgtggtaaaaaaactctaaaataaaataatattttgactctaatttatgtatcacactgtagagctcttcacaagcttcgcaaatgtatatagaacgtctaaaacggatacctaagtggaaagttatggcaaaatacaaaaatcaacgctttccaattactgccaaatggaattctacttggtacagccctgtaccatccagagttctggttcacaacattaggactcaaaaatttcaagttttcaaagtcgcaaaacttactccaaacttaaccaattgttttcaaacttcacagagtagttttatggcattaatataacataacctaagtgacagaaaccaaatcgaataagaaaaaagaaactgccattaatgctccaagcttgagttccatgaactcaagcttgctccactcaacacaacctgttgtaaactaaatttagaaccctcaaaactgatttaattctgacctaggaactccaacagatccctaacaaatctcatagcaaccaaccatgtagttttcaacttaaaaaccaaactttataatagaaaatcatgaattattgatgagagaattaccttaatacttctagctttgaaactcttcttccagcttgaattcaaagttgaatcttggaaatatttctagtctgaagttggggttgaggttttgttttttcttggtttgtttttggttaagcttaagagggaaggaaaacaaatggtaagcttggttttgagtttataatgcttttggaggaaaaaatgcttagtcgtaagtttttggtgctactaagcacaaataggaaaagaccaaaatgctctcatcactaattcataaagaattctaaccttaggggtattttggtcatatctaaataccccaaaatactccagtaatttcaaaattaacttaacttcccggttccactaatattgcaatcaaatactattgtgccatttctggccccaaatcgagtctccatttcataaatagcatgtatgttatccacatattcctataaaatctctgcaattaataaattacgctcatttatggaaaaattctctaattcccacggaattagattagtaagatcataatattacccattatacccttattaattcatattttataaaatatgccataattatctataattagatttatcagatattacatgttgagttgtttagcgatgctagtttaagttaacaatataattggtaatgtttagtgacataatttgtgataatgtggccatatgtttgcgatatattatatttgtattttaatctgttgtttctgtttgttttcttaaaatttatgcatatggctcctaagcttaaactttcactatctgaccatttcacaagtcgtcttacttatcgaggctcaaataggtttaaagatattaagaccacgtttgaaaagtataagttgactgagcaggtgaaagtaagcccattcaagccattcttggaaggtagggaattgaatttctctagtgcgttggtgcacaacgtactgttgaggaaaataaaatttaataaagagaaggaagatgagatatggctttatgtgggtaaaactgacttgagatttggacgaactgagtttggtctgattacttgcctaaatatgggtactccccctacatatgaaaagatacaagccaagtccagtgactgcttgttgaggatgtattttgaagggaagagtagtgttcatcttgatacacttatgctacaaatggagatttgggaggataaagatgatgtgtacaagctcaaactatgcgactttattaagggtgtattggttttgaaagatggcaacatcattgtttggccggacatgctgaaatttgttgacgacctcgagttcttcaagtatcagtggcgcgagcatactttttgtaagttgatgtcatctataaataaggacatgatgcattacaagcagaccgttaagaagaaaaaggccaagaaggttgtttaggaggagaagtataccttacatggctacgcacctgccatacaatactaggcatatgaggccatagagaaagtgggaacgaggtatgctgtgtgcactaggaccaagttccataggatgataaattagaatacccctgaaggccaacaaaaataggatgttaaggcgagcaacattgcacaactttttaatacaagggtaagttgtcaattgccttctaaacaactaattttgtttttttgctaatatttttttggttctaacaatcataaattagttattttttttttgtttaatgacgtgtttatgacatatcatgacatattttgtgatacatatttcactgtacaacattttatacagctcataattatgtatcgacatgttagcgacatatcacaatatatttgcgacacatatatgagtgaacaatatcacataaaacacacagtagcgtagcaacatgttgggggacatataatgatatatttgtgacacatatatgagtaaacaacatttcatactgttagtagtgtagcgacatgttggcgacataggtagtgacatatctcgatatttttttgtgacatatatgagtgaactgttggggtttatttttcaggatctagatttaccaacaagtatgttgattaatatcctaatatatgaatatctctaacacaatgaaattaaacacataagagtttaaaaaaccttacattgattttagcgaaataatgatgactcattctgctcagatctctaacccttgttcctttctgtcgcagagtaataacaagatctgagccttgatctctttctcttcttcaggttggttaccattatcttccgcactatgattgagacttaacttgctatgtgtgggcatgacactctatcactacgagctgattatgaagaacaatgaaggaggttcgaaatcactatagaaggtgtctntcatctactagttgtcagagaatgaaaactaggtttaatttggttgaagtgaatagttagttggatgagatgagagcatcatgttccttatatagtatttcaactagggtttaggtttgaattatatggattaaaaagaataaaataaggggcaaaaatcacacactagtggtcggccactaatgggctttactagttactttttaccactttctttcaaccgcttattcttctttcaataataccatatattctcattttaatcctataaatatcaaaactatttatttaataattataatta

SEQ ID NO: 113379 - DNA, 5002 bp, Cannabis sativa
  modified_base (4526)..(4536): a, c, t, g, unknown or other
tgataacaaatcagattagattgtaatgggttttatttagggcattaaatcccaacactaggtgctttcagacagtcagctccacaaactagtttctctaactttggagtggcataaactggatacagtgctgctctcagataggcaaatcaaaaagcgagagtcttagaatcaaatgtaaatcattgtcgaagcaagcgaggatccaaagctttgagcaaaaatgaatccttgaagaaagggaagactcaagaatctaggtattttgggtacatcaacctggttaatactcgtgataatctgtataaagctacttgcaatatggtccactacaaaaagcctccgttaatgtacaaaggtggaagacacaatggacccaagtaaaatgtgcaaataccaccgtgatattgggcacacaacaaatgaatgtgattacttaagagatgaaattgaaggattagtctagaatgaccacctaaccaattaggcgatgatactagttatctatcctggtcagggagtagcacatgggttgctctctattccaagacagcccagagccgtaaatcctccttagggagtaggtcttccacaagctcctgaaatacaagctctagatatataggtctctctaggggtacaaaatcccctagtggcaagacctgttattgctcctaaacttggaaacccatatccaattggggttgctccatgagcacttgatggccaagtggcaaccaaatctggaggcccaaatattgccaaaagtacccaaaatgcataaaaaaaaaaaaatatacttgaatgagctggaataggatgaaacatgtaagtttgtacaaacacatgctgaacatcctcgaatgataaactcccaataactttcacagaagatgatgctaagcatgtgcatttcccacacaacgatctgttggtgatagaagcttgaattacaaataagagagtgtccagagttctcgtggataatgggagttttgtcaccattctcttcaactcaacttttcaagctataaaccaacttaacatcttcccagttcaactccaaggcttcaacggagatacattgcttccaatggaaaaaatacagcttctagttacactaaatggaaaaaaatttggaagtaacgtaatatcaacctacaaatactgtacttttgtggtagtggactgtcccactacttataatgttatcctaggacgacctttcttagtagattttggagctgtaacttttattcgccatctgtgtataaagtacccaagtaaaattggaagcattggaacaatcaggggtaatcaaaaaaatgtgtgagaaactgctacaatgtctcaaccaaaaatattgttctcatggtctaggaagaaaatccagttgaactagaaacacccgctcagtcaacactgggggtaggctgggaagaagatgaattagatgcatgcgtcagggtggagaaaatcatcgagccaatggaggaggtagaagaattgtgcatcaacgatgaagatcttacaaaagttattaaagtagagaagaatctacctccgataattaaagagaaaatcgtatcaaccgtgaagaagaacaacgatgtgttagcatggagccattctgatatgactgaaatcagtcctcatgtaatctccaggctttaaacgtggacccaaaggtagatctagtccgtcagaagagaaggtcgtttgatccatctcgaacgaaagcagtaaaagcaaaagtggaaagttaatcaatatagagtttctccgggaagctctatacccagcctagcttgccaatccagtattggttctaaagcctaatggaacatggagaatgttcattaatttcataaatttaaataaagcttgtgcaaaagattgcttccactttcccgaatagattagatggttgacgccacatctggatacaaatttctcaattttatggatgcataatctggttacaaccatatcaagatgtatgtgtgaattaagagcatactagcttccacagatataagggcatttattgttatatggtcatgccattttaatgtcttggaaaagaacatggatatgtatgttgacgatatgcttgtaaaattaaaaacccttatagatcatagtgaagacctagaagaagctttttccatcattttaaaatacagaatgatgagaataatgactttacatattttacactaattcaattttaatttttttttttcgtatcacgtatgttatcatacttgccacgccactctatcaaaatttgagtaaacactataatttcacatttctaacatgctatagacaaataaaactctaacaccagtatctaagataataataataataataataataataataataagattcaacattttggaaaggaatatctttgagctaactgtggatggaagtaatagaaatgtttgcattcaatgggttaaagctataactaccatatgtctatttactttttcattcatttaattcactaacctttccactacttctacttttttccgtcagttaactttcccacaattacctcatgtaattaaatactcacttcttttatatatatataaaataatattatttttatttttatttttacgtgaaagctctttattagttttaaatttcttttgtatactacaactacagtaagaaacttaatttgctattttttttattgtaaagataatataattaatttattattattttggtaatatatttgtatagcataatcagtttttttcatggaagaaatgtctctttagaaacttatttttcatttaattaaaaaaagattttaaaaaataattagataggtgttacaaataattaatactatatatatgtttatttttgcattctattttattatgctatttttttttaaaaaaaaaataaactatttattctgtaatagcaactattgcgtccactcaataaaaatacattacatcaaatttaatttgctattttttttcaatttgtaaaaagatgaggtaattttttttatggaataaatatttttttttaataaattgatatgtaagattttaatgacaaattttaattttgtgcctttcaatggaaattatcggtttcttttaataataacattttgtcttatgtaattctcttaaaattattgtatgttaattaaaagaaaataacacttcttatatattttgttgatgtaaaatcttttctatattacagaataaaaagtttattttttttgaaaaaaatagcataataaatagaatgcaaaaataaacttatataaggctcgtttggtacgccgtattgtattgtattgtgttgaattgtattatattgtattaatattatttaacacctatataactatttgtaacacctatctaattattttttaaaatctttctttaattaaatgaaaaataagtttctaaaaagatatttcttccatgaaacaaattgattatgcgcaaattaagtttcttactgtagttgtagtatacaaaaagaaaaaaaaaattaaaactagtaaagagttttcatgtaaaagttaaaaaaaaaaaaagtattatattatatataaaaagggaagtgagtatttaattacataaggttattgtgggaaagttaactaaccgaaaaaaatagaagcagtggaaaggttagtgaattaaatgaatgaaaaagtaaatagacatgtggcagttatttgttggagggacaggattagaataggaaaattggtacaggtgattttccttcataattcaaacccttatgtatgtatacataagttatatatacataaaattaagtattaatttaattacaaaagttttaattagtttattatatggaggttatgaagatcttaatttcttaacggctattctaatttgtttggcccactttgtttgtacttattgcttgatgagaaatcatatgaagagcttcaataatgactaccttttgtagccctatattaacttgtatcccttgtttgcacgtttaattttacactaattattattggacccttcctttttttcaccacgactacctacctacccacccaatctcccaaagtagtcttactcttattaaagttttggctaattaacatttttaccaaaaattattattactattaaaattgtgacccttaattttttttttctttaaaaatattctctaaactattaatagtgttaaaatatagaacttttgttaaatttatcttatgtgactaataaaataatttctcactacaaaaatttttacttttagtcacaataaaatttgtgattaaaagtaaaaaaagttgtgacactaaaaaatctgtggctaaaaatattagtcacaaaaattacaacttattgtaactaaatgtatttgtaaccacaatatttgttgtgactaaaactaaattagtgactacttgtatctaaagattatgttatagtcacaagtaaatttttgttgtnnnnnnnnnnnacatttagtcacaaaaatttatgttgtaactaaaagttatcactaaaagtaataattttttgtagtgtgtgattgatacaatattgttacatcactagaatttatataaaaattcaagattttctttttcttaccaacaaaaaaaatagtttattctattcattcattgttatttagaaaaaaattaaattacacgtatggcgacaatgatgcagtgtaacctcgaacatttcgtaagtcatattataaaactgagagatcctacatttcagcactaacaataattcaaaagaatttttaaccaaagaaaaaaaaattaagaggcaccatttgatagaatagtttgaggttaaaaattctatacaactaagagcatgtttggtattgttttctgttttttgttttaaaaaattgtttttagaaatgagaacaaaaaatagtttttaaagtttttaaaacacaagtc

SEQ ID NO: 113380 - DNA, 3263 bp, Cannabis sativa
  modified_base (3192)..(3194): a, c, t, g, unknown or other
ttttgtggggggggggggggagggggtgagggcgatggggaagctagaatgttgaattaccacaaaattcaaccaaccaagaaggttgttaaacgtctgtgagcaactcttataatatccaatggttaaacagacttaggaatcaattatccacatagattcttggatctttatccaaactctacttatggtggtaattcaagcttgtaaccttgatcatcttagaattgtacctaaaatttaagaccgtaatatttcaaagaatctatccaataatacctctaaagagcatctgacatcttctacgctgggccatacaattagtggctccccagggcccaaaggagttttatcttctgataaacctgatgacattgaagccgcgagttcagccatccacttctcatccaatgaacccagggaggagaactgtaaaaaggacaataatatttcaaaaaaaaaaaatcccatgaagcaaggtttctactaccatttctctgctttcttgatgatgtttacaatcaattcatcacaaaaaacatgttttgtctacctgataaacaagaggagatctcttaaactcgcgatcaaaggtgcattcttggagtgcagtacgtaatttcatgtgtccccacttttttaaattattacccgtgtgatatccaggtacagatgcaattaacctcacctgaaagcaaggaagatatttcccatatggccaacaaaattggattagacagaaaagaataacatacaaatgaaggagacagcaaccatacctctgcattgctgtaatcaaacttcttaaaaaatgatgagttgatagtgaaacttccaagagctggcaaactaacagagaactcacgccactgtaatcatcaaataaggaataaagatttcattcaattcatgcggactgactcaaaagcaacatcaccgccagtgtttccatatctcatatacatgcgctataatctcaaattacatttgacaacaaagaagcgaagtttctatataggccataaattcttgaaccctctctcataaagctctttgatgtgaataaattaataccaacagattaaaatagctatacaactctccaatactccatttccacaccacttaatacataccttcaatgccccaagataatcaattaaatcattctcaaaggcgcatcctctgcttggcttgttcggctctttccaggggaaatcttgcatccacaaaccttgtgatttgttattccaatcaacgtggattaagtttgctgtgtgtacaataattctcactcctctaggatacacaagaagcatggccttcgagtggtgtgttccaaatgaaataggtaagggtggtttgtgcagaatccaactagcaggcttgcttctctgagcacgataattaaattttaaaaataaatttgtaaaaagaaagtacaaatgaaatgagacaactataaactaggttgtaggctaaccttcatatgatccaatgtaccatcaccctcaccatgaactaccaaaacttgaggaacttttgcaagcaatggacatgctacaaagcatttttggaataaggggacattagggcaagttcttccagcagtgtactgtagaaaagaagttggaagtgaactaggagctctaaagagcagacagccacaacaaatagaacaaactcaccagctagcagccaatccatgtctaccatgtaattagaaaggacagcaaagagaatatccccctattcaaaagttgagcaaataaactttcattaaaacaattgaataaacaatcaaatgagctgttagtccattcctccatgaagtttacgttacagcaaatgtgtaatttaagcctgtcgttccaccaaagctggtagggcacaaaccagggaaacccttaaaacctacgactttctacaatgatcaagttgtttgtcctttaaatgtaatagagtttgtacctgaatcacatcccttatagaaacacaagaggtatttgcccattggggcaatccttgtacgcttaaaagtcgaaatgtcagtggcaagttatccacagaaacatgaaattggcgtatggcttcctcattacaatctcttttagacaatgaactcccagtcactttgttgcttccttccaccttgctctttttttccatatcgagaatcttggcagtacagaaagatgtgagacacttattttcaattgaaattcaaaattttcatctaaaaagagaatgtacttgttctattacttctggaaatcatgttcaataagagaaacaagttactgaagttgaaaaaaagaagctagccataactagcaaaaaccgacgattacctttaaattcttttcagaggcatcggtttcgcatgtttgtcttaaccttttacgactcagcgcatcactttccccagtctctctaccattatttgagccactaactggcatatttttgtcaccacccaatgtcacatacttgaaaaagtaatgccctggaatcaactctattacatctccatcacaaatcgtcccattttctctagaataaagcttttttcgattactcccagaattaacaacaacaggattgtttccttcctaccataccaaccaaccaaccaataaaatcaaacaacagaaaaaactcaaatacagagagatatttttcttttcataaataaacatagcataaaatgtcagtaaattaccacgaccagactcgcagaaccattgggagaagcagtaagagtcagatgcttgcggctgagtctcttctccgagacggatatgctgttcctaccgatgaaattaagtccccgaaagatgggtatttggggtacttcagtgtcttcctcatacttttcgttaagaggaaccaaataactaatctgcaaagcaaatacatgcacatggaaaacagaatgtcgtaaaagaaagaaagaacctacttagaagagcaacgattgacggagcaggaggaaccggacctgaggctgtgccatgactgagttttacagctgcatgggcgctgagagcaaagaccaaaaaaatgcagtaccaagatttttgttacctgagtgatttgaagaaaatgcttttgtggaattcttcagttgaagccaattttctgcaatatatatacatatatgaagtaaatgttatattattttatataatnnnatatttagattaaataattaagttgtaaataattaagtgtgacaaagtattaattttgtcaaattgtaa

SEQ ID NO: 113381 - DNA, 3490 bp, Cannabis sativa
  modified_base (3256)..(3263): a, c, t, g, unknown or other
ttatatcaaagaaaatttgaactaaaaagatataccatttgcaactgatgagctatagttcatacaaattcaaaataaagtcaatattgatcttactgcatggattttaattttaacacattccataaatatttatatataaataaattcagatgttatagtaatggagaagagaaaaaaaaacatagaaaaacacagaaacatggctttcatcataatcagaaacccttgataatattacaataatttctagaacaaacttgctaattataagtactaaaagttaacaaagtaattaaactatagtatgagattaactaataatctactatatatattaatatgagtatatagtacaaaaacctcttcagctcaaatctcaaactctctagcaactactactactactattcctaaaagcaaaaaagaagaagtgttcaagatcaggggaagaaaaaaaagccatgggagatgatcttttcttgaatatacaacttgatgaagttgaattattattattattattaggtggtactagccttctcttcttatttggaggtggtggacaagataacaactcaggtatcctatgtctcttaccctttggagtacaatatcctttgttatcatcatcatcatcaacaccaacatcttctttctcctttatagagcttgaaactttcgctatctccatggtcgccgaggccgccttttcgagttgttgcagcctttgttcttgaacacttggttccatatttgagtgaaagatgaaacttttgtacaaaaatgattttaaagtagacacttttgatgagaaagagaaaaataatgtgttccctttttttttaaaaaaaaatggtatttgagtgttaatagtggtaaagttgattatttgtagggaatagggggttggttttggcttgtagtaatagtacaatttcaataagtgacattccaaaacatatcatgatatgatttttgagtaaatatgtatttggtgtgtgaaaaggttttttatatatgggaattggggggctcggaatgtttatttctgcataaatccaagatagcattacaacatgaaacaaccactaccacttataagataaacatatacacaattatatattaataaaaagaaattaattattgtgaaaagagtatatagttattatttttaattaatgtatatatatatatacttgtataaatatcctaccaaatcctgataaggctgattgaaaccattatggaaaagaaaaaattataacaattaataattagtatgtgtgtgtaacagtgtacacaatttaaaatacacttaatttccgaaaccctatgtcattgtaatccattttctcatgacttacctatcatacaaataattgaagtttttcatgattaaaaaaaataaaattaaacttttaaacttggttgtgtttggtaggatggagggagagtatgatgtatatggagagcttagaaatcaaaagattagcaattagtattatttggtattaaaagtgtaaagttggagggatggagataattttttttttttcataatttatcaaaaagggaaaaaaaagttataaaaatacagttgtgtgtggaactttaaatatttttacagactaaaagttttttttatgaatatatagaatattgattcacattattgtgttttcacgttgttttaatgttgtttttatagaattttataaaattgtaattaaaataataaaaaaggtcaaattaaaaggaaaaattgtaaacatgcaaaaaaaaaattattattttcataccatataaatgttaaaattatgtcaaaattgatattttgctaaaattcctatatgtgtttatataaatatatatatatttatacatatgaatactacattctttaagagatttttacaacatatattgaaatttttaattttttattcttttttactgtggggcaaaatttattttcaaaaatattgtgtaagttttatactatatattatatattgtgttaaatttttacagttgttttacggttattttttagttgttctattgttgtttttaattgttcggttatgttgttttacggttgttttaagttattttataaaaagatagtatttttataaaaaaattcgtgtagtagtaaaattgtaaacttttgttcaaaaatcaatattttgcaaaactccattttttaatgtaattttgacatgtaatatgcaatcttttatcttttttttttttagattctcttattttaggaaggattgaaattatatgtttggagaaagagagtcttccagggccagccttgaagtgaggcgtgcgtcttgggccactaaaggcttaggactccaaaattgtaaaaaaataaaatattattaaatagataaaatattcaataataaaaaaatacatcaaaataatattttagtgtggccatagagagtattattttaagtaagaggtcaatggatcaatttccagcctctactttttatattttctttaaaaatatttaagggattttttatttgtatactaaaaattatacaatattactataataatactataaattaatattacatatctgttaatagtaagaactcgtcaaatatgttaaagctgaaaaaataaatttagaatagagattacatatagttaactaaaaaagttttagaaaaataagcaacaatggtgaaaagtgtctcttgtattagttttaagagcatgagattataaaacttaattttccaacctcttttcaaataaaataaatgggtatttatagggagctttaatggcttcaaaatacaagtggtcctaaaactaagggaaaatattctggtggtacgttgtgggtcagcgtgtcaaggggagtagtggaagtgtgttggtaagttgttaacccgtactgaccatgacgcaaatgatgcctccactacttgttcccatcgaatgattttctacattcacctcatctccgtaggctttggcaaaggcatacctcatctccgtaggctttgtaagggggtgattgtgacagtcagtagtcccgtgatgcgtaaggggaaataccgggtaagctgtacaatcccacatcgcatggagaaggtcaagtgggatgattctaagactgtgtaggtacaagactacacagttaaaaagggcttaaatagactaattgatactacctatatcaacaaagtgcgtcttgtttttcggtagcccatcnnnnnnnnactccacagttaagcgtgcttagcttgggataatttcaggatgggtaacctcttgggaagttttcccaaaaagtgtgcgagtgaggacaaagcacgctggaaatactcatattggtttgtaggttcagtcaatcaatccatgaagcagctagtgtgacgtactcgtgtataagagctattattctgtgggtgtaagggcccaatagaggcttgaagcggggacgtta

SEQ ID NO: 113382 - DNA, 1820 bp, Cannabis sativa
ttatattccactgtgttgacaacaataaatgttatttctgatctatattaataagtaaatttgattataattaaatgagttttatttagggcataaaacccaacatcatcatagtaaataacaatatatatttttaatattgctctaatagacttgttcatacttgtgatgataatacaacacaataaaccattttactattgtataaaaataaattcaatttgctctctacatatatgtaatctcattttcactcaattctcactttaaaatttgatttagtttatagatcttctttctaatgcagcttaaatcattattaacataagtatttttttttaaaacagatggaaaaaccttttgaatcaaaaaatacaaaaagactcacaaatgtggtttaatcttgaatagtatgcgtgttgatgcacagtggttggcaaagtacttccttgatcaattcaggatgcatcccaatatggacatgccgctttcaaattgatgacccagaataccaagtatttcgatgtctcaaactggcaattctttggggctcgttcaactgcaagggaaatactagaggggtccgttgttgaacaatatgcaatattggaagattattgcaaacaattgttaaaaactaactatggcagcactacaaagatacaaactgatttggtggatggtaaaagggtgtttgacaaggtttacatatgtttaagagctgccaaggatagatttattagaggttgtagaaggataattagattacatggttgtcacttaaaaggatattgtaagggaatacttttggttgccattgggattgatgggtcaactttcatttttccaatagcatatgctgtagttggaaaagagaatacagaaagttggacttggttttcggagctactgaaagaagacttacatcccacaaatccctgcatggacacaatgatgagtgacaaacaaaaaggtttacaaaatgcaatggagaagattctcatcggtgttgatagtcgtttttgtgtgagacacatgcacaataacttcaagaaggactttcctggacttctcctgaaacaaattttgtggtctgcagcaagagccacaaccccagctaagtttgagagtaggatgaaagatgtagatgagaaagcttacaattggcttgctgccaaaaacccatctgagtggagtaaatcccacttcaaaggcggagtcaagtgtgacatgttgctgaataattgttgtaagagtttcaataatgcaatcatggaagcaagggacaagactatagtaaccttgatggagtcattgaggctttggcgaatgcgtaggtttaacaaaaatagggagaatgtagacaaatggaagaacccggtgcataacaatattatgaagatattagaaaagcaaacagaaattgctacaaattgttctgtagaacttgcaactacttcaacgttttaggtaaccagtaatgatggaaagcgtttaagtgttgatttggacctacatacatgcacaagtagaagatttcagcttacgtgaatcccatgtggacatgcattggccacaatttggtttgtcaagtatgaagtatggggctatattcatcagttgtaccataaagtgtcatataaagtagcttatgaaggtattgttgggccaatgccgagcctagacaattggcctaacaaagggcttaatctcatacttccacctggtgaaaaaaagggccaagatacaaaatggccctaaatctaaaaattaagttaataaatgtccttttttataaaaaattaacaaaatattcattc

SEQ ID NO: 113383 - DNA, 4787 bp, Cannabis sativa
tatatatatatatattgaatagaagattgttttggtgtgtttttgataagtaaataattatttttgtagctatagaactttgtttgttttaagctaggtgtgctacctacttagccatcaaatcttttaatccacattgttttgctatatgctcaattgtatcatatatatatatataggctgtaaaagtaaaaattttcaggtaatagttgatttgtttgtgtgtgtatgacattgtttttcatagcacaattttttttttttaatttttttatgccatttcttattcttaataattcatataaataccttcatttttaaattttatgtattattaatccaaaaacatatatgtatgtacgataaagtaaactaatgatcttttcacatatttagaagagtgtgtttgtattgtttttatttactttatactacttgaagagctgacgaatgaggaatctttgtgttgtcgcttaattttgtagttgctgttgttgggtggcttaacccttttgttggagttggttgtttgttttgtgacatgatgaacttttatatatatatatatatgttaagcaccgaagacgtgccaataagcacgtaattcgcgtcaaaatcggtaggttgtaaatcatatttgttattttcattaattatgtttaaataattattaaaaaaaattatgtttaaacgaaaacataatgtggtataagttcatttatagctaacatcatcaatcttgtataaatgtaagcccatgtgatttgttatacatgtaaaaaaataaaattacatcaagttttgctattatatattggagcataatattaaaaattgatgcaaatatatcacaagttatttttttgtcaaatacaatacaatttttacataatctaataaagatgttcttgcaaacttatatataataataacaaaaaattaaattctaatcaaagttaataaagatatgtacatatgaataacgaaaatattaaagatacattaaggtgtcaagcaccacaaaaaataacattgttgttgaggtatttcaatattagtttttacaaattttaatttaatataatttagaaaagtgctaaccaattattgtgtatgtgaatcggtatggtattgagcaccttaagatgccgcatagcaataataataaaaaaaaatcatttaaaagaatagtacaaaaatcattcataaaaaatataaaaaaaaattaaataaaaaattactaaccaattaatagatatcacttcaatatgacatgtactaataataaatacaaaaaattatttactaaaaaattaatatataaaaaataataaaaaatatttagtatataaaaaaaacaaaaaaaaagtatacaaaaaaatagtatatataaaaaaaataatagtaaaaaaaataaacaacaataacaaattgttttgtgttgttttattctaacatctatttatatatagatattatagacatatttatttagcaaatttattgcgaataatatgataatgatgttaatgacactaatcttgctgagctgtcaagttgttgatctgttaaatcaagattagttagttactgatttcagttagtgagttagttttgtctcaactaatttttcctcttggctttatgtgtatatatactctgtttgtaacacttttttaaatcaatgagaaatatacacttttcttcctctttgtcaaatcttacatggtatcagagctaatgttcgtccttagctatggagactcaagcttcccccaccaatggaggttcgtcgatccctccctcttcgtcacaacaaaatcaaggtgttactgctcttaacaataactctcttcctaaaacgaatttaatttctttttctcattctctatctgttcgccttgatgatcagacaaacaatctaccatggaagcaacaagtcctttctgctatcaaaggaagctgtttacagtgattccttgatcctttgttggcccctctgaagttcctcacagacgatggtcaccgtacgaacaagatcaatgttgaattgcaagaatgggagcaacaagataatgttctagtatctttgttgctatcttcaatgtcggaaaaggttctcactcgtatggttgggtgcgaagcagcagctcaaatatggatcacactccgtgaatactacactgcactcaacagagctaatgttggacaatacagaaccttactgagaaacacgaagatgaaagactcactcagtgactaccttctcaagatcaagaatcttgttgacactcttgcctctattggctatcccacctccacacaggatcacattgaagctattttcaatggcttaaccagtgattataatgtcttcatcacttctgtcaatactcgcactgatgcttataatgttgcagaaattgaagctcttcttatggcacaagaagtgttcgtggataaagctgccaaagaactcgacattgctaagaatgaagaaaatttagctcatgctaaaaccaatatgggacgtggtcaacctcctcttttctcccaaaatcaatttggatatggccaaaatcagccaagaactggtcctggacacttctttaattctggtaatggaccacctagtattcccccataccctgcatcccgtggtcccccacccagtagaggccagtttggtaattttagagggggtccatctcgtggtagaggcactttcactgcttggggtcagaagccacagtgccaattgtgtcataaacttggccacactgtgcaacagtgcttttacagatttgacaaaaacttcacagggtccgaatcctttcgaaatcctcatggaaatgccaatgttgctaaattacaagcctattttgccactcctgaaactgtagctgatataaattggtaccccgattatggggctaccaatcatcttacccccaatgccaacaacttggcttcaagttctgaattccttggtgagcaacaaattcacataggcaatggagctggtctgaacatcagcaacataggttaatcctcttttctttctccttatgtaccacagtttcttacacttaataatttgcttcatgttcctgaaattacaaagaacttattaagtatttcacaatttcctaatgacaacaatgttttctttgaatttatccctcttattgtgttgtcaaggaccaggatactcagaggattttaatgcttgggagacttgacaaggggctctacaaattcgatccctcacaacttgatcttctgtcatctcatcaaaaacacactcaagttcgatcttcttctcccctatgtaacaatcatactctcaataatcaaagtagtcttttttctttgtggcataaaggacttggacatccctcttctcggattgtccaagccagtttagcttcttgtaatatcaaacttaataccaataaaaataatacattctcatctgatgtgtgcactgcttgttgtttaggaaagcatcataagcttccctttcctttatctaacactgtttacactgctcctctgcaatctttgcattctgatctatggggttctgcccttgttacatcatcaaatgggtatgggtattacattagcttcattgatgcttacactaggcacacctggctttacttactaagagcaaaaaatgaagccttgtccacctttattagcttcaaaactcaggttgaacttcaactaaatacaaaaataaaaatgattcaatctgattggggaggggaatgccaagctctcacaggttatcttgctgaaaatgggatcttacatcgtgtttcatgtcctcacacacatgaaccaaatgacattactgaacataaacacaagcacattgttgaaagtggcctaaccttgttagctcaagcctctttacccttaaaattttgggatgaggcatataggtctgctgtgtttttgatcaataggatgcctactcctcaacttggcttcatttccccactagagaagttgttcaatataaagccagattattcctcccttaaagtgtttggatgtcttttttttcctaaccttagaccttataacaaaaaaaaattacaatataggtcacagtcgtgtacctttatagggtatagccttgcacataaaggctacaagtgcctatccaaagaaggaagactctacatctctcgagatgtgttatttgatgagtgtacttttccctattctctcaatactaatgtcccatctcatattccccacatccctcacaatacacctgcctttcctaccattatccccactgccacacctactcacctatctcccagcactgcccctgatgttatccctgcacctattgcctctcccagcagttcctcaaactctgataatggtcccattactaatattccatttattacaccatctattactaatgattttcctttagttgctgattctaacaggtcagatgccatggctccatctgcccatgctcctcctgttgcccctacagaaccattacttaatgttagcattgagagacaatcaacacagcagcacatcaggggttctgctgcttctgttgctcctagtaccacctccattcctgttccacagcaccatgtcagcaacaattctcatgccatgaaaaccagatccaaatctggtattcgaaagcctaaagttcttatggcttcttgtaataccctagaattaagaaattgattagcaaaatcctaattagataattatgaataattgaggaatta

SEQ ID NO: 113384 - DNA, 2327 bp, Cannabis sativa
  modified_base (44)..(62): a, c, t, g, unknown or other
  modified_base (2221)..(2225): a, c, t, g, unknown or other
cattgttttagaattcatatcaggatgttaatgaaacatacttnnnnnnnnnnnnnnnnnnnggtaaaatatatccaacagaaactccatgaagttggccagttcatggtgggcaaaccatgagctggtcaatttgtggcctaagcccttcatgggctggccggttagtacccacgggtattggcctattagcccatgtttttcattcttttctttatttgcgatctccggttgttcacctccctttatttttctgcacagatgaacccgcacgattattggggaggggacaactaaatcaatgaggacttgctccgtaatctgtacgaagactaccgctcagttggttcttcttctaagagcttttcagatagttcttcgagtgactttgaagcgagtagcgattccctagatctggaaattcaacatcaccactgtttggagaaaatgggggtgatatctacgggagattcatttgggaactgaattaagggttaagacagttcctgccagctttgtggacttacattgtccaccagggtgtgcttgacaccctccttgtgaggcatctcctgcacttagagatcttcctacagcagcgactgctgttactattgcccaacactatgagctgtattcaaagatggcacaaacaaagtaacacaataggatgagactacaccttacaagatgcaccaatgcctaaactaccattgcctacttatgtccctgtccctccattccctagtagattgaggaagataaagaaagatgagattgtcagagaaatccttgaggcattctacaaagttgaggtaaatattttgttagttgatgttataagacacgcacctcgctatgtaaaatgtttaaaggaattatgtacgagtaagcaaaagctaaaaggaggtgaaaaagtaagtgtgggggagaatgtgtttgagaatccgcaacagaaacttcctcccaaatgtgaagttccaggaagctttatgaccccttgtactatgggggacaagttggttgaaagatgtttgttggacttgggagcttcgataaatgtcacgtcgtattctatttatgctttgttaatttgggccataaaaagaaatgggaataataattcaattggctgatcgatctaatgtctatcctcgtggagtagtggaggatgttcttgttaaggcgaaaaacttagttttcctaactgatttttatgttctagacatggaagatgattctattccatgcacgacgcaggtgttgttaagtagaccattgatgagtacgatgaatatgaaattggatgttaagttaggaacattgatgatgaaatttgatggtgatcaaatgcatttcagtgtatttaaatttgataatctaacatcaacaccaaaggtattgtcaaggtcaagctagcgatgttaaatttagcacaattgtaaattaattttattttgaaattttagtcattttaattttaatttttcttagtttagtttgaattcggttgaattctagctttaatttttgtattggagccacaaaaaatgttaagaaaaaagctccatcagctctcgtcgcgctgagcttaaatgttggctgcggcaagagcccatgatttttgaaaatttcttacacgcacgacgccgcaacaaacctttatcttcggtgcagtgatgtcccaagcacccaagcagtacttacatctagcataggcgtaacgaaccaagaaagcgacacaaacccaacctagcaatttccaaatgcagaaaaaaataagagcaactcttcccaaaacatgtgaagaaagagagttgaaatttcttgccatcaactaaacccgatacctaattttgaacatccatccaaattccaacgccaactcgcacaagctgaaaaaaatttccagatactaatcgcaccaagaaaagaaaaaaaaaagagaagagagagagagagagattttccagctccgatttacacaccaatcctccctgatacctctcatcttcttcccattcaaaatctaacacaatactccattctcgtccctcctttcttctcccattttttatttttcatttctctttatttttctaatgaaccaagaaaatgccatgggagtcattaaggttcacaattgaaattgatttcgtggcctcaacaatgaagtaatgtaagttgtttttaagtttttgttggattatgttttaccagnnnnnagatttactaccatgtatgttttttaacatcctcaatatgaatttctaaaacaatgtaatttaaacacatataaagtgtgagaaaccttacattgggtgcag

SEQ ID NO: 113385 - DNA, 1890 bp, Cannabis sativa
gataacaaatcagattacattgaaatgggttttatttaggagataaaatccctatactatgtacttaaccgtactagagttggcaacaccagatcgtaccctttaaacatcgtatactgtaccaatgcactcagtaccattaccgtactagtgttagtattatatgaatcacataaaaatatgcatataattcacatacacatatacatatatatattctatgctaatcttaccttattttcaaatttaagtgtgtcggttgacttgaatggaaaatcacaagttgaacggacccccttgtcacaatcacaaaaatgggtaaaaaaattgctaaaaccatttttggggacctaaattcaaaactataagttttcctatcgataaatagcatgccaataccctaaatatcaaaactaaggctcaagaaattgcctaaatagttaaaccagattcccaaacggcaaaccagtttttagggtcctgcctggagaactagttaacttgttctacagaacttgttaatcgattctctgcagaaaaccctaaaaatcccaaatctcactcaaatcaatccaaaactcaaccaaattttccagaacacctgtaataccatcctagaatagatttcaagcaaaagcagtagcaattttttacataaactcaaaacaccattgttgagccaagttttcaaacttgaacttgctcaaccactccacaaaccagcaaaactcacccaaataaactaaattcatcttaaatataactcagaaatcaaaccagaacaaggcctagattagacaaaaactaaattccatatatccatgatcaaacctaaccaaaactttcaaaactcaaacaaagagagtaataaagcttacctttggtttctagcttccaattccccctaaaacctgctaaacctctgagattgaatgatcaaaatctttgattctcccctagtttgcttcagttgtaggaaagaaagagagaaagggctagaaaagttttctttttgtctcatgctagggttttctatttacttagttgattttggtgattaaagataacattaagtttatcttctcaccaagaaatggctagctgtaggattagtggaataatccacttgctactaagataaaaataccaatttaacctaactttagtgcttaaataataaaatgacttagggataaaattgtctaacaccatagtctagcctaaacttgatattctaataacaacgtacgattgtccccctaaataaaaggttttaaactatcacatgtgactctaatgaccatccatcgcgttttccgtcgtcaccgagcaaaaattataaaaattatcaattgcacacatatcaagaataatacacttagaatttaataaaatcttcaaaattaaaaaattataaatctaatatttatttctgaaattagagcccataatataattattcgtatttagttataaaataaatataattatatttattattctactaatccatattttaatcatgtggtcattacaaactcactagatctactcccaaactctctcatcttttatttgtggatgatagtattctcttctacaaatctaacattcaagcttgcaacgtcgtcaaggaaacacttttatattataatatgagaaagtttctggccagcttgtcaatttcgagaatcttccattttcttttccccaaacacttctcttacataccaagctctcatttcatattatatgtacatcccctccactaattccctggaaaagtatcttggtctccaatgctttagcaggaccaagaagcattcctttaagcctcttaaggatagaagaatttgataatacctgttggaagttattttaccaggatct

SEQ ID NO: 113386 - DNA, 3284 bp, Cannabis sativa
  modified_base (2504)..(2513): a, c, t, g, unknown or other
  modified_base (2622)..(2626): a, c, t, g, unknown or other
gaggaaataaatgtaaaagattaaggattaccaatcaattacttgagatttggattctatttttgtattgtgttgatcgttgaagatccaatagtggaaatgaaccactcttaagcgagctcgaaagtggaaacacccaacatctttggggaacctttattaatctggtattttcttttcttatttttctttatcagttttattgttataagtgtgtatgtgtgtgtggtttaatctttgatcaggggagagctattaggttcaatttaaggttgatacaaactttaagtttttggaaaagaaactcgaagctctataattagggttctgattgtgttgtacgtgtgtgaaagattcaagctataggatcaatttaagaaactaattccttacaaaagaaattgaagacacactcaactaaccaattttcattattaataaaattatttgatttgtaagctagctacacacatgtattattacatccaacataaaattgaagacaaacatataacatatcacataataacgacttgtatctacgtgcccatacacctatttacaaggcttaacagatgagtaataagaacgttccatactagggtacaggcactgtatcacatacactacgtacctaattgcacgagtgttagggtttgtttcgtaccttgagtactaagtgatatatataccacacacaccctctactttctcgtacttgtgctggtaacaccgtaatgtactctttaaacaatatgcactataccagtgcactctataccgtttccgtacaagtgttagtagtgtagcaatcataacaagtatgcatatacattaacacatacatacaatcgcatattcatatcacatattacatgcggttcttacttctttttcgaatttaagtgagttggtcgacctgaacgaaaagtctcgtgttggatgaataccctaatcacatattaaaaccgagtaaattacatgtcaaaatcctaatccgtgaaacccgaacctacaatgaatgatttttctacctttcttcatcatcttctcaatctcatcagtatcattatgatcatcaagcttcatgtgaaacggtatcgttgagaacttagattgcaattgatgatgagagaaaactaccattgcatgctctttctctgcattaactaatcatttattaatttaaaatataaaattaattaaaccaatctcaatatcatacttattactttgatttcatttacttccacacgtttcttatccaaaatttattattttaatataaatttattaatatggtccacacacaattctttatattattataacttttatctctctttttttctttttctttctctttttactttaacaactttttgtattttgaaaatttcacaaaaaagaaaattagtatttattatttttgtgtgatctaccctattatgattgatattagatttattgttaaaaaataattttagtgataattttttagtcacaaatataatataattttactaaaaatatgttaattttaataaataaagttatctacttattgctctatgtagataatatgcaataatcaacaaagaaaagtctaatgttgacaaaattaaaagaattaatgctcaaattagattttgagatgaaggatgggtagcaactaagattcttagggtataaacatcttaaggaacagaaacaatgggagattgaagctacaccaagaagactacattgacaaaatcataacaaaaaatattctaggaaggatgctaaggttgttgcacaaccaattaccaattaataccacatgtccaagactatgtgccttaagaataaagtggaatagacgaaaatttcatcctatttatgtgtaaatatggagtcaatataagtgtcacgcacacgatataaattaagacaatcgatcaaaaacttgacctaaatataatatattggacattgtatatgatgattatgatataatgtggaaaaagatattattatatatgtggactaattattaattcatatcactatactcatttgatctatcatgcaactaattattccaatgtaatggtgatcatgattttctatttgaaattaagttacgtacataatacgggcaagtaattaattatatattaatctaccatcgtaaaactcaagctaattaattatattattctaccctatcgtaaaactcaagttaattatattatttctacaaaattatttatgtatatggactaattatatacgacgacttgactaagtcttacttaccatcgtcaaagagaaacacttaaggtgactttatagtggtgccaagcaatcacagaaggtgatttatcgttattattgatataaaaaaaaatgagaaatactaaactgtatttatagtgtttaacactttgtgacttgtaaatgtaatattaatattagtacaattaatatcgaatcctatttacactacaaaaaatcttacnnnnnnnnnnaataaaacttgtgactaaaagtgaaaaaaattgtgactaattataaattattattcttatgttgcggctaaaaggtccgtagctaagatattagtcacaaaaattatannnnnttgtgactaaatgtatttttaatcacaatatttgttgtgactaaaatcaaatgcactagtctaccatcgtaaaaaagaaacactagaggttattttatggtgccaaacatataaaaaggtgatatctcgttattgatataaaaaatagatataattatataatagatatactatttagaaatatattatttctacaaaattatttatataggtacctatactgtatgatgatgaattagaagtattgaattgctaaaaaagtgatgtattattatatttagtaatatatcattataatagtgtttaaaaaaatgtgtcaaattcggtacaatatataacattaagtgtgactaatgctacgaaaacaaactacttttagtgacaaaattttatttataacatgattttttttgtgactaaatatgatttacagtcacattaataaaaagttatttgtaactaaaatatagtatttaaatacaattagtagtcactaatttaactttagtcacaacaaatattgtaactataaaataaaaaattctgtaataataaattatattttttttttatttactataagattttttatagtgataaattctatggggacttctatttgcactctataaaattataaatacatcctattattaaa

SEQ ID NO: 113387 - DNA, 4521 bp, Cannabis sativa
  modified_base (4277)..(4280): a, c, t, g, unknown or other
tcgtagtatgattggtagtttattgtatttgactgctagttgtcctgatattagttatagtgtgagagtttgtgctcgatatcaaagtaatcatatagaatctcatgtatctgcagttaaaaggattattcgatatgtaaatagtactctcaactttgaaaattggtattctaaagacactaattataacttggcttgttttagtgatgttgattgggtaggaaatgctgatgattgcaagaatacgagtggaggttgcttttttcttggaaacaatttggtttcttggcatagtaagaaacaaaattctatttccttctccactgctgaggctgagtacattgttgctggtagttgttgtactcaattgttatgattaaaacaaatgttgatggactatggatttgaatttggtgttttaacatttttttgtgataacactagtgccataaatattttcaaaaatcctgttcaacattcttgtacaaaacacattgatataaggcatcactttattagggaacttgttgaaaataaatgttgatactgaaaaatagttggctgatattttcaccaaggccctagactcaagtctctttgactcgctcagaaaatccctggagtttgcattgtctaatttcttttgttctcatttttgtacaatactgtagagttgttccttgcttgcatctaatcttgtttcattctgatttgacaaatcatgtttatgcttttggatgataattagtttaggatctattacttctcatacttttgaagttgatttaaaagattcttgttactttttatgtgtgattgggattacattatgttcttatatagagttgagcgattcttgtttcagtttcttatcaggcccctagctggaatagtgctacccacactgaggtgtgaaagccatgttttgagtaatctggaactttgtaattataagttatgaagaggatgcactaccatagaaaagtgctacctttagtgtagtgtgatagcatccagttgtgggatcaaattaaaaatggcaaaaaaataaaaatcttgccaaggacaatgatcctattttcactgcacaaacttatgtttgacaagtgaattcaagtgtgtaagtctcctctactcaaataaaaattatccagattcacattatttgtaacatgtttattttctctcaacatctgttaagtgtggttggtttttgagatactaattagttatcctcttttgaaagcataacatgtatatttgtctcttgttatgaaatttgatttattccttgctctagaaaacttatatatattgtatatcttctctttgtgttcatgtttattcggatttttaaaagtagaaaaaaataaaaaaaaaaacaatcaaggagggaggcgtttgtgacttgacttgtgggctaagaaattttttgttttgtttggaaagtatcaacatttaatctaattgatttatcttgatgagtttccttttaaagtttgatatcttattcattgctttttgttaatcttgtaggatttttccttaattggccttctttttggaaagtatcttggtttattcttgtttccttttattcttttttttacaaatatatatatatatatatatatttttggaaaaagagtgggacggttttctttgtgttcgtgggctggcagtttttaaattttgaattggtttcctttttgctcctctttcacatatttatttaaaccaatttctttgtcatttaatctcaccatcttctcttctacctggttactcttccttgttcttttgtctctttgtttttcactttctctttcaaaacttcatggctgaaacaaagaacttagggcatcctaaaaaggttatggaacctgaacctgccccctcaaatacttctcatgtggctccaatcgtgcctcctactgctgcaactacttctctttaaggagattcaacgctccctcagcgtgaatcacaaaattttacggtcaacacaacctcgacttctgtactcagaaaaagggctcccaaataagtggcttgaaaaacaatgagacccatgaaattttgcactttatcatcttcatcttcaaagggctctccttctcgtgatactgcatctcctccggctgcaaccgaaagggttcttgtagcatcaactccaaaaggcccctcttctcgaacccgtgcccaacaaaattcactcgagaaggaattttgcaccaaacgaagccatgatagaccaaattctactgccaagaagcttaagttaaatccccctggcctcttcgcgttctaatgaagaagaagaacctatagaagtctcctctaatgactccgagaccaaaactgagtctattccttctgagaaagatcttccagaagatattggtgtctcctttgatagtgaggaaattgatctggaacctgagcctccattgcccaaatctacacaagcccctcctcgtgcttcttctgtagccaaagcctctactgctgccaaaggtaaacaacctatgaaaagctccactcctggtaacatttctccatctcaagctatcaattccagattttattacaacgataatcagcgtgattggaatctttatgctacctgaaaatttgaaagttaaagaaattatgatttgcatgcttatcgagttttatggtattgtaaaatttgttcaatatcattaatgggaaaatacccttactggttttgaagggtatatagaaggtactgtcaaagaattctatgcaaatttgtctgatgatttgcttgatgagaaatttgaatttttgagtaaagtctatgtaaggggggcattggttttcatttactgtgaaggacatttctgtggctttgcaattgcccgaaggtgtgtccaatgttgtaatatctatggatcatcatctaatgctcactgaactcactggtgcatgagttgaatgaaaatcttggcaaagtttttgtattactcatctcacttatgaccatgcctcactcatgaggtttgctcttagcaattggcttcctaactccaacaaaacatttgtgtttcaagatttggcaactttttctcttttgcatcacctcgagggcatccatcaatctggcttcttctatcttggaccagattatatcgtttcggagaggtaaaaagtgtactcataagcttgtttttcctaacttaatctataaaattctttcctctcaaaaagatgtggcttattcccatgagacacttgagcctcccctcactgacaccatctttcaaccctcaaagtactttgatggagcttttcccaggcgtcctaaagcttctgctggtgctgctgctgctacaagttccagttctgcccctgcagatgtctaggaggtcaagcaggaagctacataggtgaacaaccgtcttgctgccatggaggaggttcagcaagagatgtccaagcaactattcaccttgataaagctttacggggcataagtttttctttctttttaatcgttagttggacatatttttcataactatttgtctttggcccttagataaacaaaaagggggagtaatagtttgtttttaatatcttgtttttctcaactctggacctttttccagggggagttgagattggtacatgtgattcactttggattaaaagttagcttgttatttcggttttatgttgtgtttctcaaggggagttttgtctgcaatggctaactttgttttgcaggtacttttttgttaaaaaatattttgattatctaaagtgccaaagggggacattgtaaagtcttttttttgggaatttagatgctaacatatttttttatttatggtgagatttgttggctttatcaaaccaattttcttaccttatttaaatgattttattgttcttttctatcataggaaagattctatttcagctgtccttttccttgttaagaaacttcttgtaaaagaagaaattcacttatggaaagtttgctttttatggaaactttgactattcctatttttcttaatgatttcgattgtgtcttgataagattagatcaaacacactgtttttggcaggtatcaagtccaaatacatgatcggtcatgtttttggcaagtttccttttctggtctggtttgctgcagtagaacctgtctctgatgctgcaaaacacaattttctttaggaaagttttgtacagctgtagattcgactttgtggctgactatagggtttctatgttctataaatannnnctagagagcagccattcgaatcaagtcttttagctttcattttttgtatttttctcatttgtgaagagatagttctttttgtgagaacctaattgttcatctaggttctagtgttttcatacttgttcttactctatcttagggttggtgagaacaacttgattgaacgagagagacgtcttcgagagaagacttgttcaagctttactttgggaggaagtaagcactcacacttcaaaga

SEQ ID NO: 113388 - DNA, 1904 bp, Cannabis sativa
taaatgtgtaacccaatatataataaattacattaacatgcaacgtgattagcatttcttgaacatgagctcatagtagtttgaatccgtatatgttgattgattggggttggaaaaggtgtttgttttctttgtaatttcttctgatcagcttttgtctcatctcaaaattttattttatatttttgcatgtgaaagctgccaaaatggtatttgaaaaaagaccataatttgcagtagtcgtagttgatggacatagtaaaaacaaccaaaagagtagtgatgcttataattcatatctatcagctttttatgaagtttgacctttggatactttagacaagtcaatgctatataatgagcagtattattgggtatatgatacatgttctgacaacaccacacatatctatatatacctatactaacaaaacaacatcttaattttctagaattaatttaaattaaaacagagtaattaattagttagtgtttgttggtatatcattattatcaacattatttgggaattaaggggcactacacgaaaaaatactatatttagtaacaatctttagtcacagtaatataaattttttatgattgaattttagtctcaataaaaagtacttgttttacaatttatattatgattaaaaatatgtttaattataataaattgaactaatttttgtgattaataatacttattatataattatagttttttaattacaacataaaaattattatttataattagtcataaattttattataactaaaaataaaaaaaaaattataataataccacacctctcaaaatataacattataatattaataattattattaaattgactttgatttttaatatgctatagctagatcctgagctttcaaaaggattttcacactattgataaagacggcaaaagttcccaaaagcctaataataaccaaaataatttactttttttttttttttttgaaaacaaagacatataattttcaatattattatttatataagggtcctctttattatggtgtgaccagtcaccaccacaagcacacctgataactctaatatataatattacgttattaacatatttaggggattatacatgcatgcatgatgagtcatcatgatgacctgaaaggtgaaagaaacatataaatatctatctatatatatatatagatctgtaataggtatagcctactcactcagagtttagattcttcaaaataaagctagccatgtgtttgaatatatagctaagttgagatacgagctctctctctctactaactcacgggtctagctatatatataaatcatttttcttttacttttgaaaggatagaagggtccaactcatactcatcatcataccaatcagcttccttagctatatttatatttataggtatttataggatataagagagtgagattcttcattgcaaaactatgtacatactgtttatatatagaaagttatatattcgtttggcgtctagctaatatgtacgtactacaagaaatttataagagtattgtttgccaacataaatgataatatgtgagatctattattaaaatgaaaagtggctccacttctttatttcaaccaatggggttttttcaaaataaaaataaagttataggcaccgtttccaggttgtggttagggtgtcacaattatctcatgttatttctcttctccacttactaattatttgggctttgggtccacactggacaagcccatattgttgctactccttgggcaataccctaaaatacttggagtaagttgaaaaataccacttttattaatcaattaattaaatttacctctaattttatatttatttgaaacatacctctttt

SEQ ID NO: 113389 - DNA, 9375 bp, Cannabis sativa
ccaaaaatacgacttaggtatttatctgctactcggcataaaacttaagtatttatgccgcaaattactcaaaaaaaaaagaccaaaaaaattacaaaaataggaattcacaattttttcaatattttcatgaatttgaacttttatttttaataattagtatttttgcctcctaaactttttatactaccaaactgtgcccctatagttctttcatcacattttatttaattttatcgtgaaatgagtaaaatagtgaatagtaattgataattggatacaaattaaataccattcatctttttacattaatgaataatagaatacaatacttttttttttataaaattttttatttttattcttattttttcaatcattaatgcaaaaaatggtgaaaggtatttaatttgcatctatttatcaactactatctaccgccacttatttcacaataaaaaaatgaatagaatatgatggaaggaccacgctattataaaagttatattttgagaggtatttttaacgagtcataaaatataaggggcacaacttggtagtttaaaaaattcaatgggcaaaaaagctaattactcttttgtttttttttttttacaaaaatatgaactattgattttacgttattttcacgttgttgctacattatactatgttgttgtaatatgaaaacaacgttgttttcataaaaatgtaaataaaatctttaaaaaaaaaatgtaaatatgcaatatatatccttggtattagtaacatgtaatgtatatttttacttacagttgtataagtatcagagttgttattacttctttattaatttaaataataataataaaattaaatttaatacaattctattatattttttaaatacctaaaatttaatttaaataaatttaaaagattatatctaattaattactataaaataagtaaataaatttaaatattttaaatgttattataaaatataattagttaattaaataacgtttattttaaattaaataaatatttatataaaaaaataattatttaattcttttaaaacttttaaattaaatttaaatattaaaaaaaaaaaattttgaaaaaaataattaattaattaatttaagagtattaattttaaccgttaactcacatctatatatccatataaagaaatatgagacggtgacatgaacgattgtgtactatatacaaacttgtaaacacatttgccacatgcagaattaattctgccgaaaaagagtaggtaaaagaaatagaattttcatagtcctactttgccaatctactttagacttcgtcagtttttaaaactagcatttacgcctgccaagcaatgaatctaatgcaaaatgagattccttccctaaacatccatcttccacacaaaatttttggcattttcatctcgcgatttctcaagcgcagcgactttcggtctgtatgcagctgctgcaacggtggtcgtcacagttggaccctgaggcagttcacaggcttcactcatggaagcaaatcttagttcagctggaggaatgaaacaatccattgaaaggccagggacgttgaaagccacttcctcaattgtccaagcctcttccattctggtctttgtgtggctcattgcagtttcaccaaatctgaaaagggttacaactgaacgtcctgagtgagcaatcataattccctccactggtctgtaatcctcaaggaatgaattaattgtggtctcccagtacgcagcatcacccccattgttttggattcgggtcagatgggagtcttccaagtgtataagcagccctgttttttggctgaagtagccaaataaaacatgccttatgatttcagcaggaccttcactccgggccttcaatgttaaaggatcagcgcaaagcttaagaatgaaacaatcttcctcgttgatctttttctcaccaatgcatcttgcgttggtgaacatgctagcagttgttcttgggtctagtccctacaaatgagatacaaagttaaaccatttagaaaatgaacataataaacaatagggcaatggatcaaggcaaatagcatgaaactgagaagcaatttaacctgaagagcacgacgcaagggtctaacaggtccttttgcagcatgaggaccaagccaaggtgtgtgcctccatacaagttttccgttgcagcctgcatgaaccttgctgccaccaagtgcaagctcaacataccacatatctggattcatctgccaaagaacaaagccaccagactctgttgcttttgaggaatttttgctctttacaaccttgtttgcagtttcaaactcagaagctatcatcctaaccttccccattgcataagcgttgtggatggaattctgaagtttttgcccccctgatgctgctgtgtactgctgcaatatgtattgagcagaggatgtctcctgcacaaggcagtccaaaaaggaaatatgttcagacttgagagatcactgactctattgttgattacaattcatcaattttagagaaaaggaataataacagtgtgccatccactcccgcaattatcactttgtcattattgcagactaataggaattagaagttcatgtgagaaacttgtaacttccattcatacaaatgtttggtgtttgactgagcagcaatatcattgcacaatggaaaattaaaaaaaaatataaaataaatcccatttttattttgaccttcatgtgtcctccaacgaaatgaagagtcgtttatctgagcccaaaggaacagtgctaggcaacatagagagagagagcccattttttttcctactctcataggttagcatgcgtttacttttttgcctttttctttatcattcttataggtggatacttgatagcatgcgtaaaactaaagtaacgcatttttacataaagattattacaatcataaacatgttctcttaaattataaaaaagacctcgacatgcataagaaatcacatgatggtccttccatcattttattatctatgtatatataatttatatgagtagtatatgtagtatattgttcatgttctatcgcagagctaaaagtaaaaataaaaacaaataaatcttgaccaaccaaaaattctgatggacattattctacccagcgaaatatacccatgaaaaatcttcactcaagacataataataaataaataagaaatcaagcaaactaacaaaaatcacaactaccattctaaagttgatgaattcacaacaagattcagcagcaactctttataagtattaattttagttaaataaatgaagtagtaaatgagaagaacatgatcaacgcagaaagcacagaaaaaagaaaacatggaaataaacagggtgagagagagaggtactaacaatgggggtatcttttatgctaaggtgaggtaaaggttcggtggtgctaacgtgcaccggggccagtggcgcacccaaaaccccaagaagcaacctcagatcggacctcttataggtggagctagagaccgacggtgccctacagagttgacccttcatccagttaccccacctcccttccatcctcgaatcttcaccgtccgttccatcaggaccttccttaagcggcgacaaggcctcggccggcctcaagctcccggatctcgagatcaacgggtccggtggggccgcgtggtggttcttccttcgtctaagcaaacccgacattggggaagcactcctcgccggactcttcgccctcgacctactcggcgacaatcccctcaccatttcctcttttagtgctgtgaaaaaaccctgctttctctccatttttacagctctgcctctcacttcccccttgtctcaaaattaaacaccaacaataataaaaacaatggtagaaagctcgaatagtgtctcgtgttcctctcagagaaaagatacaaaaggtcttaactgaaacgctgttcaaccaattagacgaagacgatgactagaagagtgacaactacactcagaaaaagtgactgaaagtaggcagaagagagagagagtccgagacgaagaaggaaaacgggtatttgatatttcacttccactgctaaatttcgattaaacaaatgcgatatattacctcggcacagaccacactgtagcacagtaaacagtttgttacctcctatcctgcgctgcgcctctctctttctcactcttccttgtaagaaatgctaaaaggactggtgcccggcacaacacgaagtgtgtgatgtaattgtaattgattactaaattttatatattttaatttaaaaattattctagaaaaatattaactgtgcctaatagcaaatattctcttaaaaaataataatggaataccaatttcacacacacaaatgaggtgatggactcttttaagaaaatgaagtggagaaaaggctatgtagggattaaactcgacatgtcaaaagcgtatgatcggattgagtggagctttcttgaccaaaccatggaggccttcggattctatgcccaatttcgacagttgatggctaaatgtgtgtcttcggtttctttctctgtccttctaaatgggggccccttgaaacaattccgccctgagagagggctcaaacaaggcgaccccctctccccatctttgttaattatgtgcaatgagatcttatctcggatgttgattaaagctgaaaatgatggtttgattggtggctttaaagcttcttggcatggcccttccatatctcatctcatatatgcatatgacacacattttttgtgaagtagccctcgagaagattctaacgacccaagagtgcttggatcgcttctgtttggctttgggacagcgtattaatgtgcacaagtcagctttaatcttctctgttactgttgattaaagtctcaaagtggatgtcaaggaggccttaggataccgggatatgaatggaaatgatagattccttggcaaccccattctcttctctggtagcaaggtgaaagactttaacttccttgttgagaaaatggctaggcggatcgaagggtggaaatctaaattactttcacaggcgggacgtttgactttgatccaatctgtggcttcaagtactctggtttacactatgtccacctttttgctccgaagtccatctgtcttgatcttgataaattgtgccgtagtttttggtggacgggagaggcagataagttgcattttctttcccttgcaagttgggactctatttgcttgtcgaaagagtggggtggcctaaatttgaagaaatttaaagatcttaatatggccttaattgctaagctcggttggcggcttgttgcgggttttgagtcgccttggtgctccctgttttgtgttaaatacttcagacaaaatcattccttctggtttggcctatcccgaagcaatatgtcttttggagcaagaggcatcatgacttctagggatctcattcgtaatgaggcttgctttcttgttggttgcggtcgggatgtggatatttgacactccccttgggtgtcgtgactctcttaggagaagtatgtagcttccttcaatccaaggattcaggaatgtggtatcccggtcaactcgcttctctcatcggatacttcttcttggaggccggagatggtgagaagattgttttgcccggccctgagtgatatggtgtggtctttcccaagactattccccaatttacccaatgagttgatttggaaggcctctaaggatggttctttttcgttcaaggaggcttacttagctctcgttcgaggctggtgtggcgaggaagatgacatgtggaggcttatttggaagagtaaggttcatgaaagagccaaatgctttatgtggaaaattgcctgagatatactcctgtttggcagtagacttcaacagatttttggtaatgactccacctgcaccctttgcctctcggatgaggactccccccaccacttattcttcaattgcgaagttgccaagaagatttggagatctggcccttggggaatttgttctgatgctttggttttttctgacaacaaggctattatacgatggctcttatctccggcaaacattcctcttgctaatgcagaggacaggtcggggttcatcttgtatgctattatggtgtgctttcatctttggaggtataggaatctggctttccacgaaggcaccaagcggccgatccacaaattccaataagacatccttgatgattcttgctctcttactgatctaggagttgtggaggataatcggtcacatactcctgctggtgtggacttggtttctggttctaacactaggcagcacacttggaatgacatcaacctttttatggatgctgctgttcggggtcggtcggggattatgactttgattgcttttgattctgcaggataggtattggaggcacttaccaaacggcacgaggtaagttcagccttagaggttgagttggtggccatccaggaggcgtgtattttgattgctcatcgtggattcataaatacctcggtgttctcggattgtcaagtggttattgctggtctgactgctagaagatccccggattggaaggctaggcagtgtttcgatcagtcattgcaggccttctccgatgtccctaactcttgcctggtgtggatccctcgcagattaaatgtggcaggccatgatctagctgcttaggcgacttctaactgttgttttaaggttttttggttggggaagtggcaccctttgttgccactatgaactttgttctctgagtttgtttttcttcaataaagaactctttcataaaaaaaaacaataaagcataatttccttttctcttttagggttttatctctttctctctaactgctagccacaagttccttcttttattttatgatgagggctctgccaaccctccttgcgactttgttgtggctctagtcaggtgagagtgtttgtgttagtgtgcacaagagcctcttggtcctttctcgggttacagtggattttttctcctctttttttgttttaactatttgtggactctctttgataggttgtgtgactaactctatggaggattcgacgatctttctgaggttttgtgtgctttaaattaggggtggcagtgtcagattcagggtcgtggtgtgaattcctgcaatgcgaggtcaacaacggtgtagtcctatttggatttggagtaggctcttgtattaggtcttctcagggttggtgtgatttaatcacccccatgtggccttgccttttcacttttatacttcttgtacttcgcgtctaatcaccgtcaagggtctgtagtggactagctatcctcaaaatgtcctatggtcatccttccatcctgattgacaaaattgctagggtggttccttccccctttaggcttagctactctcgtactttgccactttggcatggctttgcctctaggatcagaagggcatccatgcttgaaagcactagtggccttccgcatcctcgagggctggctgactagattcatgtctttttgaggaggttaggagcaaactttcgtggggtttatctacctttactttacttttatccttacaaggatttgaggttttgaattatgtttgtttgtgagcacgctcttcggccattatctccaccgaagggtcattgtcggactctgctaagtctttgaacttgttttgaatgtgttccatcattcttttcattttttgagtgagcttcctttgttctactaactccaattgagtagcttctagctccttggtcacctgcagcaagtttgggtcgtggtcatagtaataaccatctttgtaatagcctttcacacagtcattgttgtcgtcctcctcttccctatcttcaggattcttgtcatcgttgaggccatcaaacacattctcaacatcctccctttggttctcagcattggttttaccttcttctcttacaccgtctggctggaggccagaggaaagggagtctgcttcctccataacagtgtccaatggagttttcttgcttacattcttttgtgtattcaccatggttgaggtggcacgaccactagtaaactttcctcagcttgcaatgaaagcaccaaaatatttaccgagatttttagaaaccaattagttagagcttaagaaagatataaaacgttaaataataaacaagtaagttgtacgtggtttgagcattaataattcttagtccacgagtccattatattagccttgctgacaagtttttagtattacaagtgtttacaacataaatattaactttgtattcctgttgtatctctctctctcgaagaaagctaataggaattttggcaaaggttctgtaagtataaaaattgttcaccctttgcacatgaaaagtaagggtatctatatgcacgtgtgtgggtgagggcatacccttcactcacctagggtttcgtactcaacatgttgtaatggctagtgttacaacatggcaatctgatcgttggttagtaggaagtcttcccatcgtgtggtgtacagctgctgcaaggtaattcgtgggactaacgacatgtgtcgcccaaaggtttcaccgtgcaaagttattgtctagacaagctgttgaatgaaatggagctttagaggcgcgaacgtgcactaccaaggtctgacataggggacgagatctgatttggtgtcagaagatatataatcatcgccttgagctctaggtaagatatagccaaataggttccaagaccatctaaccttagccttctcggattagactatcctgctaccctccttgaatactcatagcttatgatctttcttaatagcagaccaatagtgggagtttcggaatcttttctaccctcactgatagagaaaaacatcaagtaactcctagagtataacatgttctaaaagttgatcctattgctacgtttactgcctagattgctttgtttactaagaagatgcaacaataatactcactgtcagtgcaagcaatgcaattacaagctacatcatgagatgtgtgggaggcctcactcttatgcacaatgtacttccgccaataataattatttagttgatgttgttcctttagagaaagtccaagttattgaaaattattcaatataacctattaataatccttactcaaacacttatactcatgcttagagaaatcacccaaatctatctgttaggctatttttagcctacgttttgggtcactttttatagttattttccttctttgttatt

SEQ ID NO: 113390 - DNA, 2563 bp, Cannabis sativa
gttggtggttgctttctggtttttttctagaaggttagatgatgtttgttttttcatacttttgtaccttgaatttttttctctggttcgattatgggtacgattcaacttttttcgatctcattctcttcaaatcctctcatctgtacgctttcagttattgtttgtaggttgtttttttattttttacagcaatggaggtcgatatctctgcttttttctttttcctttttttttttttctgtatttggattattcgggattttattgctttttccttgagatctacatcttgatttgaggtgatttccctagtttttaaaagaaaacagtggagatttggtggattggggtgtttcgtctggctcacgaagaaagaggagtttcctctattttttttgttaggccggtatttttgtaaaatgaaacttttattttacatttatgtttattttttctttatcgggtataaatgtaaaatgctttctttattagtttattatagaaaaaatcccttttattttcttaataatacaaaaactgctaacacttttgtagaggcattttgttttttttttttattaaatacatgttattataaattaaagtggtatgtcttttataatggaacatatactccaaccaataatatgcttcttccaaccttaaagcatatttagtcaagccatgaacaaccatattcattgttcgtttggcatgtacaacagacacactagtgagaaagtaaagaagacaagaaatatcaacaattagatcattaaaagtgccaaaagaactagaacaactatataaggcattagtaaccatgcgagcatatttttacttgtgaaatctgtagttgtagctgcatcgcccaaatcaagctgtgaaagattgccttggcttccatttcattatatggaaaatttcattgagaggctttgagagggcagaaatcacttgactaacattgtcacgaaccaaaacaccaactcctattgtatttcgtcgagcatccaaagctacatcaacatatagtttgagatttcccaattcaggtggctgctacgatacaaagatggtagggtagtttaaagtccttgaggtagaatagagttgcaggtgatactttttttttaggtaaataagtcaattttatttcatcatcaacctgtacatcataacagaattacatccacatattcagttaaacaaaaagaactaagactcacaaaattcctaagtcctttgactgagattttcaaaccatattctgtccttctctcctatttttaatatgtttagactataaatcttggtaattacaatatgtttaacaacttgaacagaactagttgttgtttgcagtacttctttgtcccaaagtgctttgtttctagttttgaaaatcatataaacatatgtgttgagaaccaaaatgtaaattcttttccgcaattttccatgatgaaatctacgaatccaattcaagagccctaaaaaatgatattggttagtaccaatttcaatccaacagagcatctctgacagacattgcttactgtatacgcacctgaagaacaaatgttcatgagtctcctcattctacctaggtgatacatttcttgagctgatctataattagaccaataataattctccgcgaaggaggctagatggttagcaggtttggttttgtccatggattacctaattctgtttggcccaatatacagaagagtgtgcaaaatatatgtgccatctcaaatttcgaatgcaccattgataaataaactagataatctcctttatgcatcgaagaagaagcattccagtcaaaacaaagttcgatgaacgcctcacagctcgagcatatttacaaccaaagagcgcatgtccaatcgattcccaagcttggtggcaaatcaagcaagtcgcatttgtaattattttccttcaaacaagggatgttgcaaccaatagagcatcatggagaactcgccacacaatttttttaaatatttgtggcattttccgtgaccaaaagaacttccaccagaaagaagatgaagtataggacgaagatatatttgttttttccaaggaagtagcgaaatggtatccagattgtacagtgtatatactagatatataaatgatgatgccaaattagttttccatgggtgcagaaatagcacagcggggtgattaaaatatgatccacatccaaggctaagaattattcatgaagcatattggtattctattggcgttcttaatgatgaggttggccactactgcatctgcagggctcctgtagttggatggaacaagagcgctatgggtaggtatccatgcgtcagaaccacactttatgtttctaccctcacaaacttttgaacgcaaactagcagcaagaacttctcttccaaagaggatctcgtgccaagttaaagagggagagtgaccatgaggtgcttcaagaaaagagttgttggagaagtaacgactctttcgtagggttgtacatcagttggtttgggcgggttatcctatatatttt

SEQ ID NO: 113391 - DNA, 3085 bp, Cannabis sativa
ctctaataatggagtgttcttcttttgatcaaggcgtgctcggaggtcttcatgctttgcattatgtttttctcataagttgaccgaaggatcttccctcccaaaccctctctttcctcttggtttttgatgcacagaaacacttctttgatctccccggtcttgggggccagctttttctttaggaaatttatcccctgcagatcctttcctttcggaagatcaaaacaaaccttctgtggatcactggctattttgttctgttcaggtattgtcgtagggttctttctgggggtggtctctcaaaagggtacatgatggggctaggctccttgtccttctatttttggctccctacaagttgaaagggtcattttcctactttctcatgcacatagggtatagcagttgggtgtacatggatacctgcaatttacatcgcctttttcatagcagtcaataccttttgcattcttttgtgttgctctttctactctgctaactcagcctcttgttcagtagcacattgtcttaatgccactagctctatatagttatcttcgcacatatattcagtgtcatttgtatctccttttccttcaacatccacttgagaagccatatcctcttctactggacccttttggttgccaggttgggatggtgggcgtgaagtatttcttgttaaaaccatgattgtattgattattatatttctctttaagaaagcttcccccagctctcaataaagtaccaaaatgttgatcaagattttcgacaactattaattaaatccatttgaagtaattagtggaaattaaagaagaaaatttttacatggttggggcattaatgagccttagtccataagtcacttttattggtgagtattttcttatagagacccaaaaaaaaaaaattcatcttccatacatcatttgagtatttataggcacataataaaggggaaccaacctccattgttgaagtatgtctgaattattctttacacaaatccccagaatcttggggatagggcatcattccttatatattaagggtgtgtctatgtttatcataggtgtttagtgagacaagacttttcctttactgctgacttgatagatcataatgtagccgtcaaatgatgtatcgggtttcgtgaaattagggaaatatgggttcaaacccttgagcatgtctttttagagtaatgtgtaggatgttcttccccatactgtattaactgtatgcatagtacctttgcctcgggccgtacactatactccttatccccttttcgagtcgagaggaagagcaaaacttccatccttctggagagcccatccgaagatgagtaatctcctgaagctcctaccaaacattcacggttcggatgtgggttaatataacacgtctcgttttgaggggctcgttatcatatgtcacctttcaaaagtgccacgtatttatgaaaaattcctaagcaatattataaaaataataaaaaaattatagctaagagcacatacaatagctaatgtaaaaatttgattaaaaaattattttggataccaaaacagataaggatgcatcagtgcatacctatcaagagggtgcattgtataattttcttaaaatagctacaaatataaaattatagctaagagtaaaaaaataataataataaaaaaatcatatccaatagatgagctaaaataactcaaaatttatctcattaatagtgcttagctaaatgtaggtaagaaatttattggttttataatgtcttttgtttgtaagtgtaaaaaataaatgaatattatgtaatatataatattttattattttgcgtattataaatatattatttaaatagtataaagaaaaatataaagaagttgatgtatggtgtgttgggaaaaataataaacttcaagggcaacaaaataataaagaaacaaaacaaacaaattttactcggtttggtaagactaacaaacccacaaagagagatatatttcacttatcactcaaaaattacatatactctctatctgaatctcttcacccaaaatccaatacaccatttgcttctttctcactttccacacactaaaaacccacactcatttttcttttcatagctcacactttttctcacacatactcttcttttctctcttacacaaaacacatatttataggaaaaataatcttgggcaccaagataatttggggaccaaaacactccaaagctttctttagaaaacttttcaaaacttggccaccaagactttccttttcatacaattaataattagccaaaaataaattgtaacttaacaaatatagataaataaattaatttgagtcaaaatctaacaatctccatcttaactcaaattctctatcacaactcaaaccatcaataagattatatatgcatcgagttcatgctttcattgaacttcacttgagcacttgtcttcacattcttcaatcttttactaatgccttctttcttcaaacaacatttaacttaaattggagtcttctctaccttggcgcattccttcactctaattgaatgccttttgtggcttgactccaccttcatagctccacctaaattagtcttcttgactaatttgtacaaatttcgttgttttttattcttcacaactattaacccacctttcttaatagttatttcactatcttttgcgaaatagtcacaacctcgagtatccaaagctcccaaagagaataagctccttcttaatattgtatcaattagttttctcacaacaccattaaatatcttcaccttaacaattcctattccaataactttagagctagaatcattgcccatcaaaacagtgccactatcatatgcctcataagtgtcaaagcacttcttatatgggcatatgtggaatgaacactagaatctaaaatctaagaataaaaaaaaattcatcagcaatgacagagagaacatcatagtcactttcaaagtcgtcaccaacaatatttgtggaatttgatgtgtctttgcattcttgattcctcattgctt

SEQ ID NO: 113392 - DNA, 6204 bp, Cannabis sativa
  modified_base (3012)..(3012): a, c, t, g, unknown or other
atatgcatctaagcccaaaagcaaacatatagactcacacaggtcaaattaatttggatgggccctatcatgtgtgtaggtttattacagatggaaaaaattacaaaatatacctgttacaaattatttatatgatctattgacaattggactatgattaaaattagatcgttagatctatcaacaagttaatcatatcaatttaaatcaaataaataataggtttgttaaaaaaaaaaatttgaataaaaaatttaaataaaacaaacaaaatccatataacaatatgtgaaataagatattttttatttatataattaaattatcatttaactaaccaactaaattttgaaaatttagggttgttgaaataaccttaaatatcttttcaaaaatttaagattcaaatttaaactaatttcaaatatctaggtttatttaattattttatcaaatcaaattaaatatctaataagataattgatttgaaaataaccaatcagatattttcaatattattttctaatcgcatgatttaataaaattaaaataataaaataaactaattttaaaataaatatggttaggcaattattattttaagaataaaataataaagagataataattttctaaattatatatttaaatatcttaaattaagcatttttcaaatttctacaaaatatatctttgaccacacaaattcatttctagtcttccaaatggcccaacaagtcattgccaatgtcttcctttgctccccatctatcattcgaaacaagctgttaagccagctagcaaatgatgctcccgcagtcacactcaaatcaatatttgtctattgccagcaagacttggcaaaacaacagtcaaccaaattatgaacaatagtctctctatccaattgacacataggataaagagcatctatgttgacatgttttgatcgcaattgagtaatagtagggagacaatttgtcgttgcccaccacaacagatccttaactttaggaggaacacgaagcttccacattatcttccaaaaatcgtcattagctaattaagtgtctgcatccttgctctcttgaagaaatcggtaagcactcttaacagagaagtagcccgaaacctcccaacaccaaaaccaaacatctgtaatacgacttgaagataaaggaatgttgagaattaatctcacatcccgttcattacacaaatcacgaaccaagtcaatatgacaggccaaacttccaggaaccataagagtattcactagttgattaataagagcagggtgaatagatgtgccaagaggattgttctcatcaggaatctaagggtccagcagcatactaacattggagccatcaccaattctgcatctagcaccttttctgactatatcttgagtttcaaaaatgctacgccacacaaaactcatattacaacctaactcagcagatagaaaagataaggtgaaaatgggtcaccctgtctcaaacatcttttagggacaatcgacaacctcttgccaaccaggtatgatagtgtaacgccctgatacttaggtgcactacagtgattttccaattaacgtgccacctttgctaatcaaagagttttccttgaaaatcgcatcaaattaaaacatttaatttaattattaaactttataaacttttatagggttatttacataagtcgggatcccgtattaaaaattttacaaactatatcaaaataaatttataatctggtcgcacaacactacaaaataaaaccctagatgtctcgagaccgaaccctccaggttgtgtcgtcttgacatatataatcttcatccaagcctagagctcactcttgttcaaccattacctttcctttacctacacatgaaagtagcatcagtgagtcaacagactcagtaagaaaagcatacaacaaatcacatattcttgacttgtgtctagcgcccatacacctatccacaaggcttaccagatgacttaagaatgttcttaatagttggtactactgaccatgatatcacccactaccacaactatgaccgcactgggggacctgcactatgttcacaccgctatgatagcatcaacagtacccgaaagtataatttcccatgatatcactttcaaacagtacgatacctgtactcctgaaccgacaaaatggttgtgctgctatgatagcatcaattaatactttctggggtgagtaccactcttaaccagtacgatgactgtactgccgaaccgacacaatggttgtgacactatgatatcacccaaatcatatacaatcacgacacaacatgtatatatatcacacatacatacattcgcatatacaaaatgttctatactattcttaccttgtttccaaattcaagtacgccggtcaactgtaatggaaaattctcgagctgaatggaggtcctatgtcacattacataaacgggcaaataactttaagtaagccattcccaaaatccagtcctaaagaccaacaacctaatactgcactaaaccttgagaaaaatatgaaaactagggttctagccctacaaaaacaggaagaccgaaagtccaaaacattctaggtttttttcttatttttgtgctactctaatttctaggttgaaaaataaaaacataatattgctatcatgttcataaatggggcagctatccacaaaaagaaaggacacctaatcttaaagtaaaattaccgaattacccttgcatcaaaacctaaatcaatgagcgtcttaggggtaaaatggtccaaaactattatcccgcctaaacacaacactcaagtccaacatacaagaatccattaaaactaaaggttttatgtttacccatttgactaaaataacactctgttgcattttccatcgccacccagctagaatcacaaaaataatagtttttgcatttaatataaacatttatatataactaccaataataataataataatantaataataataattaattaatttccaaagcacttaataatccatatcaaaattttgcagtcattacaattattctcccgttaaaaggatttcgtccttgaaatctaacctcaataccactggatattgagtcctcatgtcagactcaaattcccaggtggcttcctccaccttactattcttctaaagcactttgaccaagactacggtcttgtttcgaagaactttttctttcctaccgaggatctgaattggttgtttctcataggataagtctaactgtagttcaagggtttcataagtcaaggcataatttgagtctgaaacatatttcctcaatattaaaatatgaaatacattatgaccagttaataacactggtagtaaggctagtcgatacgctacctgcccgaccttctcgagtatttgaaatggcccatgaacctagggcttgacttgcccctctttgcaagtgcctaatgcccttcaccggagaaactcgcaggaaaacatgctctcgtgcctgaaatgtaatgtctctttgcttcgattcagcataacttttatgcctgcttgcgaagcaagcatttgagccttgattttctctatagtttcactggtcctttgaactaactctagacccaagtacttcttttctccaatttcttcccaatggattgggtaccgacacttcctactatacatcatctcataaagagccattcttatcacactctagtaatcgttgttgtagaagaattctattaaaggagagtacttattccatgaaccctcaaagttcatgacacgatcttctagtatctgaatgattccctctgattacctatcagtctaaggacgaaaagttgtactaaacatcggtttgtacccgaaggttctctgaagacctacctagaattttgatatgaactttggatccctgtttgaaacaatagattaggagctccatagagacaaactatcaccttcacacacagcttagcataataattcattgtataatcactctttaccagtagaaaatgagctaacttccttaaatggtccactatgacccaaactgaatcgtacatccccctggttctaagcaaaccaaccacaatgtctattggaatatctttctacttctattcaggaaggactaatggttttaataacattgtcgacctctggtgttcaattttgatttgttgacatgttaaacatttagtcacataatccactacatctttctctattctataccaccaataatagggttttaaatcctgatacatcttagtagttcttgggtgtaaaaaataaagtattgcatgagcttcatcaagaattttctttttaagctcaccagcatctggaacacaaaattaaactttgaaaagtaacgttccattattcgagattgataagtccctaggctgaccgaccagtacctcatcccaaattttaactagcttaggatcttccaactgcgcccttctaattctttctaacaaatatgattaaagtgtcaggttgtgtaacttcctaaccacaaatttaatttcaatcttaaccatttctgaagctacggtgttaaaaacctgtccgagaccttgtctactctaggcatccaccaccacattggctttctcgggatgatacaaatacccagaatcataaaccttaacctattccgaccactgtcttagcctcataattaaatcttttttaaatggtgaaatacttgaggctcttataatctgtgtaaatcctgcattttccccagataatgtaaccataattttagagcaagatctatggcagcaagctctaattcatgaattgagtaacattgtttatattccatctattgatgggaggtaaaaactataacctagtaagcttgcatcagaacgcaacctaaaccctatttggatacatcacactaaacaatgaacctttcttaatctgataacaaagctaacagcggtgctgtaattaatcgatgttcaacttctaaaactcgcttcacacttgtcacaccatatgaactgttggttcatcttagttaactcgattagtaacatagagattttagaaaatctttcaacaagatgttaataataccttgttaaaccgagaaaatttcacactttcatcactgtcttggcctcgaccaacttttcactgactcaatcttccccaggtcaaccatgattccatcttttctgataatgtgctctagagaagacacctccgataaccaaaattcacactttttaaattttacatatggcttgcaattcctgagtcattgtaatatcattcagagatattgctcatgctcctcctccgtttaagagtatacaaggatgtcattgataacgactataacacggttatcgaggaaatccttgaatactctattcatgagattggtagaggccgctatagcaattattaatccgaatgacattactgaaaactcataatgactatacttggtccaaaatgcaatttttggattatcctcttcttgaattctaaactaatgataaccaagtcgcacgttgatatttgaaaattactgattttccataaagataatcaaacaaattatccatcctgggtaacaaatacatattcttaattattaacttgtttagttcccgattgtcaatacacattcgaaggaaaccatccctcatttttttacaacaaaaccagagctctccaaggcgatacactaggtcgagtgaactctaaatcaagcatcccctgaagttctattttttactccttgagttctcataaaaccatcttgtacatcgcttttgaaacaagtcccacactaagtgccaaatcaattgtagaatctatttctcattatggtggtaatcaagcaactcctcgggaaatacgtcaagaaattctttacaatcctaactacctcaggcccaaatgttttaggtctgctggagtcaatcacaaacgctaaaaatcctacacatccattgtatagtaaatctttagttcttaaaactgaaatatccataatttgaaaccctaagcagatccaatataaacagatggatcttagtccttcggttgataagttaccatcttccacttgcaataaatgttggtcgaatacttggatagtgttggaatttattttactaggatctta

SEQ ID NO: 113393 - DNA, 3253 bp, Cannabis sativa
agagattgtttaagtgagcttccttcagtccactcatggatgggtaagagggtttgaattatctgccgactcattcattcaaacacagtagaaaaagggtctaatatttactactgtggatgtgtgaatgatgcgggagataaaatttcatccttttcttctctatgcttggactgaagggagctcccttttgctatttttcatcacttattatgaatatatatgttgtatattcttcttttctttctggtcattcatacaatgtgttttgtgataatgttacaggtataatgtgtgctttgatcggttagttctattaataatattagtgattatgtgtgtaacttgtaaggctttgcaatagatattattctctacttcttcacgtacgtactaggtttcaattattgatgatcttatactgtatttcactagtacgagttcatttcacttgcctgccggtttttcttttccaatataagaaatgttatattagaggtcatttcattttgaagctacagtactactcgatacagtgtgtatatatatgatcaataattgctatagagaaaagtcatgacaggttttttttttctttctcattttactgtgaaattgttttgtagggaaaacaaaaaacacacgaaatttttcattcatttctttctttcaccagatcaattttgtttctagttgaaaagtcaaaagagttttacattttttacccttcccagctggccaaacgttttttttcactaaatatctgcgtcacggagagaaaagtacttgtcatgatcatcgtatttacgtattaatttctttacgaaaatagcattgtttttcctctttctctctctttttttttttcatcttgggttattataattgtgatttagtatgattaagaatattaagtgaagagtcctattatattttacgtactcaatttctttgtacatactatttatatttatttaatgtgatgcaaagaacttagatgttaggttacgtcgctttcaatatagttgataaaaattattctgagaagagcttatgatgatgaatctgatcagtagttgatggccaatttttagagagaaaaattggagggtgctggttggtttgcttgtcattattcttttggccaggtttctgtagtggcatatttatatatatattaacattgtttaattaaatgtatggttaatagtagtttatagcccgtgcaatttggtatcataaagaccgccccatgtccatgtctagtggggctaaaacgcagtctcagaggttggaacttggagctagcctcatggttttattggctttcacgacaccacctttacctattatatattatttttataatgtaatattataattaatacccttaatatactattttcaattttcactcatttgaagaagaagaagaagaagaagaagaagaataaccttttccacactgtatctaagagttatttaaatatgttatcttatacactctaaaaacttgaaatcgacataataataacgactactgcttgtgttgactgtcccaccagtcttattattttttttctcaaagtaatgtttataatcaaatcaagtaccgaagtttgttaacaaaaaaaattacaaaatcaagtaccaaagttgtgttatatgttcatatataattaagtagtgtgtgttgtgtgatctatatatgtgcgtgtgtaaaagggtgaagtaagttaaaataatgagttccttgggcttggcgagatggaaagtacaagtaaagtatattaacaaatattatttattatcttttaagtaatgggcatatatatatacgttattacttctttttttaaaaaatataatgtacttatgtataatattattcctccattattttctccaaacaggttgatttgggtatgagctctgtgctgtcatgtttgtcagttccgtagttttgtatatataaaaaataaaatatatataggtgtgattgatgtcagtttgtgtagtgttgtaaatatttgcatgctgagctggcattgtcgttttctcctttgtgtacaagcattgctgagatggcatatatccgtaattagatcttcatcggacgtaggagattgtcccaacagattgcttagtttgttaagtgtttgattcggtgcaggatcattgctattttaggtactacaacacaactatgaggtacatattcttttttataataattattaatttaaaatttttgttactccatattcttattattttgaggtgagtaagaatagttgaggtttgtattgattaaataattcaaatttcagagaaaatttaggatttttcattcttaaatagttatcatatatggttgctttttttttttttgggtcttctttcattttaagtcccgtttgtgttttactagtgccattccatttttgatagtgcaattagtcttgcctaacattgatatgttatgtttttgaatgttttagtcttgtcttaactgtgatacggttttgagtgttttaatcttgtcttaactgtgatatgactttgagtgttttagttttgtttatttgacatggttttgttttgtttcattgttagttattttttgttcttcaatgacttaccattacattactcttagtggttgagagtaacaatttttttttgcgattgaaagagtttttagtagtgtagttacgttccttacatatagctgagtgctcaaattacgaggttaaatttactgtaacaatttttattgttgcatcttaaggtaaactgtgatactgcaattttttttatctgattttattttaatttttttttttaggatctaagaattaggcgactgattatttaatttgtttttttaaattataatcctaatcaagtttccaacaagaaacatatatcccaattgaattgtaataaactattattttagttaattactattaataaaatttgatgatcgatttagtaaaaaaaagtttgcattaaatactatctcaaaacaattactgatcttgaatcttacatatatgttcctaccaatcccccccaagtatttataatctacacaattatgtaaacctttcaaaggtttacaagtaacgatctgtaattaattatatccgggttatttgcggcaaaacccctttaagtggacatgtttttacaactaaccccctaatctaaaattttggtggtaaaactacctaaaccactagtccgt

SEQ ID NO: 113394 - DNA, 5779 bp, Cannabis sativa
aatcagattagattgaaatgggttttatttagggcataaaatcccaacacatgtatcctggaggtgcatggctggatagaaatttgcttgacaggattttggtgtacagcttcacacgtggacaacaagccagaatactaattgggcctttacaacccacaaaaatagagggaaaatatctattttcaaggagcattttggtcatttctattttactaatttaatatgtaaatataaacttatttgacctatttctaaggaatttaaaaggtttaagctctcctatataaagggccttaatcaaaccctaaagccctttgttcaaaaccctagctctaagccttataactcatctcttactctctcacacgcccactactgctcttctcatacttgagatttgtcaactctgattcctacattataacctttagaaagctacttcaaatcacatctatagtgatctgagtagtattatctctcgatatcaatataaatgaaaggggagtaggtcattgcccactaactaaggggactgaacctctataaaatcttgtgttcatttaatttattattcttgttatgtaacacgttgcaagcatcaacattaaatacaaatctactgtcggtcgaccaaatctaaggtcaatagtttggtactttcattgagagcaagttgatattatatccaatcaaatgccatggttaaaaccaaaagaactccaactacaccctctgcctcatcgggtctccctcaagatcctctgattgcagatcttgatgtccatgttccagccacgattggaatttccatgaacactgtagatgtggtcaatcctgctatctcggcagaaaacatgaatttggccactacaattggccacggtgacacaaaaatcctagtggatctgaataattgatccttgcctccaagggaagaccctccactgacgcctcccattaaaggatggaccgacggggaacagactccagacacaacaactggacctcgtcccttatactatgttggaaagaagggactaggaattagtgagcctgctattggcgatccccatgtagacttgggagaagatctcgagttagccggacttagagaggccatttgccaagctggccaaactgaagaaccatgcgttgctgattgtgatgtattcgctcaacagagatgcaaatccctgtgttggatatggatgaacaagagtacatcctccaatctcactaggcggagctggaccaccacaatagagaagccaatgacctgataagacagttcaatgaaagaactggtggaagaggctaagatctcatcagagatccactctaaggataaactatccaaccaggttctttaggaaccaggacagaccttcccctacccaaagggagacaggccttgccacaaaggtctaatggcgagaacaactagattgcagcaactagcagtctgcgggggggccgaccaaggatctcaagctcaacaactcccacattagcaaacctttggttgaccagccctttggaggtgtacctttggccgattagaggactgaactccctgcccaaggcatctatgagcgagtaacccaaagggtaatcttcaactggctagggctaggaacaggtggaaacacccaaaacaacaatttgagaagtgagactaatcacttctggtacctagatccacctaactccagcaactggtgcaatctacctcctatcaacacaccggctgcaccagccaaccgggggatcacaggaaactagaccctacttagcacagtgctggttgcccatgatcagttacccaacataggcttggtcggccaagaccaatctccctatctggtagtggccgactagggccagtaaccaagcacatggctagctagcatcaaccatacactctcctagagcatggccggccggatcttagcacatttgagtctatagcccatccaaggagggccagtcagccaagtccctatagacacagatccttttgtgcaagcacaatttgaccaaataagggacatgatcaagggcctagctggtccaaaaccttcagaccttgaacttgataggttaagaggatcaccattctcggcatacataaatgccttaccctttcccaagttcaagatgctggtacgatagagtataccgagcgacaagacccattggcacacatcaagtacttcaaaatccaactcaatctccaaaagatcactagtgatgtgcggtgtcacatattcttggcaactttgtcagaaacagctcaacaatggtactttaagctggccctaagaaggttcaattcctggaatgagttttcccaagatttctacacatagttcttatcctcaaggcttataccatcccagctagaagaccttgtcaaagtcaaacaacgacaaggagaacctttaaaggattatatttgaaggttcatggccgagaccaccaaggtcaaaggctttacagaagacggctgatatacggctatactgaggggcatccttccactgagtgacttctagaaagatatccgaaggatctcaactaacaacatgaaggagctttgtcaagatagaagaagctatctgacaagctcagatagggcaagttagaaataggtagtctcagggcatcctgcaaccctacaatctaccaagtgcacatgcaggcactagcaaatctgtccaaacctccagtggcaagaacaataggagcaagcataattatagcaactctggaagaaagagtggaaaaaaggggaagtataacacttctcccacgccacaaaaccagaagaacaaggaggagaactttacccgcttcaccctcctgatggagaaacctaaagccatcttcatggccacttaaggaacagtcctatacaagtcatctactcaacacttcaactaacgagaagtctgagcactcaagcaggacgacaaatgacaaaccagccacctcaaggaggctagccggccacccctagccaaccctatggccagcataggtaggccaggttctagacatcatagggccatcgagcatgcatgctacaggtgcttggtgggccagacattggcctgataggattttggtgcacagcttcacacgtggacaacaagccagattgttaattgggcattagcaaaccatgaaaaaggaggaaaaatatctatttttaaggggcattatagtcattcatattttactaatttaatgtgtaaatattagcttattatttttttatctgtttttgagagatttaaagggtttaagctatcctatataaagggccataatcaaaccctaacaccctaagttcaaaaacctagctctaagtctgataacacatatttctctcacacacctactactgctcttctcatacttgagatttgtcaactttgattcttacattgtaatctttagagagctacttcagatcccatttacagtaatctgagtagtattatctctcggtatcaataaaattaaaaggagagtaagtcattacccgctaactaagggggccgaacctctataaaatcatgtgttcatttactttattgttcttgttgtgtaacacgtgacaatcatcagcattaaatacgactccgttgtcggttggccaaatcttcggtcaatagtgtagactattaatttttttagtaaaaaaaactgaaaagagttttaaaaaacttgagccaaacaccattaaagtttttaaaataaaaaaaaaaactattttctgctctcacttttgaaaacacaattctgaaaactaaaaattgaaaacacagccaaacaacctctaagtatcatcaaaatatttgttcatacttttaatataaaaaatatcttattcactcggcttagctattataaaaacaacatttgtgtttttatttaagagaactttacataaattattatttttagtaaaaaatttactgtttttcgtttaatgatttttttttttacattttatggtgtttataaaaataacacaaaacaataagaaaaccatgtaaaaataacaagaaaacaacatccaaacaacataaaaaaaaatatacaaataacaaaaaaaaaaacaaaaaaacaaaaaaacaagagtacagataaaaatacatcaaaaatcttgaaaaacgtaaaaatatttaaaatctcgtacaatcgtatatttgttgtttttgtatatttttgaaatatatatttttttaatcgtcttacactttataatttatagatcgagtcaaaagactaatgggctataccaacaagaattgcctatcacttgtcatgtaactctacttttataagcagctcctccaacgattattttctaccaacaatacacttttttttttgacaagagaagctgctaaaaggaagaacaagatgagaagagcagcaatagaggagactaaacaacatcctcaagatcatcctctcgcagcctaattgcctcccttgctaagaaatgagcagttgtgttgaactgccgaggtaagtgcacaagagaagcatcagggaaattggagaaggaatgtctgatctgattaacaatgagtgaaagcgtcgagttatcctgccaattgccattaaccttagaaaccaaattgagacagtctgtaaaaattgtccttggttggtggtgcagagatatgcaccaggagagaccgtgaaaaagggcttgagcttcggcaaaaatgggcaagggagctctaggcttctgaaaattggtagaagcaataacttgatctggcccaactttgaggacacagccaatgcctgtgacaccacggtcatgatctaatgcagcattcacaaacaaagcaggggtgtcttgctgaatgaaatctgaataaagtggctgttgagatgttgaagtagtggagtcttgggaatgtatatgttgagcctcccgatagtcctgcagaaaagtacagacaaattcttccacattgttaggctcagagcagtttctgaataaaatagaattcgtggtggtccaaatatgccatagtatgccaatgaaaagaggaagatcttctttagaaattagttggagggcctgaaggtaatagtccttaatgtcatagttccggtgttgggtgtgaaaatctttaaattttgaatgcttccaaatatggcgggctctggaacaatcaacaagagcatgagagactaattcgacagcattgccggagaagtgacaagaaggctgcagaaggactttcttgtgaaagagatttaaggcacagggcagaatgcaattgaaagctttccaaaagaagtgtttgatcttttggggcatggaaagggaccaaagagttttccaccatctttcaaaggggtttggattagaggaagaaggggagtggatagttgtttgagcagaggcaaggtgataagcagatttgaccatgaggatgcctgagttatgaaagccccaaatgagagtatcagtaggattattgagaagggaaatttggagaatcttgttgacctagtaaaggggaagataatgcttaaggtgagggacattccaagtgtgatcattgtttataaaaaaggaaacaaaagacacagggggggtcgataggatggagaatggtaggggaagaaatgccagggatccaattgggagcagattgttgtcgagtgaatttcgcaacaccaattttatatgatattattaataacagaaagaaatctatatgaagaacaagtgcgagta

SEQ ID NO: 113395 - DNA, 945 bp, Cannabis sativa
taaaatgaaaaatattcttatattattaacatcataaaactttacaatatgataagtagtaggtatagacaaggggaaacaagaagttttattgattgatgaattagtataagaattattttgatctacacttttatttactgatgtaaatgaaagattacaagagtattgatttttaacatctgttacaatagctaggtgacactgaagacatgactttggttaactaggttcatcaccaagtagataaagactatttttaagctttcccttgaccttgtccttaacaaaacaccagtgtttataaaattccaaaaagacattattatcatttgttaatttagaaacactaacaagatttttagtgattgctggaacttgtaaaactgattgcatatgtaaaggaaaagaatgtaaagaagatggtatagtagcataatctatatgaaaaattaaaagcttcttatcatcctctacaacaagggttttttaaccttgataaggaacaaaaatgtcaagaatggagttgtcaaatgttatgtaatttgtagcaccattatctacataccaagaaccaagagtgatcatcaccaaagtcttggatcatagtagaggagtaggcttgtggatcataatcaaactctaattttgtgagacaatgatcacgattctggagcccttggttttggagtgatctagcttttgtcaaatcgatagtgacacgttggagttgtatgaataatgtgtgtaagagctcttatattaaggtaacatccttattattatgacacaaaagattgagtccaatttccgaagcaaagtttgaataattaattagagctaaaattattcctccctagatctctaaatcagaagcagtttatttatctgattatcaaaaggtatacaatatgtatttatagagttagggaggggacttagcta

SEQ ID NO: 113396 - DNA, 2536 bp, Cannabis sativa
  modified_base (2500)..(2511): a, c, t, g, unknown or other
tgtgtgagatttactacttgattgcgtatacttgcgtagtgtttaaaattatagcaacagcaactcataattgctaaagcattccatcaatttgaatcttataccagaaagaagtaagaaaaaaaaactaatgtaagatctcatttcatcaatttcagtctcacagacattaaatagaactttttctaggctcaaaacaggaccagaccaacctcagtacatccaacccataattgacaaaaaaaaatgatgcatgcactatctttaagaaaacaaaaaatgagttataccaaatcaggtttttgttttggagtgattagttataccaaaaaatgcttatccatctatgattgagtaaattttatgagtacaaatcgtttcatatattctaattaaagctatatattcttgatttatttgtcaaaagagaaaaaagcagatcaacattgtaatatgtatagataaggattgatttgagttagggttcttctttctaatattaagtttttattgtatagttttctagagactaaacaatacaataagggctcgtttgataggtcgtataagagtcatattatcaagtaatattatatttggataaaattttgtattgtgtattactaccagcgagcagtgagcaccaaacttcatcaaaagttgaaaattgtaaatttaactttctatttcaattattctttttcttttcgaaatatattgaatgtaaagttcaaacttcataagaatttttgagaattgctcttggaacatcttttctcaaaacaagaaattctagttagtttttttttttttcttaaaaaaaaaagaaaaacttttcattcaaaacaaccttaaacaatacactcggcaaagcaacaacccaccaatttaaaaattagaaatcaaagctagtactttcttctagttagctttgatgtattatcacatgaaactctagcttgaacaattgttttaatttgcctacttaaggcagtaacaaaccaacaaacgccttcaaaaacaaaatgattcttattaagccaaacacaatacacaacaacagccattatcccactacttttgtcgacgtatttggccaaatataccgacaaaagttgctggcgaaaaatggggcagcgaaaccccaaataatccacctaaccttaatcccatgaattaaaccacgctcctctttccttaataagagtctcaacaaaacctctgagcacataatgaagagatgagaggacaactaatctccctatctcaaaccacgactagggttaaataatttagtgggacctccatttagaagaaattggaagctaactgaactgatacaaaccatgatcaatttcctgaatttattattggatgacgccttataattggttagtgataaactattatctttattaaagtaaaataagtgggactcgatattaaattacacttcccatgagccatgggtgccctttagcattccaagggggtttgaggcaccatggatactctttaattagtagatttttttttattacgtaacaattatcaataaataaaaaaagtgattaataatgtagttaaaagtaattaataattaataaagtagggttcaaattagggatgcacattttttccatggggatgggcctcgcagggatcccgtttaaatgggaaacaggacggggacgaggatcattttttgtccccgaatattaaactgggtgggaacggggacgacactccccgcctcgatggactccgtttaatatttttgttatctttctaataattttttatattttatgtttgtatattatttagtatattagtatctttacttttttctatatatttttaagttgtaattagtatactaaataataaataatgtgtaatattttaatttttatataatttaatattttaatacatttaaatttttaataaactttatttttatattaagggattcttcacttcgtccccatcccattaggggattttccaccccatctacgatgagaaatatgcggggatgggattaaaatctttagcagaaatagaatgagggagcactcctctctaattttacgctccgtatacatccatagttcaaatacatattattatattaagaaaaagaaaaatttagaattagaggttggtataccaattaccaatctttttgttttaagaggtgcaataaaaaatgaggcttttataccatgaaattttttactttttttcttttttactatgggacgaattttttttcaaaaatactgcgtataaatttttattattattctactgttgttatttagttgttccactcttatttttaattgttctcttttgttgttttacatttgttttataaaaaaaatagtatttttgtaaaaaatttcatgtgatagtaaaatcataaatttttatctcaaatccaatatttttgtagaaacccatgaaaatttataagggttaatttcacaannnnnnnnnnnnaacaaaaaaacaacaaaaatacggt

SEQ ID NO: 113397 - DNA, 4022 bp, Cannabis sativa
atgtttgtaatttgttatacgtgaaatctagttaccagctagctcatttggttatgtatctttgttattccactgaattaccattatgtgctttgttgaaagtggttaaggattctttcaggcacaagctttttctattcttactaatgtgttttggtccttttggagggcctagctatcatatattccaatactaacataagatcacgtctctatacatacagtagttaggtgtataatctttccatttcaacatccatcatgtagtatcaactgggtcttacacaatttatccagaatattgaaaaacgttgttcatatctgtctaattagctcttgttttctggtgtaatcatgaattactcatgattgttttaatttcagagattaactgctggagaagatgatgatcttcctaatatttggtagtctctcaaactaatcttaacatgatttatgaagaacatcatggaccgaatagcaataaagattaggataaagtcaactggatttaaggcaaccctgatagcttcatgaggacattttactaattgttttacttgatttctaataactgaacgtaaacaagttattccagcttagttgaggaatgccatcttttaattttggcgttttatttggatacagagctaacatattaactactaatagttctttgatcaaaatttcctccctttattatgtttcatcatgtgtaagtgagactcctttcatattattgtacttgaaaatcttgtggcacttattgaagagtggaaatatgttttcaggtgatcgatatctaaggccatggataattccagtgcctgagattaagttcatgacaagggctgaagaggacgagtgcttgattttggctagcgacgggctttgggatgtgatgacaaacgacgaggtaggagaggttgctcgtcatcttctcagaagacgccgtaggttgatgatgagtagtagcagtagttcctcggatgatcagatatcaccagcacaatttgttgctgatagtctcactgaaattgcttgtggaagaaacagctcagacaacatttctatcattgttgttgatctcaaatccaagaggaaacgacaactaaggcaatgaaaaaagaggataaaaaggaatgagaatggagatgaaatctctttatatcttatatctttctctttctcttgaaaatgccatctgtgattcaccctgataggtcaaaggtaaggattgatctaagtaaaggacattccacctgttctgtaaatgatgaacaggttccataatacccacctttgacttatcttgcctaacctgtacagtacagtattgactaacaacatgaatcagtttgtttaaatagcaaaatatttaaagaaaataccaaaaaaagaaaaagaaaggctagatcaatcctcacttttaattggcttggtccagaagaaaaaaatagtatttcctggaggatgaagaagtgtagaggagaagatttcaaaggataaatagcttgcaaataaactaattgttttatttctctttatcatgaatattattcaccataaaccacagaatgggaaaaagaaactacaagctcttggacatttagtttcggggctggattttttttttgtgtgtgtgtgtgtgtgatctaccaattttaagcagtgtccatttaataattacaagtgatttctccattagcaaattaagggtaaagctagactttgcagtggctggttattgtgttctggttttcttaattttgacttaattatttgccaagataagatttgtggtattttctttcagttttggcttaatttcaatcatagtttagtgtgtttctctatctattttttttttttgtaatatatttctcttataagataagattcaaacagtttgttgcacaaatatttattttattttgtacacgtgtaaatattactttctagactttttaaatactatttttatattttgtttttttttttaattttacaaaacatcttaaataattacattatatactgttatgtaaaataaattaagattaaaactatttgaatgttgttgtagttattgaatgttctttgacatgaataagaaactaaagtacagtgaaagagaaagagagagacaaaagaatactcttatttggttacgagggaatcaaatcaagtaatatacaatgaattagaatcaataaaaattactttaactaactttggtgtagatatagctaagggctaaccacaccaactaaaataacaaactaatggcactaactaattcctaacaatctaacaagcttgattttgttaagacttctctgcaaactcataattggagccacttgtgattgtgagtttggtcctgaattatggaaagcgttgacttaaaattactttagtgagactatcagcaagttgatcaatagtaggaacatgattgataataacttgatgattgtgatctttttctctaacaaagtacaagtcaaactcgatgtgcttggttcgagcatgaagtactggatttagatatgagcagaacagtactaagactgtcacaccagaccacatgaggcttgaactatagaatgtgtaacttagtgaacaatgactggagtcaagtaagttcagctttggcaaggctgcgatacttagcctatgtgcttgaacgaaaaatagtgtgttgtgtttaagacttacaagctattagatttccacaaaaaaaaaaaaaagataacaaaacctaaagttgattgttgatcatccatatttagtggcccaatcagtatcacagaatgcttccaattcaagatgcatatgccatttcatttctagaccataatggtgctaccaacatacctgagaattctattgacagctgaccaatgtgtttggagaggattctccataaatcggcaaactttatttactagagaagagagttcaagtcgagtgatagtgagacattgtaagacaccaaatatggatctatagagttaagggatttccactagctcactattgaaggcagaaagttgttgtccactgttcattagtgtgttaatgggttttgcatcttgcatactagccttgcatagaagatcttcagcatagtttgcttgtgagagaaacaatccatcactgttgtattccacttcaataccaagaaagtatttaagttgtccaaggtcttttgagtgaaagtttttgattgagagctaagatgagattgtctacaattgttgaatcactactagttaccaaaatatcattaaaatatatgagatctagtgtgatagaggtagaagagtgatgaataaagagtgaataatcaaacttggatgacatgaatccaaatgagagtagacatgtgtggagcttcttaaactaggctttaggggcctgtcttaacccatatattgccttgagcagtttacataccaaattaaagccattagaaattttataactgagggttgcaacatgtaaacctcatctcgtagagtgccattttggaaggcattatgcacatttaattgccttaaaatccaacctgtagagagaataagagtcaagaccacccttactgttaatggttttaccacagtgctgaaggctttagtataatcaaaccatattgttggtggaaatcctttgcaaccaatcttactttatatttgctaatggtaccatttgagttttcttttattttataaacccacttgcaagtctagatctgatttctctcaagctaacatctctcctaacatggcctatttcctattgaagagcagttttaatattggtaggtgttttagacactacgtatgcctttggcttatttattaaagctttggcccttgtattcatttcatgagcgttctatggtggattattgttgggattttatgccctaaataaaacccatttcaatctaatctgatttgttatcaatataagattagaagtcatttatgtttacatagagttttcatgtttat

SEQ ID NO: 113398 - DNA, 1153 bp, Cannabis sativa
aaaaaagtatttttaggaccgtcgcgaattttgacttttgtagtagtgaagtctccagcgactgcaggttgaatcgagagccacgactgcaacaccaaatctgccatctttgtaagaaccatccattaaaaagcaatgcgaagcatgtgaaataagacaaggggtggcgactctgttgcagcttggggttcaacatgttcagcatgttgaaatcattgaacctgctccaaatttcattctgataacatttgaggtcttttgcctgctcccaatgaagaaccaagtttctaaggttccaaatggtattaatgaaaatagtagagcaaatgatgaaggatttcagagaatccttggggatatcattagcaatgctcaaccaaagagattggaaattactatcgttggtagcagcaaaaatgactggtagaggagcgccaaaccagagattacgagataagttgaattgggtaaacagatggagggaagattctgtatcatgatcacagagaaggcatcctttgtcatgacagaaagtcattttttctctcagaggaagagcaaaggagagagcacgccagaggataagactgagtctcggatggatacctttattccaaattatcttccaaattggctctggttgtctgaaacgattaacattggtcagccaataagctcccttgacagagaaggagcctttggtagagtctttctagataacagtatcccgaaggaggttcttattaatctcaatagttgcaatcaggcaccctagagaatctccaaacaacaaccgaaggtaggcttcattccaggtacaggttctgctccagagaaggtcaaagaccgttctgagatgggggctttagtccaggctttttccatcacatcacaaaaatcttcataggacagccacgggatgcagggttggtaccataaatcaacatctttcccatttgccaaaatggtacaagacccatcttgaatgattttcctagcgatgaggaccccttaacaatagagcgccacaaagttttttagtggaatatcttgtttgatgttatcccaactagaacgactctgaataagcacttttatattattgtggacattatcccacatgaaatagatggtagagtattgagtcatatat

SEQ ID NO: 113399 - DNA, 2251 bp, Cannabis sativa
aatgccaagagatcgttttgggctaagttcatgaaggttggggatagatttggtggcccgtggttgattttgggagatactaattttgtgctcagtgattcgaaacgatagggttctaaggggagggaccaattatcctattcatttcaaatttggtggattctagaggccttcttaacattcctattcatggtgacaagctgacctcggataatcgtggatctggtaaaaaccatgttaaatctactctcgacaaaggtctagttaatggggcttggctcaatttattcctgaaggctgtcgtttgctcgtctcagatgagcaactcagatcatagattgttatgccttcttactagtgggttggaagccaactttaaaagaagctttaagtttgaagaaggctggactcgagatgaaaggagtaacttggtggttgcccatgcctagaattcggttgttcactcttgggcccctgccatggttttcaagaaaattggggccactcaagttgctctcttgcactggaatagatcccaatttggtaaattcaacaccataataaaagagttggagcagaaacttaacttttcccagagcttacctgcggattccgaggattgggaaatagaatgtttcatctgacgatctctcaatgagaatttagaaagaaaatctttatgttggaaacaaagggccagaatctcttggcttaaggaaggggataaatgttctagatttttcttcctctcggctgctatccgagggaggaggaatgccattgagagtatcttaaacaaagagaacatttagattactagtcgggagttaattggtaatgaattcattgatttttttaaagggacattctctggcacggatgttggggagactcttaatagtggtcagcttattcaggatagaatcactatagtggatcaggtggagcttgttaagtaccctattcatgatgaaatccgtagaactctcttttccatgggtaataataaagccccatgtcttgatggaatgtcagttctcttctttaagtactattaagggtctgtgggtgaagacttttgtgatgtggtttctgacttcttttggattggcataatgcacaagggtgtcaatgctatgaatatagtccttatccccaaagtccagaatccaaaaaaaaaaaataccaaccattataggcccatttctctatgcattgtgatgtacaaggtcattttcaaaatcattgcaaatagaataaaacctattttaccttctctcatctgtcctacttaagctgcttttgtgttgagaaggaatattcaagataacaatgtgattgtgcaagagattatccactcttttaacaggaaaaaaggcaaaaaaaggtttttttgcgataaaaattgaccttatgaaagctgatgatagactgagttggaggttattgaccatgtgcgttcttattatgggtttcctcagaaattccataactgggtatcccagtgcctttccaccaccacccttaatctctaccttaatggtgggtcgtttggcaagattaggccctctggcgaattacgccagggtgactctttgtccccttacctctttatttgggctgctgaaattttgtttagaatttaagaggatgccctctgcaaggacacaattaagggtataagactcagtttggggctcgttctctcccatatcgtctttacagatgacctaattcaggttggtagagccaacatgaatgaagttaaaggctactggcattgttttgagagtttttgttcttgatctgtcaagcaagttaataagctcaaaacctcagtattctttagtaaaaatacttccaatggaatgaaaagaaggatcatgacaactctggggattgaatctttcggagggaatattaagtacttgggagttcccctaaaagcatgcttatttcaatttcatcctggataacctcacttcaaagcttcagggttgcaaagcgaaaatactatctaaggcaggatgtgttacccttataaaatatgtgggtttgtctctacctatgtatgctatgcaaacaaccaagctctcaagttatcttggagccaatattgatggtatggttcgtgagttttggtgggattttgaaaaaggcaaccatagaattcacctaaaagctagtgctatacccgaaatttggtgtaacaccctaactaccataggcgtattacgtgagttttaaacat

SEQ ID NO: 113400 - DNA, 1890 bp, Cannabis sativa
  modified_base (1853)..(1856): a, c, t, g, unknown or other
tagttgctatagggatttttgtgtaaaatttcataaaaaataataataaaaaaaaactgttttaaaatgtaaaaataaaaatacgtacccctgaatataattataatatatatgtgtaaaataacatgtatatatactatatataggtgcatattaccctattctaatctaaactctaattcaacgcgtacaatactataataaattatcctactaccaccaaacttattttaattttgataaaattatcatcatcatccccacattgtcctcatccttgtatttactttgtgttttcttttgaatttgtcattattagttaatccttttctatattaatgttaccatcttaattgattaatatataataattaaggttttctgggtttttcctttctcatgcattttctaatagtcaagcaataattcattatattttaataatgatatgtatacacatataatttataaataaaaacttctgtttcaaaaaaaaaaaaaaataataaaaacataaaaacttcttaaatatcagtacaaaatatctatatatagttaatgtgttcttcacccacagtactaagcataagagaccttcaggttagtgtttaattagtattatgtgtttaaaattataattttcttaactacatattaattgcaaagttttacttcattttttataacatatatattatgatatttttttaagtaatatatagatcttttacattaaatcacaacttttgttattaaaactgagattatatatatacatatatatttatagctgcagtgctcgaagtattcaaacctttgtgggtatatataaattaagtttataattaagtgatcaagatgatgatgagtactagtcaaggctatggaattgattataaggatacccttcccttgaggttagtcatgcatgatcaaaatctcaacaatattatataaatatatatatattaattatagtttatagattatttatgatttttgtctctgaattatgacctatatattattgtatcctttgaaatattcagttaaaaatagtactctccgaactatttacagtgttgtaaattatttattctgtcaggttctatcacatgtggcaaacaaaatgattatatgtgactgtttaataacaattgtctaaacaatcacatcatcattctgttaactatgggtgaaaatttaacaaaaaaattactttacaatactgtgaataattcggtaactatttgtaacaagttgaaaaaattatgcatatgtcagagaaaaaaaaaaaaaaactaaatagcataatttatgtctaataattctttcataatatatgtctttaatatttaatatttctgtgctttttagggttcaaggagaagatttttcagtaccactcagtaatgatagtactaaagatgatgatgatgatgtattaataattccatgggtaacaacacacagagtttggaataagatattcttggcttcatgtgtaattggagtcataatcgatccattgttcctttacattccaattgtggatgatgatgaaaagtgtcttcatatagaccaaaatatgaagaacatatcacttgttttgcgaataattaccgatttttcatatattttacatgttatttttcggcttagaagtgccctaaaatactcaaagacacatcaagtatccattctcatagggtttccatggtcttatcttctaattaatgttttgtccattcttcctattcctcaggtatataaatatatctaaactttatcgttttttttttggattatttcatatatatatatatatatatataaaaattacaaaaaaaaannnnaaaaaaaaaattttaaatttttttattttgaaat

SEQ ID NO: 113401 - DNA, 1569 bp, Cannabis sativa
agtgcacggcatatatgccgtgcattgtagattaaactacaaaatgctgcaacaaatgcagcctccttggaagatatatacacggcatacaagctttttgcagtctccttgtagctgctcttactgtccactgataagatttgtcatgactatctttagcatagagcagcagggtataaatcacctagattggtggcatggaaagaggtctataaaccataaaaaataaggtggtttgggattttaaaatttagaaaaatggaacacagcagttgttgaaaaatatattttatctttggcccaaaaacaagataacctatgggtgaagtagattcatgaagtatatttcaaaggctcaaagtggtaggagtacaaactccaccaagatagtagttggtactggtcacaagtaataaaagtgagagatcaaacgttgaactattacacttgggatcagattgagacaatggaatttaccatctcagaattttgtgacaacatgtttccaaaggtatacaggcaggtatggtttgcaaaccatgtttgggggaggtatgttattcctaaacatcattttttggcatggctagttgcttggaacaggttaaaaactggggatacacttcttaaacagggtatccaagggcccatcttatgcaacgtattattagttttatggtgcctactaaatcagttactaaccgaaataataagtttctgattatcaccatatcacatcctaaggatcaccatctatatatattatggacatatctatggtaggtatatttttgttttgtctctatagtggagaaatttttaaaaccataaataatagatctaatggttataaattgacaagtgtataataatagccaatatttagagtctagtagattatttgtaaatttattttttaataatattttaaaattaaataataatttattaaatcaattaattaatatatttttgactcctcaattaattaatacattgtttgtttagtatctttctctctctccctcctcttctcacataaatgaaatcgtttcttccacctctcccatttcctttctttctgaaaatactcctatatgagaataagaacacaaattaaaaataaatcttaaagttttaaaagatagggaagacgtcttttattttttaatagaaaaaatagaactattaaaaaatagaagaagaagataatgatgtatttttttctcttcattatttgtatttttcgactaaaaattttaataaagacatgagatctttagttatgttttaagtccaaaattatattttaactcttccttcataaaacttctaatggaaatatattttttcttaaataaagaacttttttttaattattgactttacaataaaaaaaaaatgtttacacatataagatgtatataacgtatataacggccggcaacaaagttcagatctcttatcttgctctcattgttttcttaaaagaataccattaccctaacatttactgtacagagtacaattcatactcaaattcagataaaatttacaatcaaaatccaa

SEQ ID NO: 113402 - DNA, 3122 bp, Cannabis sativa
tttgcggtgtggtgcggtgcgggcggtttgagcgatttgagcggtttgataaacacccctaataggaactaccggagcaatccatgccgtaaaaataagaaaaaaaaaaaattaaaaaatattatataagtgatttcccatataaatataaacaataaagataattaataatatatacagtctgattatatataagataatcatgtatattattggtccaagattaatagtctctttaattctgtaattcatgacttaagatcatcatcatcatcatgatcattttgatgttctaccaatggaagtaagaagtcgaagagatcagtggctagaacagctgaagcgacgtcgtgtttatgaagaatcctcctcttggattgtagtgtaagtgtccaagatttatgagtgagttgttggatgaaaagctcacaagccttggcaaacacaattggagcttctcctgatatcattttcacttcttcatcactaccactaccactactactcttcataatcttcttaatccttgctaatggcaaacaatgactcccattccctccaaatcttattcctgaatatgttcccgcttgcctcataatattattattattatgtattagtacctttacctttactttttttttttttgtttttaatttcttaattgatgatcatatatatatttttaagattttgtgtgtatatatatgtgaaaatatgtgctatagtgttatgtatggaaaatgtgggccggccagagcctgctaattaattagccggcgatatatgacaattggtatatactaaaaatgtgcttttctcatgtactagaactacctataatgtagctatatacagagtagtttgactaagaaattttttatacatatattattgagatacagcaacacattgaaattttgtgctttttatattacatatatacgtcatattcatatgtaatagtcttcacaaattatcgtgtgcatatagattaattgatcgttggtgacaaagatagcttgtcccaaattggtatggctgcccaatttatttattaacaaaatattattaaaagaaaatttaactaatgtagtttattagataccgatcttaattataataatatgttatagaagcttttgaatttgtatgtagaaaaatggttggttgagatttggtctataagcgtattcatatttttacacgactctctttctgtcacatatatttaattggtttgttgtgttggaacagtcaatgacagttagtacggttagaattggttagctaaaggttgttgcttttggttgatagttagccttgtcctactggttctaactgaatgcagttagcttccttcttgttttgtatctgtatgtaaactctgctctttgtatttgttgagtaatgagaataaaggattgcacattcagtctttccacttctttaatctctttcaatacctttctatttatttccttatctgtatctattataaatggctaagagttttaacatatatcagggtttccaccaccgttaatggcaaacatggccaccacatctagctcaggcgaatgtccgacaaacgagattgacaatcgccctcctggttttcctccaactgcgtgaataatagaaagaatctgactaacacaatccaatctcattcaatcacttaatgatcataattttcttttgtggaaacaacaagtacactagaggctatttgagggaattgtctccaaggcttcatggaaagtctgcctcctcaatttctttccaatgcacagctagaaatttaaatcttgattttcttcactagtatcaacaagatttgactcctcgtttcttggcttttttcttccaagaatgagagtctccacactgatgcttggctatgaaacctctcgccagatctggcctacactcaaacactactttactttcctagtcttggccatgatttgcagtttcgtaccaaatctagaacctcaagaaagaaaaattgagcctcaatgagtatcttctcaagtttaaatagggttaaatagactgtggagttacttgattctgttggtgaagctcttagtgttcgtgatcatggtggagcgatcttcaagggccttccaagtgagtatgacacttttgtcatctcaactaataatagattaggaaactattatgttgctgagagaggggctcttcgtcttgccactgagttccatattgagaaaacagaataggaagtggatctcagcgcagtgttaggaaactatatcaaagctagatcatttttacctgaagcaaatctattgaataatagtgttggaatagaccattagttaattctgttatcagttagttgtatctgttagtttgtttgtattcagttagttgcaactgatatgtatataaaccagtgtactactctcctttaatcaatgagatcttttcattcattctttctctgtctttctttctctcatttcttctttcttactttcatggttactttgttttctttatgaacttgtgttcgtggctagaagatttaacatggtatcagagtgggagtttcctcctctggttgcaaacatggcaacgattggaaacaactcagctaacaatcaagcagatccagctgtccatggagctcaaccaaattccagatcaagaaccaaccaaaattctcaagatccagtgtttttcaatcacaacatttcgattcatctaaatgatcataactttcttctttggaagcaacaagttcttgctgctatcaaggggaatcgattgctcagatatatcaaagaccctcctccagctgaattcctgaccaatgaagatcgtgctgctaacagaatcaatactgcatatgtcgattgggaaattcaagatcaactccttatttcgtggttactatcgtccatgactgaaagtcttttaacaagaatggttggctgcaacacctcacatcagatctggacaacactggaaaaacacttcacattacaagtctcctccaaaattctggaattttgaactaagttgcagaacttaaagaaaggctcattatccctcaatgattatcttctcaaagtgaaacaaacagtgga

SEQ ID NO: 113403 - DNA, 2149 bp, Cannabis sativa
  modified_base (2123)..(2123): a, c, t, g, unknown or other
caaaaatcattattttccatatttatactcaagccacaagtatgaagccttctaggatgtttacagtttctctcgaaaatgatttacttcctaaactagatgctcttaatgtccttgattcgaatgtgtttcactgatagcaaggcccaaaataaaagcccaatgctaattgacccaaatatcttgcaccaaaaagtaaaagagtggatggaccaagccactccttcaatccacgatacaagcaaggaacaagtttcttcaaccaaaggaaacaagaagaaggagaagatggaagagaaccacgcagctacagtgcgtggagcaaggatgcgcgtgaaaccaaaatagctcaaagacttcgtgatggttgtgcgtcattgaggagggaaaattttagtgtcacctaaattctgttagcaagggaattattttttctttcttgttagtttaatataaatactcttttgtaattggaaaaggtttggctattgaatgaattagcaagaatttgcttgggagacttgtcctatctcaaagagggtagtttattctatcgattggtgctttcatcgatttcttattcttctcaggatggagaacgaggacattgtagcattgcttcaagctatggagctcaagtgggatgagtgagctcagatgactgagtttagagcagaaatgagggcagccattgaagagaagctcgacgaaagattaccgtgcacttcatctcgaccatctccggagttggagggggagaacaacgcaactcgggagcaaactcgggtgacaggcagacactcagatacaggggatgctagagaagtgaattcgattctgaaaaatttgagggtgaaagtagctcaattcaatgggaccacgtggatgattggatatataagatcaataaattttttgatctataccacattgattcccctgtgagattgatggtggtactgtttcatctaacaggtgtaccatccaaatggtttcaatggatggagaagagtggagcctttgttgattgggaggctttcattcaagctctacaacttcgatttggagcatcggactatgatgatcccttgggtcgaatctctaaactcatttagatgggtcgcgttgctcagttacgcattgagtttgaagatttgatgactcgagtaacaggtatcttagagcatttattcatgaatttttttatttggggtctgaagctagaattttgaagggagttactgctagctaaacttgttaatttagctgatgttatggctaaagatcaactgttcgaagaccgtaatgatgatttgatgggacgttcgaagggggagagtaatcgatcagggtggtctcatcgcacaataatttatcctcaaccttcagttcaatccgatatcaacccttcttcatttgggtcaacttcaacaaataccaataaactaaaatcaattaagtcaggttctaatgcactgcctgttaagaaattaactcctgcagaaatcagggagaagcgtgagaagggcctttgttttacttgtgaggaaaaatacagcctcagatgtaaatgcaagaatagcgtattaattctttgtggcaccgaggaggaggaagaaggggagcgaagtctagcaggagaatcagactcaagccacatggatgagactttagtggatgaagttagcctgaactccttgtcgaattcagcgaatcctcgaatattccatatatgggccaaccatggtgaggaaaccttagaagttttgatagatactgaaagtaataacaactttatacaggaatccttagccagcaaagtaggccttgctgctgaagatatgaaatgcttcaaggtttacatgggaaatggtaactctctgttgtgttctaaaatctgtcatggagtggaattattactccaaggtcatcagttctatgttgatctatatgtcttaccaatatggggattaaatgtggagttgggaatgcagtggctacaaactttagggccatgtatccatgaccataaggcactcacgatggaatttagttggattgggaagacagttaagttggcgggttccactgattctgcgacactattgggttttatgccctanataaaactctttacaatctgattagt

SEQ ID NO: 113404 - DNA, 1324 bp, Cannabis sativa
acataaactgccaaatacccttttggaacatcttttgcactagaaaaaggcctctgaattagttgcttggcatgaactacaccgggaaaacgaaaacccataattgttggtctctaaaggtagaagaaggaagaaatttgtaatcaaagagagttctacaaattttgcaaaagaaagctctattacttgagaatgtgaggaattgagtggagaatgtgaggattttatgttagtatatataatgttgaaaaatgttgtgtggaaatgaatggtgaagtttgaagagtcaattaatgagcaatcacatggttgtgtctttctactcctactcatcattcttgattcaaagttgacaaccaacttattggacagccacaaagataaactttggtagttgaaggattcattaggtgatcaaatatgttccaaaatggtttatctttgctgcatatattttgtatcaagtggggtacccttgtagtttgttcacctggtcatgtctatacatatgtcacagttacaataatcaagtattcatatgtgagtcacaagacaaatccatgtgaagactcaaatacttgtgtttttttgaaaatacctaaccaacccaattcatctatatatatacatgcacattaccacaaaactcaatcttcaagttaccacattctctactctaataatgaaatcatgtgtgatttgaggtcactttctaatgttgaagaagcaactttgaagactacaaacattccaataggctactttgctctctaatctatgttggagaagatcaaaagaatagttatgtgtgtacctttgtctcaagagtatggaagatcagaagaagaagaagaagaatgacatattcattgatttgtctatactcataatttggcattcaaatgagaaataagattaagatggatcaatgtgtttgtgttatttaatttgcaagggaaagaagagatctaagagaaatactaaaaaaacccaattacgtttttctaaaatcaatgttttggtaggatatgatttggtatatatagatttatttttatccaaatgaatagtgagaactagagataagtagaatagtccttaaacagtcacatggtattatcattctacataatttgcttgctcttattggttgaactaaagagaagggtgatcaagatgagctgtctttttaagaaagaccggtttttcattgttacaaatcttatagcacaatattgttgtttgttattgttagaaataattggggtcacaactgtatatataaaatgtgtgttgagtcatcaaataaataagtcaaatttat

SEQ ID NO: 113405 - DNA, 5863 bp, Cannabis sativa
taatttccaacatatatatatataaatttcaattacttttatataattattcaacaatagttacacacaacatatagtaaaataattataattattaatttgaatatttattattatttaaattgatttataattaataaataaatatttttattattatgcttatcaaattatcgagttttcatatgtgtcatactttcgggctactttatttgtgcttacatattgtgtcttcaggcttgtcttgtcgtgtggtgcttaaccccatagtttacgccctttgtcatgctaatttacaacatcgtgtcatatcatgtacaactttatatttttttgtgtcagattgtgctcatgcctcttgtagggctgaacaacatcgtcccatgattaatctctttgaatgcatttctcagattgtgctcatgctaatttacaacatcgtgtcatatcatgtacaacatcgtcccatgattaatctctttgaatgcatttcttttatgttcacatgtatttattttatgtaaataattaatttacaattgtattttttttaggttttggtatgtaaatattttttattttgtttttatggatatgtgaaaatggtatagtggatttttgtttctcaagtattttatggaaacggtatcttagatttgggctcaagttgtgaatactgactgtcatgaaacattcgagttcagcccaataacacctgaaaaatgaccacgcccaactcgactatgctcgacccgaaacccgacatacctgaacacccaaaaaccaagtttggttgtacattttcaagacccgaaatctgaaaacccaaacctgaacacctaaaaacccaaaaactcgactcgtgtgcagccctagcctcttcgtatcgtgtcaattccgtgccatgtggaaatcccaactcgcattacaacttttgttgtggaacatttttatccgttttgatatttatgagttttttcagtgaattttatttttttcatgatttatgttgtaattatttatgattatccgtaaatttgtaaaaataattaaataatttgtaatgttgtaaataaagtttaaatattttattaagtatgtgaatgtttttttcttctaaatgccaaaagaaatataagatgtatcataacaatccttttcgggaatgtgctgcaaacttacccaaatttatactactcattttcataaaataaaaacacctacaaaataaaatagggaaaaaaagtatggaccaccccacatgctattcttttgaatgcatgatagtgggcctcaagtaacattgaatatgacctcacaccacaaacaaaaaatatttattataacaattaataaattgatttcttattaaattactattttatgaactttaaacttcattaaaatagacaataataaatatttttgattaataatcccaagacttttgcacatttgttaccaatcacatcctcccaaatcattatctatggtctttttttttttgaactcttttatctattgtctctaaacgtgtaagatcgtgcatgtctttcatttttgtccccttttttcttcattatattacattgatttaattaattaatttccttctcatttaaattaaaattaagattctttcaaaaaaaataaattaaaattaagaaaatggtttgagcaccgacggcctatcttgtcatttattttgtacattatctttttttttttaatttattttttattttaagaatattttgtgcattttattaaaaactaatattgtgataataaattagctaactatgcccagcaggcagcaaatcacttctttgcattaacattcatgcgagtaaacccaaataaattgagttatcatatgatatttgcacacaacatattatatagtatatacattaatggagatgatttttcaatgaagagaaaatgacagaatgtattaatttttagaaaaaaagaaaaactgtgacaaaatatactaatatggtataaagtcgtgttttattttgtgaatagaagagctagcttatgctaagagtaggcacatgcctcccaaatttttttgcaagataatttgttgtcaatttttttttttcatgtatgtccaaatatagtaaaatcccctcactttaaaagcttacactaaagttatagaaaattgatgattacgtagtttaaataattctattatccacaaagtccaaaattttcagtaaaatcattcattcacagccattgatgaagaaaacattgaaactgaaaacccaaaatcaaaatctaaaatcacagtttctgagcctatagccttatagcttcattataccttttttatatttattttcaccataagtagaatatgtgatatattttggcatagtaacaactctttaaaaaaaaaaattaaaacaaagcaataaatagataatgaaaattagacttcacgattattacaaagaatagtaacaattctttaaaattagtctatactagatttgtcttttgaaataatatatattaaccagttgagttaattcaacaaaaactcaacatctttccctttatagtaaaccttagttagttttaactgatttgattcttctgtaacaagttacaatatagttgtaataaccatataattagattatgaattattaaaagaaattaatattaattattgatatttaatgattatacatgagtttatatttattgtaggtctcatcttcagaattaggaattagagttataatttttcaattctgaaaattttattaaactataagtgtattatttatgttatatgtaaaatttatagtttttataatttttgctcggtaacgatggaaaatgcagcggatagccaatttagtcacatgagttagattagaacatttcatttatcgaggtactcataaattgatatttagaatagcgggattaggcagggtatggttttggaccattttacccctaagccattttattagtttagctttaatcaagggtaaaattggaatttcatattttggtgataggtgttccaatccttttagtggtgggagctggccattagctatagtagtggatttaatttaagactatcttgatttatctaagattaatcaaaaacaaagaagaaagacaaaagtagaaattcatgttcttgctctctctctcggctcaaccaaaaccagaggagaaccagttgattcttcttacttttctaagatttcaactaggaatttggtgtgactcaagttgaggtaaagccctaatactaccctttttcattgatttttggtagtttcactttggtttaaaaatgcaaatattgtgtagaagttttgtgtgaaccctaggagttagaggatattttctgatgttgaattaagttgttttaggtttattgagttatatttaagggctaattatgttgttgagcaagtttgagttcaagaacttcaacttggctcaactatggtggattgtgtatttttgtgttattttcgatgctgtcacttggaaatgattcatatggatgattacagatattatggagagttttgagttgttttggaggttctttgtttttctacagtgaaaaacggcataccgtttctgcagaaacggtctaccgtttttactcggaaagacccagaaaaatggcctaccgtttttacagaaaaggcctgccattttttaggcaatttctctgtttagttgtttttctcatgtttcctcaatatttagggctttgccatgctatttatcgatagggaaacttttaattttgagtttagatccccaaaaaggttttagaaggttgtttaccgttttatgtgattgtgacatagggcctccgttcagtgcaagattttctatttaggtcgaccgacacacttgaattcggaaacaagataagactagcatggaatatatatgtatatgtgtatgtatgttatatgcatgttgatatatgattcatatactaccaacactagtgcagtagcggtactgcgtgcatgtggtagaacctatgaagtataagagtacaatccagtgttaccaacactagtacagttaggtacgtggtgcatgtggtacaacacttagtgatatcggggtacggttcaaaccctaccaacactagtacagtagcggtacgtagtgcatgtggtacagaggtcgtacctttgttaagaacattcttaatcatctgttaagtcttgtggatagatgtatgagcgcctaaatacaagtcgataatattattgtatgttatatgcttttttactgagtctatcgactcacagttattgcttgcatgtataggtaaaggaaagactaagactgagcagcaatgagtccagagcttagagatggttgtattatgtccggacgaacgacctggagagttcagtctcaggacaacttgaattttattttgtagttgttgtgcgacatgtttataaagtttattttgattatataaataagtttaaaaacgggatcccgacccttttatttaagcttatacatatttatgattacaaaagtttaatattattcaaaagtttaaatttgtcacaatttttgataaaactctttgattagcaaaggtgtgcattgtaattaaaaatcattatagcttgtctaatcattagggtgctacaatagtcatactactacacatttttctcataaagagaggtgtcaagtcccccagtgtcaaaataaaataacccaccaagcctaaatatttcgatccatgaatatcccctaataaataaaatgcctgagtaaaactcaacgattccatttaaaagaataattgaaggcatccgtcttttcagggcacaagagcaagctcaaaactaggaaattagaagagttgagctctgatgacatcatcaatctgcatgagcaagagtagaccctactaatgtcatctatgtgagtatctcttatatggattgagcaagagattcattacgagcatcaagtagatattttccaaccaccgtatatataaatagggaaagaagcataagaaaaagggttaattcccttacttaataatccttatttaattctttctacattcctaactaaaattcatgttacaatttgagcaagacatcccccgaatcctttgaagaatccaatcggaagaagagaggttaaccaagagaaataatgagagagttgttgagttactatttttattaacttgacctctaaatttgtagtatcaacaattggcgcaaaaacaattggaggtaagtcctaatttacaccaaataattgtacaaatttactagatacaaaattgcaagatgcaaacgcaaaagcatcatgccaccaaaattgactaacaatgggaccaatatggcatagacaatgacacaaatataaaagttaatggttgaggtacacgccatgtttaagacattgactgtgaagcatgaaaaaacgaacgctagcctgtctatagaaagagaacaaaagactacttgtgaaccaggcaagacgctcactcaacccaatcctctagagcctccatcgactaccaatgggactgaaaatgcaaatgcattgaacaccaatcctcaagatccttctgccagggggaaggataccgtgttaacatcaaatctcccaaacaactttgtttcttcaacaactgatgcattgacatcatggcgctaaatatatctaatcgaatgttaataaggtttttaccaggcttctaatggcaccaatataggaaccctttgttggcacttgttgggcctcgctcttccaccttgttgggccactacctcaccttgactctcacattagt

SEQ ID NO: 113406 - DNA, 2929 bp, Cannabis sativa
aataacatacttgttagtatatctaagatcctggtaaaataattccaacacgttcaacccgacccaaaacccgaccataaaattattttccaacgtccaaaattttatgaaaccaattttaaaatgatctccatgaataaattaagagatccatattgatttcaagcatcgaaaatatgcaaaattatactttgatttcacaaaaagttttcgggtccaaaaaacgtgttcttaagaaaatttccaaattttaatatttattcaaatcatattcatgaaaaaaatcattataaaccatgatgtgaatatgataatgcataaatgattcaaaataaacactaaaaatgaaaatgaattttttttaatcacggatggaaaacttacaaattcatgtatatatataaagtcatatatactatgattttattattgaaaaaatatatgaaacagatagaataaaatattctaaacaataacaattaatgaaataatagatttattcaaaaatatataaacatatataaaaggaatatatatatcgtatatataaatatatatatatatattatatatgaagataaacataaacatgaatatatatatgtatacataaaaataaattgagtatgactgtatatatatcatcgagattatataatataaatatgtatatataatttatattataaatgaagaatcctgtacgtatatatatgaataaaaaaaactcaaaataaatcaaggcagagatatttaatccgctctgatactaactattagacatttatgtatatgaagatgaagcatatataattatagtatgaaatgcggatttaatcaaacatatatgcattatgaataaagatggaaatacctccagtcattaattctttgagcttcaatcccacacaagttttgatctgcaaaggaaaccaattaatgtggataatcaggcttctaagctctctctactctctttagatggatttactgtgtttcacagactgagtagtaagcttggggaccgagaccctatatttatataagtgagatcttccatcaaagtctctaccacattaaatatcagaatatttgacaattaattcaagaaattaaatcgaaaaatcaaatatttgattaattataatctgaccatagataaaatatcaatcaattaattgtgtcaagattcaatgaatattaaatattcatttatgttaaattaattctttgattctattcttaaaatagaaattattgattttaaatcgttgggtaaccctattaataaactaggaattttaaataattagggtcggtccaaaaattttggaggccttgtacaaaagattaaaaattgggctttttgtaaaaaaaaaaaaaaaattatgtacattaagacctccattgctagttttttatttattttttttttaaaagatatgtttctaaacttttaaatataaatattttcatgcatttataataataataaagaaaaacttttcttataaaaaatggacctttaaaaatggagggccttgtgcaatgactcaagctgctcaaagctcgggccgaccctgactataatacaccgttgcctatactaaacgagtgtttaaaactgatgcctattctccattgtatgcatcggtttaaaatacacttaattttattggtgacgatcctcgaaaaaaaagtattttaaagattgatagtaatttttgtagtagtgttaatttgaaaatatgagaaatgcaatgggccataaccaggccaaagctttctcagcaactagagacaaatccataaataaatgaggtgtcattgatgaagcatcatgttcagggccgtctcaagcttcagcaaagctttaggcaaagcttgaaccatgaccttggatgaaaattaaattaaacatttcaacaaaataaaataatatcaagatttattaagttttgttttcagttaaaagatacattaattaattatattcttatttttaaaatttttattttaatactaattttacattactctttacatattttattaataattatcacctcatgactaatctgttttctttatgaattaatttcaattcatttataagaatctttcacaagaaaaaaaattaaccaacagtcataaaacatgatcacaataaaataaatatagttataaagaaagattatgatattatttagaggtgatttatatataaaatttctcaataaaaaataattaattatcaattgatagttcaaaattttttaaattaattaaagtgtaatgttgacatttagtaataaatattaatgtttaaatttattaaatttgatatatatcacacatattattaaaaaaaaccaatgtatagtaatagtacccttaaaatgtatgctttaaattttgtgatgctttaagtaattacttaaattgtcttatgatgaagccaactcgatcatgttgggttctcaagcttctcaacttgccgaaagaaggaccacccaaaagtttttgcgacatatatttatgactatatacgtacaagagggtatggatatgagtgaacattcattagtatatattaatcttatcaatattattattagatactagtagtaccgagtacttttaataggtagtatttcacgattagttagcgatacttcctaaaaattattttctcaaattacatgagaacccatatttaattacacttataacagaatgacattgaaaaaaatactaagagcatctccaaagacacactaaatttagtgttgcactatcactaaatttagcgtcaaaaatatttttactccaaccataacaccaaaaattacactaaaaaaatatttcttattattatatttttttaaataaaaaaaattaataatatattaattaacaaaaattacaa

SEQ ID NO: 113407 - DNA, 2741 bp, Cannabis sativa
tacaaaccgtaaagttcaggtggtttagccgccaatatcccaaaataaaaatagagggagtggagagtacgtaccaaagatgtagcatcaactttgagctcggtcaaaaagatgaaattcggggagcgtgaccgaatcagggacttcaactcatgaactgtagaggtctgccccaaccctctacagttctaagagatgcctctcatggctcctgtggaggagtagtgatctcctccataggggtatgagagtgggctgacccaaaagatccagagtcctcaaccacgaatgtgccttccattggcctagatgagatcacattttttcctttagtactccactcatccaatccaatgaagtcgctattggataaagagatatcatctgagggcttttccactacaactttagtagcattagctctgacatccgtatcccaggggaagtcacgaataacctcgcgatgttggtggagaagcttccaagggcatgaacaaagggatgtagaggcctcattaacctttctcttcttgaaaggagtggttcttacattagtcttcgaggtaggtagaacccctatgtcaccgccaatggctttaatctcatataagtccaagctaccaaattatttaagctcttgtaaaagagtgtcttgagcttgaaagaaattagacaaagctaactcttcatcgtgatggaagttaacctcttgaccacatatagagctctcattggaaatattaattgcgggcccttcaatcatgcgaatcttattctggttgcaaccagcaaggcccacctctccctcagacggcaaattgagagcgtaaggacccacccccttatcgttaccccttgagcctgtgtgttgcttaaggttgggaatggtcccacgagctgaagttactgcttcctttgccccatttgatccaatgtcaatgttcggcccacaagagaaatcaatagccttgttaatattattattaattgtaaccggccttatagaagaaagagtcggcccaatcttctttctaataagcccaaaactatctcccaactccttttccaaagtcaacggatggtcaacctttttaaaattgatacaaggaaatgtatcaggcgcctttcgtgtatcttcttccccaacagaaaacttattacccagtaaggaaacattaggcgtgcgattggcagtgagccgtttgggaacccacgcagcctgtctagccgtccttcccaccaccaatttgcgactggtcacattcaaaggctaccttgagccgcaagtcttcgaaatctatttagtcgagccagtcgcaccgggttccatgtccgctggagaagatgaaatccgattcaaagccagcccagaccgaacccgagacatcggggatggattgaaagtattggcactcgagaacacatccaggtaagatgacgcagtagaaagccacgaccaaacatagggaaaggaatcccttttttcgttttccactgtaataggggatgatagggagaatcctcttctttgatgccacaatcgtccacaattatagtaaaagatgccaagtctctcatatttgaactgtagccaacgatggttacccgattccaactcaaaataacaaccggatgaaagaggtcgattaaaatctaactcgattaagatcctgagaaacctactccacaaggctggttttccttcatccaacgcaacagtggtcaccttgccagcctttccccccaggatattgccattagcgatagaaaagtagtccctagggaggttgtggatttgtaactagattctcatagtggtgaagttgacagagagggacttcttaggagtccaagcctgaagtatcatggagtagccgcggacacaccatggtccgttatccagggccaagaacaatcctcagcacgagcgaaaccaaactcaaaacagtttgggttgttagtgttctcattcaaggaaacaactgtcactttgaactcccaagacttgttaacaaaatccatggtagtagcttcattaactaccataggggcaacaactttcccaaggaggcaaaaggttgataaagccttttgagaagaaacacaatgaattagcttgacaaaggcttccaagcaagtaaaacacttgccattaatggaggagttggtggcattaactattgccataacaaacagcaaaagacaagccaacaaagcaccaaaaccaaacaaaccaaacaaccccacaagtactactaccaaccccacagaccacacatacacaccctcaaagcagacacacagaaaagaataaatacacccaaataaataggaaacaaatggagaacaagaaagaaagaaagagaaatagaaagagaggaaacaaagacccgagtcaaaaccaaaagagaaacaagaaacgagaaaaaaagacactacactcacaaatccacggcagagatgcacaagaccagaactacaaagggagaaatagtcacactagcacagagggaagaaaagaacaaaggggaggagaagacacaagagagactgatagatgaccaacctctattatgtgaacatcaacaaataataactcaaagacaagagaatgatattttgatgcatttaccttttcttatacatacatataaagaaacttctatattaatcaagctgttgcttaaattatgatgctacgcaagtgcacgcaatcaagtagtatactcacgcaagtgagg

SEQ ID NO: 113408 - DNA, 1612 bp, Cannabis sativa
  modified_base (739)..(744): a, c, t, g, unknown or other
  modified_base (808)..(825): a, c, t, g, unknown or other
  modified_base (915)..(927): a, c, t, g, unknown or other
tagttttagtcacaacaagtattgtgactaaaaatacatttagtcacaataatttataaattttgtgaataatacctttagttattgactttttagtcacaacaaaagaataataatttataattagttataacttttgtacttttaattataaattttgttgtaactactaaaaataaaaattttataatacgacttatacagacaattaaatttttagtttcttcaaacacataatataattcatgtatatatgataatgattgcaaattattagtacttaacgtttattatcaatgtgaatctcaatttataaatttggcaattttattattcatttttttgagttagagctagtccaagagttccataaataagaaacttgagcaattaggttgaagaaaaaaaataataaatatatgggaaaattttaccatagggatattacttttgtctccacgtgcttatatttttagtacttagagaaattataatgtttatatttttatatataattttgtatattatagtttgaaataaaaataaaaataatttatagtattaaaaacaagattcagccattcaactgcactcctacaaaaaaaaaaaattgtaagtacaattgaatgtttaaattttgtttttaatattgtaaattatttagaatttttcaaaaaaataaaatacctactataattataaagttaattagtaattttttcccccgaattttgacatnnnnnnaatcgtgccccctgaacttttttagccgttaaaaattctccctgaaatattgagattgttaaannnnnnnnnnnnnnnnnnattttagtaaaaaattctaacatgaatgaaagttcaatgggcatgattttatacatatcaaagtttgagaggcatgatttggtagatatnnnnnnnnnnnnngcatggtttagtacataaacaatttctgaaacagtaaaattgaatgagattagaaaaaaaaaatctttaatttaacaatctcaatagttcggggagaatttttaacggccaaaaaaatttaggggccatgatttagtatgtcaaagttcggagggaaaaattactaattagcctaattataaaagtactgtcttataaaaaaaaattgaattataatttcttcaaatatcataaacataaatgtctctacagataggatgaaaaaaagtaatatacttatactatagtccatttctaaatatatatatataaataatttgatgtaatcttaaccctaatgtctatagatatatatataaatttaaattaattaggtttgtttagcttaactatgaactacctaaatatatagacgatctcacaacaattgcaactgatgacatgtaataagatttattattctattatctatatgcctttgtcgatgaaaaaagagatatatcatgatgactaagaacacacaacaacatttttatatatgtaattcatatactttgttgatctttacttaaattatatattttcatctaattatagggaagttctgatgtagggccggcccattcttcctcatgacatgaggaacttatttaaaccaataaaaagtaaaggaaataaaatgcac

SEQ ID NO: 113409 - DNA, 4543 bp, Cannabis sativa
tcattgtcgttggctaaaagcgaagtcaacaatagatttaccaaaaaccattctcaaattaaatgatgaaaggattagaaatcatcttattaaaaccaatcaagatgaaaattccagtctctctagacgatttttgcaagaaatagctgagggtaaacaccattttttgcgagaagctacttggcctaaaccctaaaatttaactaatattcctttagcgagacctttgtctttacctctagtcactgttgctttttcaccaggtgccttagattttgagatcatggcctcaaaagctccaaaatccaagacccctcaagtccccaccgctaccttcgaggcagagctcattgagtctaaagttagatacgtaggagcttatgttggagaggtactaaagtcatgtggcatcaagtatgggcaagaatgtcgagttaggtttgttgcgccaggagaatccagtcgctttcctcttgaacgtgtaaatcaagaggaaggttgtagtacaagcgagccgtctaggataggcgcttggggcctcgaacacataagatttggagcagtacttcctctcaaagactactaaaaggagttatgcaattacttaggcattgctccctttcaactgataccaaattcttacagaatattggccaatttgaaagttttatatcaaatcttgaagtgggagtgtccaaccccactagaaattttgtatttctaatatgtgaaggcatgtcctacaaggaagtgtaggagcaagtggtttctattatctcaagacccacaccaatgatcaaaggatcattgtgagattgcctaataagactgaattcaaggacaaattcttttggacaaccggtctcgcccctatcaacataactgtatttcgtataatatgtaagtttttgccttatctcaaaaacttggttttgagttttcaacttaataattgtaggcatttacttatttcatttatgttatattgacaatagttacaaggaggcccattgcgactccagaatttgaaagaagacataggattcttctcggtctcccctttgggttgcaagcggctgaattcttactacaagaggacaacctgaagacctacaacctcctcagtagcaaccagtctacctaaaacttcaaagtccccaaatactctgactggcaacaagtttcagtccttgtcaacgaagaagacggggattacgtggctcactcccactatttgaggagtataacccctcaggaagctgaagaagatgcctcccaagttaataactttggtctctttggatggtctcctattgtactttgagtcgagcgtactaacttagttaaatttaaggatagccagtacaatttttacatttggaattgtgtagatcgcatagcccatatgtttgatagttggtatcccgagcaccacattcaattaagttgtaaccgttcttacttcgaaattgcccaatagttgtcaccaattttgatagggtgagccatccagattgggacatgtctcccttaaatacctttgaccttttcatgatcactggatctagggaatttatttgttattatagttcttaatcttcatctaatgactatggtaattttcttaagtgggagattatctctacacattttccttgtttattttgaacaagtgttggtgttcttcttttattgtctcacaaatatgaattttgaaaaccttctgtcaagccctccaagctccaagaaaggtaagaagcgagttgttgctttgaaaacttcttcggggacgaaccctgaaccattgaagatatcaagaaagaccacaacaaataagaaatgtgcctcgactcagatggttattgagccagtcgttccccacataacctccccactcccagctgttacgagcaccgatcaacaggttctaaaatctgttcatcaggttaagttctcaggttcacaacctgagttagtgtttttggagccctcctgccccctgccaagtcatgcaggcactacaggctcgcaagcatgctcgcagctcactacttcctactggcgtcattacagatattttcaacaagatgactgggatttgattaataatggtgacttctagagcttatctgagaggagtctaaatctcactctattgattagtctttatcttcatctcatatttaaatttcttactcttcctttgtcatccttttactgaattgtttttaattgcaggaatctctcttttctcacttggctcaccaaagaggccttcaaaaaattgagcaattggaatctgagcttcgcacaaccattgaacaacatgaattagttgcgaggcaatggaataatttcgaacaaaggttactcaattaatgaaggaggctgaggagcagaagaaaagtcataaggctgagctcaaaggtgctaaaaaagaagccagtgatctccgtgaagcccatcagagaatttaggaagatcttgacgaggccaccaaaaagcttaatgaagccagcaaaaaacttgaaagggtcaaggaaaatgccatagctaggataaatttgatcgccaaacgatctatttattgaccttgggtggcaaatccaaatatggacctaagctttttgggggaaggagtcactgcgatgttggccttttgcgagcaaaccaaaaagatgaagcagggattgctaaggatgaagaggccgaggaagaagaagaagaaccaactaagtctccaaccaagtagacttagttatttttattttaatttctgaacaataaccttttggggaagacaatggttgccccttatggcattttttgtaaaaattttattttgttggatggccaacattgcttatttgtataatcttactttttatgcctcttatccttcttttttcgagttatttatgtttgtttattgcattttagttcacaatcaaacatttttctttctcaatttctcttaggatatacttgagttacatgtgttccatcgtcattatcataatttagacgagtaattaataatctaccacgtattttgcgagcatttacaatctgctatgttattcgcgagcattttataatctgctatgtttaaagcaaactttcaattttctaaaaagctcttttgaaaactattttgaatatttttgattgcttatatgaataattaatcctctattcatatttttagcttatgtattatttatcaaggcacgtttgtgtctcgtttacaatctacgctacaaacatgtgagctgttattctcagattacatatagctttctattgttttatgagaaaaagtctcacttacaactgctattttaattcttttttttaaagaaaaggtttttcaattcttgactttgtactgtccaaagacaattttaatcaattatccttctcctttgtgaaaaaatttcaatttttaggttttttgcaatacattatatatttctaggtggaatctagttattatacacatgtatatgcccccagttaattttaaaggaaataagctttgtaattacttgaaaaaattaaactttattcataacattgatcaatcattagagagataaatacaacatttatataataaaattgttggtaataaggccgtaaatgctcgttgttccagtgagtctttattagctagccattaagccaagctaatttataaaccccagttcctacaacaacctcaataatatatggaccttcccagtttgggttgaacactcgtgctatgggatctcgcgtgtttgcaaaacacgtcttaataccaaatctcctaccttaaacaaccttttccggactcttttgttaaagtatctcgttatttggcattggtaagctgcattggttatttgcaattcattgcatttttcttcaagtaggtccaaggacatattcaaaagttcttggttttgctcttgattgtagaattcgcgcctgtgggtcgcaatgttaacttgggtaacattgctttcaagtcgaatgccaatgagaatgcagtgtgtcctgttattattttctctgtagttctatgggcccagagcacttgtggtagttcgtctacccatcttcctttggcaacatataacttcttctaaatagtatcctttaaggttttattaacaacttctacttgtccatttgcctgaggcctcgatactaatgaaaaccttttaatgattttatttctttctatgaactcagtgaatagttcaccatcaaactgagttccattatcagatactattttgattggaatgccaaagctacatatgatgttcttgataacaaaattgagaacctttttgcaagtgatggaaactaaaggtttggcttctatctattttgtgaagaagtcgactgccacaactgcatacttcgctccacctcgccctgtgggtaaggccctaatcagatcaattccccatattacaaatgggtatggcgaggtcatcattctcaatttggttggtggtatgcgaggtatatgtgaaaacctttgacattt

SEQ ID NO: 113410 - DNA, 3823 bp, Cannabis sativa
  modified_base (847)..(863): a, c, t, g, unknown or other
gtatagaaatactctgcatctacggtcagaaaagtattcctatattataggaacaaaattagtttttctattttaaaaaaattctatatatatacacagttgtttctgttagaaaattatacaataaatatatgtagtggttgttctattagattattgggtaaaaactaaaacatggcactgtcactgtgcgtcatttaatttttttaataagtaacaaaggaaattaattaattatgttcatctatgtaatttcagattaagccgtttaaaattttagaaaaatatagattaattaattattgtattattttctaacagaaacaactgtgtatgtatatagaaatgctaacgactaactattatagtatacactgttgtaagaattattctgagtcattaaatttgttagtccatctttttcacacacaacttatatatttgcaaaatatatatatatatatataaatattggccgtataaattaattaatttcctaatgaattaaaggttgacccctatatatacatgcacctataaataattatataataaattagaactgggcggctccttgacaattatttcagttagttgaaataagggtatataagataataataataattgttcattgtcaaaaaaaaaaaaataataataattaaataaattatatatatgactaatttacatacacaaacatacaaactcatatactgcataccattaatgagtttttaaggtaatgaacatatgaatattccattaagttagttggagatctattaagctagctacccccacacaactatatatagcgatcgtttgaaataataataataataannnnnnnnnnnnnnnnnataataataataataataagaggttttttcatttttatactttaattttttttttttttttatattttagggaattctatataaaaatttctatgacaattaataacttaaatcgtaactaaaatccgtacaacaattcacatataaactacagagaaactaccttagaaacctaaactataaatttgaaaaaaaatgttaaaaaataatatttaaaataattttaattataataataattaaaaaaagcttcaaaggagatcatcttgctattgtcatgcttggcaaatggggttataattataaaaaattgagactagtatataataatatatatgtattgttcatgtgtctatatgtacgaatataatatagtatattaggaaaagaaatgaattaaatgtatgtttggcatatatattaagttgttggatggtaagtgaattgaataataaattataaattgggtggttaattgattatacatatatgacacatgacttacgtatacgtagttacgtacacacattaatatctatattatttttggaatacatataaagtgattattaatgaaaaattataataaatggtctcaaaatcatagtattatattaagtaaatgtctttattttaaaacttattgaaaaataatttttttatattctttattatttatattatcttttgtcatcagtacaaaaaatcttacatttaatcacaacaaaacttgtgactaaaagtaaaaaagttgtgactataattataaatcattattcctattgtgactaaatatcttttaatttgtttatcattctaattaattatttaatttattttattattttaggagtaaatagttgaattggttgcaaatcaaccagcgccactaaaaatcaacttgatgagactattgtagatcccaccaagtacccccagacttgcatgttatgacataaatactaggtgggcgatcttgacatctgagaggctttggccatctcccgatattgaaggtggccaaagagcacctgcttctgcaccacagattgttactatggaatagtacgagaccttacagaaaaaaattgaggacgcagagcaggaaactcggtattcgaggtagtagtatgaaacataacaactctacctccagtgattccaagattagtttgagtacctgtcttgggctgtgcctggtttcaacttgtctgctatggatcttcgatccaccattccccactcctcctagtgtagttggatcgtcatcgcatcctcccaagattcaaaacaacaattgcgatgatactacccgtttttagaataatatatattttataattaactttagaatttaatttttttttcaaacatattttaattttttttttatttattattaactttacttattattacatactagttttagtacaaattgaatatttttatgtattagttcgattggaatattttttaattatcaatataaatattgttttttaattttgcttctttaaaatttaattttatatttataattaattttattatattattatatataatgaataattaaaatctaatataaaaatatatataaaaaatcaaatctaaattttataggtgcatttttgcgcctgtaaaacaccccataaaatatccagaataattttgtttaccttttgccagcgcattactgtgtcggcaaaaggtaatacacgccaaaaatatattgatgcaaaaatattttattggcgcaatattgcgccaataaaaccctcacgccaatcactcaaaaagtgcacgacacttttactggcacattaatacgtcgtcaaaagttttgttatgctgactattggcatattaggggctttgtttatttcggtgtacatattttgccaacgtttattctcgtcagtaaagcatgttttaccgacgcaatagtgaattgcactagaaaaacctcctttacgtacttaccaacaatagctgacatcttttccaggcataattatgtgctggcaaaagtatgccaccgcatataatatacttttatcggtgcaaaaatacgacgataaattaaagtaatatttcttgtaatgattgtaccatgttcttgctcaatatcattatagaagatttggtggtgtttcagaattagagtagagttatagattacactgatttttaggactcaaaccaatatatatctttgtgttgattttattgttttgttgctttaatcatttctagttttaatgctctgttcatttctgttttaacgtctggttattgtgtatagtttgttaatcttgtcattattaattgtttattgattaagttttaattgttttaattttgcactataattgtaaaattcccacagttacatattttaatttaaatcatatatacaatttcttaagggaaaatatatatttgatttttatgttttatcaaaatacaagtaccatgcatctgtactcaaattttatcaataaaactttataaatttaactaaattacaaacagcttccatattcataaaatttgtttattaaatttggactccaagataccaatttataatttcaaattacaagttactaaatgagtgcattatatcttcaaaaaaaaaatgtgtgcattattaaaaataagaagtagtaaattaatattttgtagaacacacaatgcaaaataaatatttactcttaaaataaccaaatatttagcatataattaaggtgaggaagagagttacaactttacaatcgatcgaaggaacaaaatactataagatattgtagctaattaattatcattgatctttctagggttttctgtattgaattattaagctctcgaacgtacaataggcaatttgcatgtttggtgtatatatatttatatactagaaaaaattacgtgcgaggcacgtatattaaatttta

SEQ ID NO: 113411 - DNA, 1756 bp, Cannabis sativa
gtagaccaggtactacaattggtgaaatgttagatactcactgcaagtttggaggataacgcttatgattagtttagccaattacctaaggcatcgatatcaacctaggaaacctttgtacaactatttctaatgaatttctaggccacaataacgtataaactgtcatacacaatgttggccaatatcaaacaggaaatcgatgagtctttacaggactatcttaatcattttaatgctgaaataacaaaggtcgagaagggccttgagtcttcataggtttgtatgttgatcacaggtgtcttgccaagaacagacttttggaaggaataacaggtgcgatgacccgaatcgttggtggaattctttgccatggcggaaccacacaagagaatttagaattagctggtagaactggaaagaggaaaggaaacatgcgaatctccagtaccaagatcacattctcaaagcctggaaataaagaattctagtggttaaatccctagaagacgaagtccatctagacgacaaagtccaaaactcgccaagtccccaactaaaaaagaaacattcgcgaagaggaaagggggcccgtgttttgttatttacaccaaactgtctatttcctacaaccatatttatgccatcaaggaacagaaagacattttagaaaaccacacccaatttggggtaatcgtgacaagagggaccccaaaaagttctgcaagtaccacaaagatattggccacacaactttggaatgttagttcctctaggacaaattatggaattaatcagacgagagaagttcggctaatataagaaaaatggagagaatcatcctcgagcaaacgatacaaaccataaggttgatgcgagttgttctagagcctcttgcaatattttaactatcatagcaaggctgcatgacggtggagattctaagaaagtgcaggagcgctatgcaaaagaggccaaagaaaaacccctaaggaatgtaaataatctgagtgaacgacctaaaaagttgttaaaaaagaatgcgacgacatcactttcatggaaagcaatgtgaggtgggtgcaccacccacatgctgatgccttagtggtagccgctaacattgaaggcgacaatgtacaccgagtcctggtcaacaatgggagttctgtaaaccttttgaatttgcaggccttcaagcagatgggattgcatgaaaaatatcttaggccagtcacatcgagcatctacggtttcactagggataaaattgaactaaaagggatgataaagttaccaataactttaggaacgacaccgattactgccaaatcgatggttgactttacagtaattgaccaacactccacatataatacggtaataggttgccctattttgaaggagatgaaaatagttacttcaatctaccatctcaccatgaaattccccacccccccaggtgtgggatcggtgtaaggaatccaggttgattcgagtgaatgctacaatactgcgttaaaaattgtagaaaagaagaagtcagtaaatatcatttacttgcttgaggctcctccccctccacatgaatttttagaattgaagaaatatcgcaagtggagaaaccagatttggaccccagagtccttgactacaccaacactttgtaagtcgcagaagagacaatcaatgtacctatcaattcttttgataattctaaagtattaaaaatttgttctaaactaacttttcaaca

SEQ ID NO: 113412 - DNA, 2224 bp, Cannabis sativa
  modified_base (47)..(66): a, c, t, g, unknown or other
  modified_base (2158)..(2175): a, c, t, g, unknown or other
atcgttttagaaagttcatattcatggtgttaataaacatacttgtnnnnnnnnnnnnnnnnnnnntaaaataatttccaacacattgtacgtagtgggcacgtgtcgtccaaaggtttcatcttaaaaagtagagatctagaataatcttctggaaaaaaaaggtgtatgaggtatgcgcactacgatgtttagacacatgggacaagatttgattctatgttagaaaaaacataactttcgcttggagctgcgggtttgtatcgaaagcagatgtttgcaatccttttgggaatcaacgtccgtgataagacttccgagtacccatttgggtatcgtgtgggcagcctttgagctggggccactctgtgtctgtgagtggtagtatgtcttccgtgtctatgaagctaaagtaaggcaaggtggatctccgcattccgcttggggttaatatgtcctgaatcagtgaagcttctccatgccttgctttagttgtggggttttaattagggagatcacaagataatctctttcttttgtgccacatgtcatttgctcagaaacacagataatatttacccgcaagcttctgagacactttgagttgcgggagcttcctatattcttttggatcttggagatgagttttcgacacgtggtgattacttggaatgtggatgtgtccttttaatgagagcagttaccaactgagggttcaggtaccaatggtgttgttgacgtggcacacatgcggtatctttattgcatctgtttactaatatgcacgtgcagggggaacatttgctaaagaaaattgcaatgatggcaagtcgattgagatgacccttttttaatgcacgttggactcgaggcatgcaatgatgaaaaatgaatgctttgagtaggtttttaaatgccatcttttcaacttcccatctatcggatcaaatcatgctttttgagattcaggatatgggccattcatttcaaattgtatggatctggccgaagtataaatagatttcttaggcccacttttccttttttcattactttagaccttcaaaacctccatttttgaattccaagatgccttcgactctttacttcaatactttctaaacctttttttaggccgctttccaaatgcagaactgttaaacctcgacctaattcaaccctagcccggtgaggattttgacatgcaagccggctacgatcgcgtgatcgacaaggtttaacactcttgggtagattcccacaaaaatctttcattcccactcatataccaagtaagtatcctgatgctttattgaatattttctatttcgtatctaggatagaaatgctttgtttaagctaggtctaggatatttggtatgtgtaaatggtggattgatgctcttagaattacattttctaagacagagttatggtgaaatctttgcgccatgggagtgttgatactgtttaaataattaggttatggcaatttatgctccgtatacatttggatgttcttaggatttttggattagggtttgaaccatgcatgatgaaccttcgagtgagtactagatctatttattcgtctatttagagttgttaggtgtctgaaaaggcttaacttttgaaatttttgcatgaaacttgctctggttttctttctggtattccgatctgtcactttgtgtcgcctggcaagaacaatcttctaggagtgataggtctagttgggacctttccaagcaattttaggggaggccttccccgatgcccatactgtcatttggataatgggtgtctaatttcttggtttctctttcatttttccaatgatggatttgaaccaagatttccatcttaaggcagtggaaattgaggaaaatccagctggtgcttctatggaggaggtggcactgggggagttctagtggaggcccctgtctaggaactttaacaaaatagtgctatggagactactccggaggctggtggatacagggtaacccaaaaatccaaaggaaaagggaaggttaagacacagcctcctgcccctgtgtttgatgcctccatctaggagatggactagaaaatcaatagcttctgttcatactttatgtttaaatagactatacaaagtctcttaattaataannnnnnnnnnnnnnnnnntttcttcacaattaaacccttgctaagtgaaaattcataaataagacat

SEQ ID NO: 113413 - DNA, 1673 bp, Cannabis sativa
  modified_base (770)..(782): a, c, t, g, unknown or other
  modified_base (1610)..(1635): a, c, t, g, unknown or other
atacacgtttatttgaaaatatatgtgtattttcctctatatatatataagacattttttcatatataataaaattagtgtttacgtaaaaagttcttatttgttatatattcattttgtgtgaatatgatctgaaaatgaattgaagtgaatcaacgaaattaagtataattacttattctataattaaatatactaaacttgatttgttcttttttttttttttgtctcgtataaataaaaaatatatatatatacaaaattgtgtttttatttaaaaaataaaataaaaatgaaatgaaaaactttataatatatcaactgctgcataacaccgacacaatcttaaaattaaaaaaaattatattttgatgaaccaacaaacaaaatattatggcacttttattgaaataaattaatggaaaaatataacagaataaataaaaaataatcaaaattaatatttgtaatatattgtttattaaaattatttagaaatagaataataataatttatcttgcttaaattgaccaaattgccttttatagttaaattataatatataatagctatgtgcatgatagttatttaatctaactttttttcgtagttatatgtgtatgatagttatttaagatgtcatacaaaattttaaaattgaatcaaagagtacttaagatcatatttcacacgtgtataaaattaaatagtcactcgtgcaatacactatttgaaattgaattatattttttttgaattttttaaaatnnnnnnnnnnnnnttaaataactataatgtatatgaccatgagaaaaaaatttaattaaaataaaataaaaataccgaaacagataggggtgtatcggtgcatctcttttaagagagtagattgtaaaattttcttatattttatataaaatagagtgcacttataactttatgggatgaaaataaaactcccctaaataaatttagcctttagtgaaagaagaaaaaaaaaagaaaaaggaaaaaaagtttgttgttttgcatataaaaatgacgttttactattactgtgtcgtttctttatgaaattgacaaaggaacgtcgcttcacgacaacaaattgtcgttttatcactattttgctttatttatataaaatattatttttggtaagttttttacatttttaagtttatatggatatttttttatacggttttctataataaaaacaataaatagattatataaaagtaataaaaagtaacatcaacataatataaaataatacacagataataaaataagacgagtataacataaaaataatatgaaaatatgaaagtatcaaaaactcgtattttcaataaaaaaaaattttaaaattgtaaaaatatttaaaattttgtatttttgtaattttttagtttgtttggtgtatttataaaataatccaaaaaaactaaagccagactgaatttgtgaagcccaataaaatgtgatttttataaaatattacatatagaaatgatacttttctgaatttaaagactttgtttaataataagccggctgatattttaaaaaaacaaaccaaaactaaagggaaacttacaaaaannnnnnnnnnnnnnnnnnnnnnnnnnaaaatactgtcacacggaaattttttcaaaaatactgt

SEQ ID NO: 113414 - DNA, 2893 bp, Cannabis sativa
aacttaaatgaaactagcaatacgtacattcacctagtatactaatatataccaaaccaaacgtgactcttaatgattatatacatacattagcactaagagactctaatgatttactgatccaccaagtttcctgcaaattaattatatttgtccaaccacgtctactatcaaacctcatatttttaggggaaaaacgcaaaaagaaaaatgaagatttctctagtcattcaagacaataaaattgttgtatctctcttgttaatatgttggtgtcttcgtcttccgttacttggtgaaggttgtcctacatgttcttctacacacactcaacgtcaaggtatgcaattttatagtgtcttctctattttagcaaaactgtactataacgacttagaagctatgaagatgaagtctttaagaataatgagattataatattttgttttgtagacaaaacattaccacatatgacttcaaatgtcaatgaagtctctggaaaatcctttgattatataatagttggaggaggtaccactggctgtcccttggctgcaaccttgtctgaaagattttcagtgctcttagttgaacgaggtggttcaccgtacggaaatcctttagtaatagacaagaggttctatggattatccttaatccaaaccgatgaatacttatcggttgctcaaaggtttgtctccgacgatggcattccaaatcttcgaggcagggttttaggaggctcgtcagctttgaacgctggtttttacagtagggcaagtggggattttgtcaaacgggttgggtggaatgaggagatggtgaaagatgcttatgaatgggtcgaatcgaaagtagttttcaaacctaagttgactccatggcagagggctactgaatctagctttcttgaaactgggattttaccatataatggttatagtcttgaacatattgaaggtacaaaggttggtgggagtatttttgatcaatgtggaaaaagacacacctcagctgatcttctaatggcaagcaattcaaaaaacatgacaattcttttaaataccacagtaatggatgtaatctttggaaataatggtgagtaatgatatatcggtaaacttctttaaaaaccttttttttacatgctatttcattttcttttcgtaactccaaattttaggttgtttatacaatccacaaaaatcagtttggtcttccagtagttagaaagttaagtagttataccttggttctcctaattgtgttataaaagggaattgtttggtgactttcatggtgaaagatcttcttggaggaaaagtaattgtaggcctcattaattgctgagtagaatctacggcctttgtttcactatcatttctctttgttgtgacattttccatcgctttattaatttattgttcatacatttgttttaactgttatagtattattgttgtttcgagagtttgtgttagtgactccaaattcgcaggtaaaacagcagagaaaatagctttgggaataaggttcatcaaaagtgatggaagctcacatataattcatagagtttatctcaaccaaccaaatgattctagctcatggggagatgttatattagcagctggggcactaggcagccctcaaattctaatgttaagtggcattggttcttataagcacctaaagaatttcaacctaacgttagtgactgacttgaagagagttggtcatggaattcaagataaccctgcactttccattttggtggactctaagccccagaaacgattaccagatacaccccaagttgtgggcattgttgataagttcaaaattataatggaatcaggaattgtgccagttagtttcaaccaaactagaattcgaatatctgccaaacttgctttcccatactcaaaagggaagctagaattgaataacacaaatcccagaaataacccatcagtcaaattcaactatctagccagggaagaagactcaagagggtgtataagagtggccaagttgctgcaaaaggttgagagatctcactcaattgctttgtttttgggtacagagaaacacaagaactatgtactgaatatgacttctgaagatgagctgaaaaagttttgcaagaacaatgtgaggaccttttaccattaccatggaggctgcaatgtcggatctgtggttgacaaagaatacagggtttacggggttaatggactgagagtggtggacggctcaactttctctgaatcaccaggaacaaatccaatggccacactcttaatgctcggaaggtaccaaggaaaaaagattcttcaggagagaatgagcactgcaaattgcgaccaacagcaccgatgatatagactataattatgtagattcaaatctcaataaagaaatgctttgaaaaaatctaataaataatgacaaaatatctcaactctgtttgtgtggcgtatcattggtatatgttgggtgtgactgtggcgcttgcaatattatatacaataaataataaataaatgaattctgttaattatattgtagaataccaaagaaacgtacgcattttattttttaactgaaaattcattaaaactgttgtaattctagcggaaataactttgaggattcaatcataaaacttgcaataaacgcacaacttgaacagtaattatgaacataaaccaattaatcaacacaatgaatcaaactagaaattaatcaaagaacaacacaagattttatcctggttccggtcctagagatcaacatgatccctggccatactccagttgagaaacatcaccaattattcattaatatgtgaataagagaacatcaatacgattacaataaccagagcaatcac

SEQ ID NO: 113415 - DNA, 2288 bp, Cannabis sativa
aatatactttccattagagatgtcaaactctttgtttgcatttaaatacgagaacaagtgaaagttagagagattactatcgtttattgaaactgagactcattgttttaagaaaacagcagtttcatggcactagatattataatgttttggtgcatattttaagtgcattatgattactcatacagcaatatatgaataaacattaattataactttctaatatatgtttacttgttagtgtacgagttggaaatgaaattggggccaaaaacttagaagcagctcgtttagccatggtcgtggtatcagtaatagtcatcattgagggacttgtagtgggaattagtatcatactcttgcgtaaaatgtgggctgagttatatagcaatgataaaaatgttgtcaaaattgtgtcatccttgatgccctttcttgcaatgtcatgctttctaaatggatttcagactgttctttcaggtatatatataactttgtttcatcaaaacacattaggtaaattttattagaaaataacttatttgctcttcttccttaaatcttaggcatttttaaaggatgtggctggcaaaacaaaggtgtatacctcaatcttgcagcgttctattttgttggaattccttgtcaagttacatttgccttcgtactccacatgaaatccaaagtaataataaattgattttcatgtgcaagaattaattactaaatatttttagtttactataaaataagatatatttgattgctgtaggggctttggctggggatgattattggctttgttgtgaatgtaatatttttccttatgatcatcttacgtgccaactgggataaagaagtaagtctatatttttttaagccgttttatttgtttcattttttataagacaaattttatatatgaggattctcttacactatgtttggtaaaaaggagagaaagaaggagggaaaggggtggagaaagaggcatagagggagaaatttagattaacctttgtttggcaagaggttgagagaagagagaggatcccctccaagtgcacaaatttcaatcccttcaaaactgaaggaatttatgaaaaagacaaaaaaaattagatgtgtcttataccctttagaaaacaatatataattatattaaaaataataaaatagtaattttaatatttattttactattcatctttccacaataccaaacaatacaaagaataacaactattctttctatctcccttactttcctactctccatcattccccttcattcatcatactctttctccttcctactaccaaatataacctcaaggataagatgagatttttatattgaataaaacataatcctaattttttagacatctattctttttttattataggtttaattttcatctatttattttaggtgatgaaggctgagaacagagtgaaggaatgctcaacttatggagaaaagtcttcaggtcaaaataattctagttaacaccaccacttttggtgaacatgataatactactttgtaaattgtaattttatttatttgttgagttgttgatgctttttattattttattttgaatttatttgtttgaatggttatatatttatacttttgtatgttgttgattaattagttacatgtagttgttattttctctatttatatttttctatgttgttgattaattagttacatgtagttattattttctctatttctatttttctatatgttactttatataataccattataatttaaataatttattatgaatgcaaaatatatattttttaatggagtcaaattttctgtcccaattttctttgtctccctatcccaatctaattaaaatgttccacttcaattaaatgtatatttcctaacaaagttaatacatttctctttccaaaataaagaaagagagttaatatatttaagaactaactattattttatttattttttttattgtttgttaataataatttattgtcatgtgactattttaagaaaaaaaataataaaaacacttaaatcagattttaccgtaatatattattaataatattaacgtaaattgtaatactaatacatttaaaaaataatatattattaatattaaaaaaaagaagattcttgataaaaaaaatctgaaaaataaagagcagtagagaaaagaaataggtctatttttttttatagaattatattattttttaggggaattactccatatactgttttttaacctttt

SEQ ID NO: 113416 - DNA, 2024 bp, Cannabis sativa
aaacaaattattcgtatgatcatacctttacatacaatctaaataagaagaaataaaaaaaaataactaaactttacctaaaactaatctttacacgtaactcctacctgtattaatatatatatatatatgtcacattataattcatacagaagaaaatgatgaactttttagattttctacttttattgttgaatttattttgtctttggatttaatttgatttaagggtcttagattaaaaagaaattacaaaaaaaaaaatgaagggtaatgattttatcgttattaacatatatgtcaattggattgagttttatttaggagtgatcatgacgttgtatcatattcgtattcatgttatgcaacttgacatatttagtatttgatcaattctaactcgacccgtcgtattctcatgtcgatctattatattcgcgtgtcgactatgtttatgttacaaacttacaatacatgtttgatttttataaaaataatctatcacaaattatcaatataatgaataaaaattttaatatcaaatatgaattatttattttacattttgtcagtaattttctttctaatttatacatttaattttcaataaaaattaataatactttaactatataaattaataattttaataatatattagatataaataggtcaatttgtgtcaatttagtgtcacattcctaacccgactcaaataataatcgtgtcattaagattcaactcaattttaacccgtatctattttttatgaccctaaccaacaataattcgtatcgagttcgtatcgtatcttttcaaattgtcacctatactaaaatagtataaaatatagtgtccatagaacctatatcacatttatatgatatggaaagcaaatgtaatttacaatggtctttacgtacatatataccactcatgctaacatgcatcaaattttcaatatattctattttttgaatttgaagtgttaagattgctatacgttcgttaattgtgaagtacgttacctcacttgattcatcccataaattctttgccactactaaaattgaaaaaagtattcatgagcttttgctatcagtaatattaggttttattctgaatatccacataatattctactaatgggaccatgtggccttgtgaaagaagaaaaaaccagtgctataaagatattcctcatctccttagtcctttccattccaccatgaactagctaattaatactaaatattcatcatcattcatttttgttggaaagggatcatacgcttctttctttacactctatgatagtcatcgtattagatgcttggtttcactttcacattataaatatataggcttcggatagggtcccgctcgcgtacttttgatgaacggttctgctgatggatcttgttttattgcttgtataactggttgtaataggtaagagaaattggtaaactaaaaaaataacataaaattacttcttgtagcttttcggttaaagtagataattttataattgtacaaatccatgtctcaaaaacaaaaccaatgagtatctataaaagaaaggtaacaatatcaccaacaccaccaaaataatacctaattaataaatgctactaaaagtaaaataatcaccatatttaatccaacaatctaacataagtaatattgaagacctacacaatactcaataaaaaaaatcagggatacatcgatttgcattaaaaaaactaataaaggaaacattaaatagtttagagattagggttacaaaaaattattaaaaatataatatgtgaattaataggttgcacacgaagcgtgtttgaacatgaaacaaagacactgcaagtgtagaagtggagtacggaatgaagctcccgaaagaaggttcacaggtagctgtaaaagttagtgttgtaaacatacaacacaaactcagaccaatctaaggttagataatcaacaagaattaaagtgacaaaaccagaattataaacaatata

SEQ ID NO: 113417 - DNA, 2872 bp, Cannabis sativa
gttctaaaaaatgggggttctcaactttctaaatcattagttgagagagattatatatactaattagttatttccatattttaaattttttaatcatttttctagtttttataaaatttctttatttctccatatatttctaaaccattaaccacttacaaaaaaaccatatttataaaataaaccctattatttaattatttattagcggaaattacattgtatacctactttactttatttgttttaatttttacttctatttttatatttttttaaaatatacccctgaaattatgtacgagttaagtaaagaataaaagtatattagactggataaaaaaaagatttctcaacttatccctatttattatttctcattcaaaacaacaaaaattatttattattaataaacttacggcaccgcacctcatcacaccatttcatacgtttgccgcgtaagttgttgtgtctcgtggagtcgtcttgtctcgcttccgcacctgagctgggactgctccaaacacccactccactcaatacaatatacaacgcgaactgatgaatatctgagggagaaccaattcagtctcctttcgtggagaatcaaaaagtaaaaatggtaatctgggcagatttactaaagtgctttattcttctctcaacgatttcatacaccttctccatctgcgaattcagtgttagcgaccgtaacaagctttacaacttcagcttagcttctcctctccccaaataccctcatggcgttctcagcgaagatgggtattctcttctttctctttaactcatttcaatcttttttctttcacgcgatttatgatattacacctttaaatccgtgatctgtgctattttctcaactgggttgtagctcattttttgtgggttttgattctgtatctgtaatttgggttccgtttgttgacatgggcatttcttatttcttatattttatttttttggtatttgcattttgtgtccattgttatagacgctttccaatgtagatgtttcttactgcttaaaaatccttattgggtatcaagcaggatatgagtatttaaactgtagttgttattttagagtaaaatatcctcttagaaatttcaggcagtatattttttatttaattttcatgcttatattttttatttaattttcatgcttatgttgctgaaagagcttgacatgacaatcattcatttggagaaactaggttgtgcctccttgatgtttttatccaacaaattgtctgaatgacaattatttctatctgtacggaaaccatattaatattgatagtggatgtcgtttttcaaataacaggttcagcttatatagtggataagcaatccatattacatttgtgtacatatttctatatttaatgagaccaaattctaactgatttcttggctttttttcttgccgcttaaatttcacttctacagcttttataaggtggcagtaaatgggactgtgatatggtttcaggttggctccatcaggtcacacatctttgtttttatttgaatgttcttatcactgtgatcatctcgaataactgctgttgttaggcttaattataatagatatggacttcaatattccctttttgtatttttggctagaaggttaaaataaactgactgtaaactgacacaaaacttctctataattagttaaaaaacactgatataaaccattgccaagaaactaaggaacattgtttcttgtggttggtgttttcctttctcaaatcgtagctttgtactaaaaatcattgaattgcttttttaattatgtttattttagattctattattccttatgttgttttttttttcttttttcattggtctctttgtgcagctttgtgatggaatggtttttaaccacgatctgcctagatgtcttgactgcagggtaatgaattcaaataaaaaatttcattttacgaacacaaatttacccctttcctcccaaaaaattctgcttatttacttcttctgctcgtaattgtaggattgtgggggcccatcacattgtggcatggagtgcagtgcacttgtagctcacactgtaggaggtaatgattttctgaggcttcatccttgcttgtttcatctattgtatatttgataatttggaaatattcagttcctgttgcataattccaaaacatgcctcagtccaatgagcaagtgttggagtgatcaatttcgtattgagtttcaaaaataaagttgctgttcatgttcaaattagcctttggtagttctcatatgcttgagatctatgtcttctaccttctgataaatctaaactacggggaagtattgaatttattagctgtaatatgttattggtttgatgcttgatacaggttaccctctgtgcactaccatcgggcatgccttaagcacaaagattaacattatcggtaaatgttccttgtttgaaatggcattataagtcagggaaaagtaggcccgaattgccaaatagaaatgaaatatggatactgaatgtttgcttaattataatttttggcagatgagaagatgcctcacaagggtgtcattgttaagatgtcaagcagaaaggacagctgttcacttacagtgtctgtgatttgtgatgttaatggagttcaggtaacttattggttactatctttgtgattcataagattctagagatttagtaacttattggttactatcttttctttttctctacagggaccacagctgctgaataaaactgggatatgtgattatgtaagtgctattgattattaagagttatttttgtaatttcttcttcttttttttttttttgggggggg

SEQ ID NO: 113418 - DNA, 4321 bp, Cannabis sativa
taactttcaaataacatagaaaaaaattagcataaaatttagtatacgtgcctcgcacgtagttttttgctagtatatatttatatatataaaattagtttagaaaaagctttattcttaaagagaagtaatattttttaatttttttttttggagaggaaaagaagtaaaatttagaaactataatcttgtaataattatttacctttttttcttccaaaaaaaaagttaattacttttttcttattattttaacaaaatattgttgccatttactagttatgtcctcgaaagttactatttccacttttatatgctttttaagaaccaataatttgaacgcgtcaaacctgttgactgactttgacaaatttgagttatatgttaaaatttgatgagatgacttacatgtaaagttatataaaaaagacgggtcaatgaacacaaaagtacatactcaaccaatttgtattttgtgtgtgaaaaagagtaagaaaagccttcgaaaaaaaaaatgacttagggagattgctattaggcaagtacacgatattactctcagcagcttctttacatacactattaaaactttattttatttattttacactttacattacacattacattaatttctttacaatacattaccaaactcttttaaaattttattatattttattaatttatttcaaatatataatattgatacatacacatacccataaaaaaataattattaaaatctaaatcaattaataaaatatatttagaataatagaaagtattctataaatatagagcacgaatagtgtattttaaaaaaaaatattaaaaagaaaaaagaagaacttagagtatctgctgtaatgtatttttagtacagttctttaaatatttttaaattttctctatttaaaaaaagttgttatagtgctctcagaaaagatagtgtctttactagtgattacagattgtatatgttatttattatataaatatatatggaatttgatattaatatgatacttaatttgtagtgttaaacaccttcgttaagtattgctcttacaagaaatagctcaaaatcattaggcaaatgttgacatatttacaacataaacaatttatgttttcagttttataaatttatataatatttttttgacggattaaatacttatacgctatatttctattacttctgtcactaccaatacgttaaattctattcaaacataaaagtatttgcggcataaacacctaatatatttagtttcatacatttttatatatgctccttgtttttttagatgaattaaatacttaaagttatatttccattactgttaatcctaaaaattagcactcctaattcttgaggatagttggctaagggtcaaaggattggcaagagagtcactcgacatgtgcattgccgagtcactcagcatgcacactttggaagtcactcgacatgcatagttttaaatatcactcgacatacatctttggaagtcactcggtcacatgcattcaaaagtcacttggcaacatgaatgcaaaagtcactcggccacatgcttccaaaagtcactctgccacatgcatgcaaaagtcactcgacaaaatgcatgtaaaagtcactcagaaatatgcatgcaaaagtcacttggccacttgcatgcaaaagccactcggccacgtgcatgcaatagtcactctgccacttgcatgcaaaagtcacacggcaacatgcatgcaaaagtcactcgacaacatgcatgcaaagttcactcggccacatgcatgcaaaagtcactcgaaaacatgcatgcaaaagtcactcattgagcatgccactcaacttgattaaacttactgaaattatccaaagtaaaggaatctgtgagcaacatacagtcgcaaggataagtcatgaaatagaagaacgtacaaccacactttctgcaaagctctaaaagtaaggaggtatgagtagtggaggcaccgcacctgcaaggactggggacctgatcaagggtacactgtaagtactacccatgcaatctaggaccacctggcaccagacaatggtacgaggcataagcccacctcctgcacctgcgatttgcagcgtgaaagcgacaacttatctctttgggaccccatgtatcttaggacactagatcctataaatattccattctcaaacgtgagagggatttggaatgtcaaatttgtaatcatcaacttgaaagtaatagacaaaattttttctctctactctaaaatcttattgtcatttgaatttacactttatcatcatctccatcttatttcgagtttaagtaactattgacgagttctcactgtcactaccaatctattaaatcctattaaaatggactaagttgacacatgtcaatatattagtggtccaatcatatgtttaataaaagtacttattaaataattttaaaaagaaattttggttaatcatacttacattaccccaaaattttaaaattaaaccatagatactcactctaagaaattagtgtctaattttcatttgatccccaaattacccctccctaaccaaaaatcatctccctctttctatgtcttctctctttccctctctcgtctttgcacaactcttgtctcctctcatgaatcccacaacacaaccaatcccacccacacctgacgaccatcgaccaacaaccgttaccactctgacacatcgatgagactgagacctataaaccaaagaaactaagaccatttttactactattgtttagatgttcgatctatggtttctttgtatcttttgctaattttttggtaaaatttgagttttattgaaatctactttttctaggttctctatgattttttttttttttttgtgaattccctataaggtacaattgggtatgatggttggtacgatagtagtgtaatcaggaggttaggaataaatatttgatagggtaggatagtggtaggataaaatctgatagtggtacaataattgcttaaaatctatgtcatgatgaaatttatggcatgataaagtttgttcatttttctatgattgctcgatagggtaccattgtatgtatgatagtagtgtaatctgaaagttagggacgaaggttaaatagggtatgatagttgatatatgtactatagtacgataattaaaacttatggcatgataaagtttgttatttttttatgaatgcttgatagggtattatttacacaaaaagtagctttaatgacgtgaacataaatatttagcacgtggaaagaagaaaaatattctcagagtgaaggaacccgagttatagtagtagacctaagaggggtcccctagccctgtgcccagcttgactttaggaactttggaataggtgtttggatcttgccaagttgtttctaactcactttcttttattattttgtaccatgaagacataaagaatccatgtcaaaggcctggaatctaaaaatacacgaaataacaccctaaaagtcaactctagcgccaagggtttcacctaatgcccacattgacattccaactagggtttcagttttcaggactgtcttagtgcaaatgggtcaaacattgtattgggacatgaatttgacatgtcaaaaacatatttgaggtaatagaattagattcagagcactttcatctttgaccacctggagcaccaggtgctctaggcacctagcatccaggttaacatgggatgttttcaatcatcaaactgaagaactaccctgagcattttctttgtcttcattcaaaactaggaaacaagtgctttcggggagaaatagatcagcctagaggccagaatagggacccagtgcccaggttgacctaggtgttgggcccagcacccaggttaacactttgttaacctgggtaattttcaaggagtttttgtagaagtcttccaggaatcttctctgtttttgtcaaagattaagatacaagtatttttaggaatcaaatagagtcatttggtggcaaaacactaaacctggcgcctaagttgacacactacaagaaaagccacttttgccggcgcagttgaccaattgcgccggcaaaagttgtcagcataaatgagatgctgaatttgggattggattcagctataacttttaccagcgcaatgaaatgcgccagtaaaagatgaacactgaaccgccaaatggcgcgaacacatgtccacttctgtaaggcttttaccggcgcacaattgcgccggtaaaagtttcccaaatt

SEQ ID NO: 113419 - DNA, 3458 bp, Cannabis sativa
  modified_base (27)..(49): a, c, t, g, unknown or other
acgtagaaaaaaactagcataaaattnnnnnnnnnnnnnnnnnnnnnnnctttttacaagtatatatatatatataatatcacataaacataatttagtagtaattcttgaaaaaattgttttaacttcgaaaactgctccaccaatgtaaataaataaataatatataatgcatttaacttttcaactatattattattgatttaataatagagtaatttgagacgtatatatttaaatttaactacagataaatataagtttaatatttgaccgtaataatgtataagttatatttctaatatttctgtaggtacttgaccgtgtcaaatcatcattattcacgtgatattttcttattgatatatttaaataaatttttaaataaaaaataaaaatttagtgactagactaataagggaatgtcacgtgagtacgtgaccatttatttaacacttaatgactagtatatatatatataactgatttagacacacatgcatctactatactaataaagaagaattacacctcgaattaattgctttattttaaactaattaataataataataaagttacctaagtaggacccacaaatggctgactaaagagaactttattgtctcgatttaacataagataaatactaaaagacactaatagtacctagtatcctcttatgtattaatatcgctatttgtacaattaaatattaagtctcatatagtttaatataataacttttagagagtatcgttaatcaattgacatgtctagaaggtactagataccactagtatcaagtactactagtgcctcataacaatactcttaacaaaaacatagcatgtgaaaatatgatggttggtgtgtagtagatagtctagggagaggtgctaatttaattaaggtaatttgtggtcaaattcttgaacatttaagtttagcactattaaatcaacttttaagttggaaaaattatgactaaagtttttaacttatacaattattttgtcagtatttcttccgttaattttagctattaaatactaaataaatctatcactttgtacctgtagcatgattttattagtccacataatattaatattaaaaaaatatttaaaaattttcaaaataaaataataaaaaattaaaaaatattttttttttatcatttttcttcctcttttgtttctttctttcctttttattttcttttttttttctttatgcttattcttcttcttgctgcccattcgaggtctcgtcgggatttaggtttgtacatgatgggcattctcattaaaaaatgttatggtctggtcttccattcgacttttctttgaggcatgctactttggtcaaaaggagtcttatctgaattcttgagctcattaatgtatctcttttgagcgtcattgctagtccctgcaaagtatggtcctcctgatatgatcaacacgtcctctccctccataagcaaaggaaggtccaggttatgtcctgattgtccccattgtggttgttctggagggttaggagcattgtttcctagtgctatgtgtggttacacattggcatgtgggactacaggttgttgtgcattgcccccttgtgggttgtattgcttattctttgcatagtgggcaagaggtccattacatatgagagtctctatttcatctcttagattcctacactcattagtggtatgcacaatgtccttatggcattggcaatacttcgttggatccctcttcgcacgactttccttcaaaggttcaagcatctgaaaggccacccaatgtttgtttgtcacatatatggtttcttgtgtctccaccaattcagaatatattgtgaacatgggctagtaacctttgctctttttggtaatgttttgatcttccccattgtcgctctttctcttgttattgtgcctaaatttattggcggtcgtaaggttgttagttgtttgcctttagatttgtgaaagtcgttgtggtagtgactagaacaagttgtgttgggggaagatgtaggtaattggctattttggcctcctcaatgtttacatacttttgggccctcttcatgaattcgtcgatggtgagggaacctcttccttggaggttatcccataataaagacccatgagttatgctgctcccaatgccgtgagtctcccactatcatcaacgttcttgaccttcgtcaattcgatatggaacctattaatataggcctttagaatctcactgggatgctgttttacattagcaaaggaaaagcatttggattttcgagacttggcgacacaaaattcttttttgaaatcacttgacagtttgtcccaagaggtgattgaatacttcttgaatttattgaatcatgtttttttgctcctgtcaaggtcaccgggaatgacatgcactttagacccccacttacttggcttgtcatcattaatgtgttgaaattactaatgtggactcccaaactcagtacttctgtcttattttgtcatggttggcatcttgaacccttgagggtatggcatgccaagatgtgtggagcaaaaggctcaggttcctcattagatttgtatcccctaaacttcctgtgtgttcaacaactgctgaatttgttgttctggcattgtgattcatgggtcgtttatcacgggagcaggaatgttgggaccggctggtggaggagcgtttgtattataacagggtacatatactccttgttgtggaggaatgtcatattgcacctgataaggaggctccctttgtgcatgccccttgtttaagtggtctctcaaatcaggttattgcctttggttcagatggtcctggagatccggttccttgcgtcacgtgggggtgtcgaagatgttcctcatagtatggaggaggagcattaattgtcttgaacactcacagtctgactccttaagtcagagcggtaactatcccccatgaaactaatcgtcctttattattgaggcctccgaggtgtaagctcttgctaggcgtacaattatgttgtggtagtttgagatcttgacaagtaactattgtctcgttgtggatgaggttgtgcatgttgtggtctagtctccctgggtgcctgtcccggacaggcatagttatcacgagagacggtgcaccgtctttcccatccatgtcccctaggttgaggtccttgttgagcatggttgtctcgggggtccactcgcctatctcgagggattcgaggcaagtcttgacttggaaggcgattgggaggtgtcttcttttgtcgtgacctccctttctgggctggttaatgtggtggtgttgcattagtacgaggaggctcaggatgccttattagtgatggggggaacctaattggcgaaggtgggttctggacatgatttcttcgcccccccccccccccccccc

SEQ ID NO: 113420 - DNA, 3293 bp, Cannabis sativa
  modified_base (3265)..(3268): a, c, t, g, unknown or other
tgttagtaaatctaggtcctggtaaaatatattccaacaatttcaactgtcctaccattatcacaactcctcccacgaaatgtgctcctaatgcgtgcgtgtaattaacgaacacattaaagatgttgcatgcgcaccacgctcgtgatgccttccacttatggtctgtcatttgatgaccgctcatgggatgcatctgcgactccagcatgtaccacatatcaagaattcatccccaagaaatggacgagcattacaagctctcagatcttagagagtccaaaagcttgggtgataaatgttatccatgtttccatgcatgtgacacgtggcatattatgaaagggatcatccattaatactctaattaaagccctccactgtgagcctgtcacgaagaagtttcttggaaccgggaacaggtcaagattgaagagtgcacagtagtctacttggctttaccttggcttcccagacgcagaaggtgtattgtccctctcgaactcagaggggtctaaacatggaagcctgcctagataaaatctggacaggtactcaaagggcctaatacgaatgttgaccgccttggagtatcgtggatgtctaccttttatacacgccagatcactaagtgatggttatactttttttgacgaagataagatcctatcccctacgtccaagcatggtagtgaacacacctccatcacctttttaacagacggatattacagacctctgcttttaaaagagaaagctttaggcgacacgttgtctctacttctaaaggttaaacctttggatgatacgtgtccatatagtataaaatgatccccattgtccagctgcagcatgcacgggcacaatggtttccacaagacccaatagttgcctctaattttgcatgtaatttatccccattagtgaatttttagcagaaatcccaggcggatcatgggcatgaccatacttgccacttagcctataaataccctcctatttccataaagaggggggaatcacgtccaagatagctaaaactctaccaatatcaccctttgtctttgtcttctccaagagaagcatagggtgcggatataaggttttctgcaaaaattttgtaaacacatccaaaatgctctaagatgctaatagactgactcgtggactaatgttaagtaacgcctgaaccacataaaaaatctctatctttttatttctgtattttattatttctttagttctaaaatatctagtttctaaaaatctcggtaaacatataatattgtactataaaatttgaggtaattgatatagatcaatctagtatatatatctaattatttttgtgttctaaattatatacaaattatgtatccaggtttatttaattttttaacaatcggattcgttttaattatgctgtttggctaaatgtctagggaaccaagaaagttgttttttgaaattgtttcatttacagcaattagtaacatgttatctcaaaaacaaaatagtaacatatcagtgattcaatgaacaatttcgaaaacatttaagtgttctagaaaagaaaaggaaaatactcagagactgtttgattgtatttttagttttcggttttcaaaattgtgtttttaaaagtaagaataaaaaatattttttttgtcattataaaaatttaatagtatttggctcatgttttttaaaactatttccaaatttttttactaaaaaaataaaaaaaaaatttaatattctacaccataccatgacatgaacccaacccacctcggaccaaatccagactcggattcaaacccaaaccttgactccgactccaaacccaaactcggagtatgctccaaggctaagtttgagtccaattgcaagcccgggattcggggtccggggtttggggtccatgttcgaggttcggggtttgggtcttcgatttagatcaaggccggggtccaaaattgggtccgaggtttgggtttgagtttggcgtccgggtctgggtttaagtctggggtctaggcccatgtccctggtccacctcccgggttccggatccagatccaggtccatgttaggcttcgagatcttagtctgggtctagggtcccaaaatcgggtccagctatgtgagcaaaaacgtaaaaaataaatatgtcagacaaaaaaataaaagttgtttttgaaaatagaaagcaacatttgatgttttctattttttagtttattgtaactcaatttttagaaaattgtttttaaaaaaattagctaaacacaccctattaatttttaaaaaattggttttttttttagtttttttttttaaactgaaaataatttttaaattaagaagccatacaatcctaaaacaaaacaagatttcaccaaggacgagctccttgtgtgtgtatggggggactatttctaataatattgttatgacttcctttgctattggaaaaaggggaaaacctaaaatcgaaagggatgtatatgcaatataatgttgggctaagcatacatacccatcaaacgcaccattataggagagagaaaaaaaaaagaaaataaaataagattgagtgagatatgtattgaattggagtgaggtttgcgtgatatatagcttttgtagtaatcatgttttgtttcttgagtgagggtgtgtaatgtatattgtcctcaatcaagatgaaatatatctatgtggaccaaactatggaaggaccaccttcttatctatcattcaatttttatcaaatgcaatttcatgtgatggaactacttagatgttgctatcaagcatcaaattatgccatgatttttaattttgtatctttttgacatattaattttgtaattttaagaaatgataacatgtatttttttttcaatttaattgccagtgcaatattctctttaatgctaataaaatagtcttgttacttgtgaatgtcaaactgaaacctttttctctctaaaaaatttccaaaaatcaatataaatatttcccaagccggctatacctatattcccttgtgtggacggcttttgatttattaagaaataaagggtcttttttgtgatgtgactattgggaagcatgtgaaactttcatgatgtgctaggcaggtaatagcaatgttcttgtagacaaatattattgttccattttattactattttttttttaaaaaaatatggattaataatgttatattatttataataatataatatatagattnnnnatgtgtaataaactaataatatgta

SEQ ID NO: 113421 - DNA, 2603 bp, Cannabis sativa
  modified_base (1816)..(1817): a, c, t, g, unknown or other
  modified_base (1843)..(1844): a, c, t, g, unknown or other
  modified_base (2287)..(2303): a, c, t, g, unknown or other
tttgtatttgttcgtgttagaaatcatcttaaagttgattacattaaaaataaaattattaaaaattaagcttaaggtcctatttttaccatttaacaaaacagagatctgttttgtcatttaacgaaacaaatgatctaattgataattttggcaaaatacagggtctaaaatgatatttaaccaattatttaaaattaatatttattaaggtaccctattatttatttttattttttcgaaaagaggtacctattatttaattatgtagtatatatgatcacttgttctatatatagtcttaattacttatctatttacttctataactattcttctactagctagggttactattttctctccataatttattttttctcagccatacaaatattaatttcagctttcagaaaattaaagaaaagaaactgttaccgagtttaataaatcatcaagaaaattgatcatggctaatgattttgattctgatcctaaaaagcagtaagtaattatactttattactttgtaattgtgatgatcataatctttatttattgttaatttaattatatatatttcaggtttgatatttatatacacgattacttagtgaagaaaaatctacctcatgttgctgaaatctttagaaaggaagcaaagatgagtgaccattcaatttgtacgtatcaatattattactcttattaatttctttcattatcattaattcttttttgtttgaaaaattagttttaaggatatttaatctcatcttataattaatatttgtgtatatgactttcttgctctttctttaaattttaatgtacttttacactataatatatatgtatcatagctttcaaattcttcttcttttaagtaataattttccttggttttctttaaaataattatgtatcttaccgatacatattcataagttttggtttctaatggcgaaaagtatatccaatagttatgttaaattaattaaattacaatataaatatatggctaattaggatatttttcttggaattttgacatataccctttaaacttctagggtttttaaaaaattcccttgagattattggatttaaattttttttgttcaaattttggtaaagaaagcctcgatagtttagaagaatttttaaaagttaaaattcagggtatgatttggtacatgtcttagaattttggtatgatttggtacattaggggaatttttaactgttagaattcatgtataatttagtacatatcaaagttacgagaatttttaacagttagaattcaagtatgatttggtacattagggaaatttttaacggttagaattcagggtaaaattttgtacatgtcaaagttaattgttttttttcaacagttagcattaaggagtatgatttagtagtttagggtaaaaattaacctaaatataattaaccaatgtttttaaattaaaaaaccaaggtcatgagaaatatttatttaaatagattcgtagttataatgtttaattaattaatttttttttggtaggtgttgatacttcgaaagtgttcttgcttgactggtggcgttctttctacgagtactttggccctaatctcgagggaattcgtcaagtatatattatttttgttattaattaattaaaattctacctttaaatcgttttattaattaattttttataagttgaattaatttaataattatttgtgtagggattatcgcgaagaaggatacaattggggattcaacagcaagaaaactccgataataataataataataatnntaattataattataataataataatnntaattataattataataataataataataataataataatgatgatattgattttgatttttttaagaacgatgaaatgaattttgacttaaaaataggagaagatctatctatcttttttcccttttgttcggaggaattatttaaaaagtcaactaatgatcatcatcatcaagtcaacggtcatattccaataatgccccagcagaaaaatcagaaagaaacagtaagagtgtcttatactaataattaattctataattaaattgtttgatatgattaatataatttgttactattatataattatttgatctctcttcaaaaccttaatttgttttagtttcaaaacaatgttaacaacttaggagccattactactacaacccatcattcaggtatgtactttgtttaatttgctctcattattattattattattnnnnnnnnnnnnnnnnnttattattattattattaagttaattgacaaaactattttatgttttaatttaatatgcttaattgacaaatttttttcaacaattaaatcttactattaaataccaattaaattgttattatgtacccttgtgtatacataaaatatttttattagttttgaagttttagacgcgacataacaataatattagacaataaaatttaattgacatctcaaattttaaaaaaataaaaataaagttaaggagtattgttaccaaaaaaaaaaaaataagtgtaaaaaattaaaaaaaaaaa

SEQ ID NO: 113422 - DNA, 2894 bp, Cannabis sativa
  modified_base (2328)..(2331): a, c, t, g, unknown or other
  modified_base (2700)..(2705): a, c, t, g, unknown or other
atagaaaaattatggatattactctttagtgacactttatgtttttagtgaccaacattacatgaggttaacattgaaagtttagagtctaattgtgtacgtcactaaaatttctttctaattctttagtgaccagcacttttgtgcatgtcactaaaagtctaaattgtagtagtgattataccaggagaggtgtttggttaattgtttacaaatcctgtgataataaaggttgagatcaacctatttgactaattgtgccattgagtttgtgtaggagaaattcatattcgaatttccttcctacaatctctattactctatttcattaattaggatataatactagtacttaaagtttaaagtgagtgatgaggttacttttcaggccattaagttttctcgtgaaaataatgagagcgagagaagtgaatttgtacgttattaaaggtcacaaagggatatgagtacgagttcccatatttggaagggcaacaccaaagtgatatgttattgattagatccgtgagaaatgaaaaccttttagtttcggtcatttcaataggtcatttctttctttctttctgtcaatcaatctatactaatatatatctatatttgaattggagtagtagtgatctaaatatagcaaaccaaatgggcttccttaatttagtaaagtgctatatacacaatactactataccggttactaggtataactccttgggtttatagacttacatcttaatttgacatggatctgatatcaatccccacataaactaacagatacaataatgacccacgtcaggacttcataacctatcaaattcatattaacaatacatgaatgttgttggcatcttggctagtaaaaatctaattcaaaagtcattaattggaactatatagttgagtaagtgcaaaatcaataatgcttactatatatatttctctctatatgtgtatatcttcaattccactataccacaaaaagtaccttaaaacaatttagaagttatcatcaactcataacatatatgtcaaagagtttgtatgataatagggttattatgagtcgtgtgcgttaagagcatgcactcagagttataataactataagctaaaataaagtaagaaaaactttaaaattaatctataaatgtaataaattttaaaaattgattcattttaatattgtagtgcttttataatttcttagttagggtgtaaatataatgcccataaaccatatatcataatgtacagttaattatttttcatcaaaagtcaagtttagtcttattaattaatgagaaatgtttatgaattaatatgttcacggacataggcaatattgtacgtcaaagcattattttataaaagatacgtatggtatatgtatacattatgaccgaagcctatcaaaataatatatatatatatatatatatttttggaagaaaatcatcaactttatttaactgcaatcattcatgattacaagaagcaaatcagtaaaaagctcattactcataaaagtacgatcagcgacaaaataaaatgctccagtcaaagaataagcaattctatttgcagaccgtctaataaaaataactgaagcatcacgcaattgttctaaaaatattttacaatcagaaataatactcctaaaatatgacaacaaaggaagatcactcctaattgcttgaaccacggatagaccatcggtttcaaccaccgtaccttgccaatccctttgttttatccaactcaaagcctctctaaccccattgcctccgccaattcaggagcaatattacctacccgacatctagtaatatatagcctcgacgaactgaccattatcatccctagatcaaaataatatttaatttgttatccataaaaattatatatattttaggaaaattataatgcccagactaaaagggtgcagtactaaattttccatgatagttttaatttatgatttatacaagaggtacgaaataattatttaaaggttaaatactattttggattttgtgtttttcgaaagttatttaatggatcatctcttttgctaaatgacaaaatagatcctatattctccaaaataataataataggattctgagctcaactttcaacaattttattttttaatataaccaacttcaagacaatttctaacactaacaaatacaaaaaaggtaactagttttgtcataatatttctagatcagattactattaagttttattttgacaaaaattcagttcaaaggttcctatttatacaattttagaaaatacaaggtnnnntttgtcatttaacaaaacaaagagcccaattggtaatttttacaaagcgcgggatccaaaatggtatttaccgttatttaaaatattcgattaattttttaagaaaataaacatgctaaaaataaagttcaaatactatcttacaacaaaatttttttgacttgataacaagttacaacaatttaaatatataagaaaaattatagtaaaagtccccaaaaatttatgtttgatgcagataagtcctcagcttcaaatattaacaataattattacaatttaggataaggtgaatgttgttcaattttaaaaccaatcggcaacagtaggagtagcacattcatcttatatatgacaatttattttcannnnnnagcaatgtgagactaactctagtacacccttctcacgttagggcctggaaagtgtgggtataacgagcgacctttaagagaccacggggccaaacgtgacatttgaaagaatctcacaaggctaaatatcaggaaatttataaattttgaaacaagtcaaagactccaacactggaaactggcacacat

SEQ ID NO: 113423 - DNA, 1278 bp, Cannabis sativa
aagacattttacctaatgcacctaagcaagacttctttaaaagtgtatatttattcaatcaaagtggaggaatgttggtaagggctatacaattcaatctttgagtgatatttccctgggaaatgagtggaattcagagatggtttttcagttatttggggaggatctaggaacccgaatcatgaacattcctagaattcctttcccacacatggatcaagtcttttggaaacaaaaccagttaggaaagttctctgtgcgagcagcctataatacggcaattttggatagaattgaaccagaggaagaggtttggaaatggatttggaaggggggtatccatcctaggatctcagttttcttatggagagccctgtccgaagctattcctacaaagaatcggcttcattttttacaggacaaaacttgcaatttatgcggagtcgaggatgaaagtgcctgtcatatactttggaagtgtagtttctcaaaagctatctggtttggatgtcgtctgactctgagattggaagacattccagctgataatgtgctcaccatgtttaagactttgttagattatgtggggggggggctgataggaaggaactgattacctatttaggatgtatcatgactgaaatttggcaccagagaaatgtatgctgcatcaagaaccaagaagtcaatgtgcagatggtcttggcaagaattgaaaagaaggcagtggagttgttgccttccaagtctgcaacttccagcaatatacatattggtaatttagatgttatgggaaggcagataatggaagagcccagtggttctatggctagcaacccctcttctgtttcttgcaattatgcattcactgacgcatcctgggtgaaggacactgctggtatagctgcaatttctgtggagatttcatcaggccgttggtttgttagtgcgcagaagataagggcggaatcggctttggaagctgaatttacagctatctttcttgctctgaatagggctcgtgatgcaggttggaaggaagtgcgcgttttgtcggattcaaaaattgcagtacaagctttaactactaactctcttccggactggaaagttgctactgtgttttatttgtctctaaacttggcaaaaatgtttcagttgtgttgtttttcttttattaagcgtagttgtaatgctttggctgatggtgtagctaaaaatgctaggatctctagtgatttggcaattttgtaccaaggggagggcaatccccctgtg

SEQ ID NO: 113424 - DNA, 2276 bp, Cannabis sativa
aaatggcgactaaaaataattagtcgtaaaaaattttgggtgactaattaatgagttttaatgactaaaaatttagtcattgaaaaagagttttcttgtagtatcagccagtttgtcatctttggcatcctggcatagctttaaattggcttccatgggagtgtttgcaggttcgcatcccaagaccctaagtcctcaagaatttgtaaagcatatagcctttgggaaatgaagataccttgttttgaccttgctacttcaagacctaaaaaatatttcaactgtcctagatcttttagcttaaacctttgatccaacctgattttgagatctcaatctcacttaaattgttgctaatcactatcacatcatcaacatatataagcagagctataaaaccagctttaagatgtttgatgaaaaaagagtggtttgtggtagagtgtgcgaaaccttcttcctcaagagcagtggaaaacttctcaaaccattgccttgagacatgttttagcttatataatgatttttgtagttttcacactacattctttggcatctcctccttaagactatacccttgagggagagtcataaacacctcttcatgcaaatcactatgaaggaaggcattgtttatatcaagttggtgtaaatgccaaccataaatggctacaaaagctaaaacaagtttcagtgtgacaaatttagtaatacgggaaaatatatcacgattattaatgccttatagctgattgtaaccttttggaactaatctagcttttttccttttcaacagacccatctgcattaaatttgattttatatacccacttgcagcctatagcatgctgatgagtaggtaaactaacaactagccatgtgtggttcttctcaagtgcatcaatttaattatccatagtattgtccccaaacaagaatcccaatagcttcactgtaagaagtaggttcatagtgactagctagaaatagagcaaaccagggctttaaaagttgggataatttggagtaatcaagaacctgtgagagacagtgaacagtagaagaattagcaaagtgagagggattataatgagattgagacaagaaatagtgataatcttgtaaataaaaagatttttgagtaattctacaggtcgagaactaaaggccgataactctattacaggggaatgggattgatctgctagtgttgtgttgatatgttcatcaggcaaagattcaaggggagtaaaagatcctcatactgagatggaagaccatctacaataacaaaaggaaatataaactcttaaatttccacatccatggaacagaaaacacgactagtatgtaaatccaaaaacttataagctttcattccaataggatattccaagagaatgcaagatatagctctaggtgagaacttatatctgttttgattcaggattgaagcataggcaagacaactgaaagatttcaaatgatcataggaaggaggttttccatgtaagatttggaaaggggaattatgtttgagattagaggtaggaattttgttaataaggtaagttgcaatactaatgcattctccccaatagactaaagggatataagattggaacaaaagagctttagccacattaagtaagtgttgttgcttcctttcaacaacagagctttgttgaggtctttggacacaagaatgataacgtacgattctagagacctaaacaaatatgtaaattgcagttcttttgcattataagatctaaatccatttatggtggtattaaattaattttgaacaagtttaatgaagtctagaatagctgtcttgggtttgaatttatgtttaaataattgtatccaagtgtacctagaacaatcatccactatagtaagaaaatacctatatccttcatgtgtcaaggtatgaaaaggtccccaaatgtccatatgtataagctcaaaacaatgtttggaaaaattgtgattggaaacaaaaggaagtcttctttgcttggtataatgacaagtagagcaataaatatcagaacaatgagtgtttttgaaatgcaatcttttattgataggaaaaaattttacacatgagaggtgacccaatctgtaatgccaaaagttatctacatttattttagtatcagaaaaagatataacagaaggagaaaaaacaaatcttaggttaaataataaattttcatgtctttcacctatcccaattgtaacgccctaatgctaaggcacgctacagt

SEQ ID NO: 113425 - DNA, 2667 bp, Cannabis sativa
tagctatcttaatagcagaaaacaatgtacttatttgcagtgttttgctcttctatcaacctacatcattaccctatttcatttgaaaacattaaactcaagtttctgactggatactaaaaaatatggtaagctgaagatttgcccttaccatggtaacattctcttgcttctccagccataagtacaacatcaccacttcggaggaacattgctactggaggatcctctttacactttccacccaaaaggaaaattgctttacagcccaaactgagagaaagacaagatataaccaattggaagacatttttgcaccgtaaacaaaagaatatatattaatgaaccagaaaatcagatcattacaaacatagtagcatacctcaggcttactataggtttactccaatccttttccatgtcatcaaggtgacctccaagcgtatcaccttaaaaaatatcaaggaatcaaagtgaatttgagacttcatttaactctagatcatcaaaacatttcaaaagaataacagctttaagtcagaaaagaataagactcagtaattttcctattatggtgcaatccttcccttaataggggtaatttacaagctttcttacaggtttgttcgataactttgactgattctatttcaattgtcttgataagttttcatttattttgaatatgtttttaatgaaaaagaaagaaagagtaaagtatccaaagataccgaatgtacctaaaccaaagtagttgacaattgcagcttctggtttaaattcttccccagaaggcattgcaggcgcagccaatcttttagccagtccacagagtgcatcagggatcttgttgtgtggaagagacacatcatagtttcgctaaatcacagagcaaaaaaattcccattacaaaaagaacttgaaacattcttaggggttcaatgataaacacaaaaacttatgtcaattgatgcatgaaacacagcaaaatatcaagctttcctcaaatacaacacgatgggcaatactatatatactactcaaaatccaatcatagttcataacttaaacatgatgaagtaaaaaagaaaaactgaattatatttagagtgtcacctgccttggaccactcaaattgcaggccaagggtgctccaacgcagcttccttagtagaacagaagcagaaattgttttgcaaccctttcctattgaagaaacttcttgttcctcaacaagtttccatcttttaggatccaaactagagtccacactaggaggaggagaagaagacaattcttcaaccaaaactttcttctccttcgctgcaacaaataaattatccataggcccataaaagggattatgattagttctatttggaggctgaggaaaactgatcaagctctcctttatccacttgcattgttcttctacactcaaagccccaggaatgaaataaaaccctatagagaaaaaaaatgaaattaatcatctttcattcattcttaattatacagtcataggccataaataaacgattgattaataccaggacaattttccaagcagaacagtcggtgaccggaatggttttcgagagtcactattccggcaggaatctgacccttcgtattgaaagactgtagaatggatttgaaatcaaggacctcagataaatccacctctctgggcacttttttcctgaaagaaaaatcattacggaattggagagaagaataatcggtggcttaaggagtgtgtaatgcttactttttgtttttgagagttgaatcatagtagagcttgtacttcttctccgctcttctgaaagcggttagctctaaatcgtcggaaactttatcggatccgtacatttcgtgccgtcgttctcaccgggaagaacgacgaaactggaaagggatttgctgggtttgatttggttttgtgttgttcgtttgcgttggcctcgccctgccctggtctcgcaaatctagagctgtcgtttctatcaagtcgtaaaaacgacatgtcgtttttgagtgttaccttaaacaacatgtcgttgatcaattagcattttatcgtatgattactaaatgacacatacaccaccatcccttgtcgttttagtttattttttctttattaatgctcagaaaatcaaagttgaaataatttgttacacttttactatacagtactattcgcaattattttaaaatcataaaggagacttacaatttctgttttgacactataaatttgatcttttagtgacattattgagtgatacacatcaaagtgcacatcactaaagagttagaagtaatatgtatcactaaaaatatagagagtcactaaagagtaaaatctaatttttttttttatttttattaatttaaaaaatattgacctatagtgacacgacaatcatgaatggctaaatgtatcataatacacttggcacgtcactatatcataatctttttttttaataaatatacaactgtaattaataaagaaataaaaaataaaaaagaagtattaaatgaaaaataattttttcctttttagaaaaaaaaataaaaatcaattttttccttaaaaaagaaaaaaggcaataaaataaaatgcactctctatttatcgccagaaaaaaaaaaaaa

SEQ ID NO: 113426 - DNA, 2208 bp, Cannabis sativa
cccaacacacattttatatatacaattgtgaccccaataaacttctaacaatggatcgctccgtatagttcgatatagcatcatattcactcctgtggccaatcagatatagtttggtctctccacatgactcagggcacgatcgtagagccgcgaagatctcaaaattctttggcagcgacgagaaagaagaacaaaagaagaactttgttgttgtcggtgatagtgagaacaacggagaatgaaatgagaaatggagaaggtacgacgaaagccatggcaagagagaggaagaagaaatggattccttttatagttttactgtaaatataaattttaaattttattttaatatctttagtgacaaaagaattaagtattgttgtgagtaaatgagtcttcaaaataaatagttgtaactaaaagacagttattagtcacaactttactaaatgataattagtcacagattattgtcataaaatatattgcgactaaatatttttttagtcacaattaaatttacgtaaaagtaacatttagtcactaattatataatttaaaaattatcacaaataatttattatgactaaaatattatctcttatgagttgcgataaaaatatacatttagttataaattatttttgttgtgattaaaagtctaaatttttatagtgtataatgtaatctttttttttatgaaacctattatgtaaggataggtaaattttagttattaattagtatttataaattagtcatatactagtgaatacgtaattggatagtgtcacaaaccataaactataattattggagataaattgagaaatatcttttttttctatccattaataaaaaatactctaatattatagttttttaaaatatatctacttttataagtagattacccaatataactctactctctacggaagtttaatatataatttacattaatcttaagggtctaataggaacattatcatttataacagtgagtatatcttaaagaatatgaaaatgaagataaaaattaatacaaataaagtggatatacaatgtaatttcaattaagaaaatgagccaagacataacaaataaagtggatatacaaacaaataatttcttgtaattattgagccgagacataacaaccagtatttcaattatgaaaatgaacaaatgaaattaaaaaaacgataataatgagacccataaattatctaggggaattgtaacactcaattttttttttttttttttttggattttattgatgaatatgcaaaatagaaatatcttgattataagtcacaaaacaaaacaagtatccaaatacatcttaaaaatgaaactgtaattccctctaaattagagtacttagataaaaacatgaaactaaggcattattgaggttctagagcgtttactcgttcgtattggaactcactttgctcagtaccaatcgtgccatacaatcttaatttaccctaaagaattacctgtaagaggatagaaaagaggtttaggtcaaagccaataagaacatggacaacatcacaacataacaacatcaatatattctaacaacatcataatcaaaccaacaaagtagggacactaaaaaatatgttgtgtcccgaaaaagagtctcaaatggccttttatgtagtaatgaacataatatcgttcataaaattcaagcatataataactcatcatctataattgaaactatctcgagccaaattaaggactttattatatccacaaagttttttttacattttaaaattacatttagtgataattttttagtcacgatataaatttttttgactaaatgttacttttaattactacaaaaatgtatttgtgactaaaacatagtatttagatacaagttgttactaatttaattttagtcacaacatgtactatgactaaagacacatttagacaataaattataatttttgtggctaataattttagtcgcagatcctttagtcacaacatatataaaaatgataatttataattagtcataactttttattactttaaatataaaatgatagcattcataacatagtcataatattcttaaaatgtcataataatcataacatttcttgtagttcatgttagataaattaacaattaacccaagatctatttgtatataacatagaacac

SEQ ID NO: 113427 - DNA, 1824 bp, Cannabis sativa
ccctccattctcctaccacaaaaagttaataacattaaaactttcaacccccgttggaataatttgatgagcgctattttctgttaaggaaacaagtacgatcaggcaactatatattattccagtgtaggggttttcttgactaaaggtcaaaaacctttccaagcatgtgaaggtaagctgtttttatttttcacccttcacctttagaataaatatagacggagaaattcatggagcatagattgagtgatcaagtccatggtctgctctcatgaggtttgggttcaatgcctcatgtgaacctacctagcatattactataagccattcattctaaagactgagtttagcaggaggactgtagcatgaagaaaaagtaaatacagacgtagatggattgatctttcacagaagtaaactcctacaattaatagttactatcttataagcaacttctaaacatgatccattaaagaaacaatcatggtttggtgatgatacatccaattcgatccaatagtagtagctacgtaatatactgatgctgctaaaaaaatattatgattaccttcaaggatcagaattcttatgtagttttaaccaagtgtaaaaggaaccgaggtatcaaaaattgcaaatgaaagtacccgaaatggaacagtttctgaggtaaattattgccatacgtaaaattagaatatgttcgtctgtaaaaccaagaaaattcacatgaatatactattactggaccgaaaactatgaaattttcaattaaccatcaacggaacacccttgcatcgaactatttacacaacactctgattacaacacctttcagagaacaacaatgattaaaatcgcaaagttgagcaatgcacataatttccaaaagcaacaaacagcctaagtattatacaaaaacagtataaacacaaatgataaatctctaatgtaatcctaagatcagccaattgggcttgttcctctaaaaacgaaattgctaacataataccagctaaacaacaaatcaatcaaaaacaagaaaaccccaataagaaaattaggcaaagaatgcgttaccaaaaggcagtgacagaaggaaagtcactagtggaggccatgacaacaagagcagcagctgcaaaaacgaattggctaacacgcaaagcaagcccaactggggtcccaggcatgccctgtaagtccttcatcctcaccctcggagcattaccaccttctgtagttggagcatcttccactgggtgaaccgaagcatggctcacattcatttcctcaaaacccccaaataacaaaagaaccctaattttcacttcataaccaaattcctcaaaaacccacacccaaagccaacactttcagctctcaagctcaacccttcggtatctaatcaaaacaatttcaacaaaaacagctcaaaatttattgtaagaaacaaacaaaagaactcgagcatcatccataatttcgcttacccctttttcttcaggaaacctaacagagtgagcttgagtctctaattaagaaaaacccagatgaaatcaaggacctttagaacgaaatcgatggtctgaggttgtgattgttcagagatctgaacgagtagagaaaccctagcagtaaaaaactagttttgagggaagaatcatcggttcctccgataaagagatgaacttttcaggttgacggcgacggaggactggtctgagagtctccgatactcagcaggagattgggtaggagagatttctgggtatgggacgaggacgaccgtagtcggctgctgttttttttttttttttt

SEQ ID NO: 113428 - DNA, 2545 bp, Cannabis sativa
tcctcatggcatgaggaagaatggtattgggctggccctacaggaaaaaaaaactatttaaattcgtgtatactgctttttttttttttttcttttttaaaaaaaaaatcatatctatatatttttttaaacccatataaatatatatatttttaaaaaaatcatatctatatatatatatatatattttttttttctaaacccatataaatatacttcttctataacataacctaatctatctatgctttcttctctccacgtctttctacccaatttaaaaagttactttaattattcataattttgtactctttataatattcttttttaccccatttaatgcaaacatgcatgagagttttcttttatgaataatcaattgatgaggataatcatacatcatatgtcaaggtatgttttattttattttttttataaggattatacttcttctaattatttcctggtgattattgttttaatattggataaatgtagcgtaaagagtttcaaagctaaatttctttagcaatatttttttaatagcaaagttagtattaatcttattttattcttatgcttcatattaaatgtgtgaatgacacatgtttgtttagtatcaaactatcaattagtggctatatgtaaatattaacaagtttacttaatattagtagtttacttaatagatttgaatttataattgatttttaaagccttaacaaattccaatgaacttatattttttttaataattatgcaaagagtaattattttttttattattattattatataaatttatactatttaagttgtaagtgtaatattccacggtattaacatttcttagaaaaaaaaaaacaaatcaattttccttttaaaattatgttaaaaaaatattaattttcctaaggatatttctctataataataataataataataataaattacacaatatatatataaaaataaaaataaaaactaatctccaaaaagaaaagtattattcaaaattttcttatcaaatatatatctttataaacaaaaatcgcataattcaaaataataataattaaaaaataatatttattttcttatcatacatttttttttttaaaaaaaatattattacttagcaacatatatgttaatatcttatcaataatcaacatataaattttgaagatcaatcatagaaggttggtttgtagaaaatagagagttcccataagttattatatatagtcatttattaatagtagagtttctatttttttttatttatatatattttttaagtgtattaattggactgttattatattttgaaaattctagcttaattttattacttcactctcattttaatttgatgggtaatacactctaaaatcacacaaaataactttgcttattctctcttttaactctcttatttttctttgatggattaaataatttaaaaaataatatttatgtacctataaaaaaaatcattcgtattttttttttttaaaaaaataaaagctaattttatatagttattatttgaccagatcaaaacaaattaaaataaaaatatgaatgatgaaaataaaaatattcaaacttgataaataataataaaacaaatatactaaaatatctgtaattctaactaattattaatttatcaaatatttaaaatatatatacaaaaaaattacttatatgatgtgcataaaaatggttgattcaaaaaaaagttctgtaataatttctatcatattatatatatttcttttatatgtatgaagcttatgatttcaattatatttaatttaatgattttatgatatatgcagctagtttatgacaatacaatgaagaagtgttgaatagtttataattttaaatatatatatcgaacgaaatacggtgattacaaagattttgaatgattgtgatgcatgagattatacattacgatatctattttttttttttctaatatgtttatctattttttcttttttttttattttttttcaatcctatttatctttttaattatgtaactgatattttaatattttttattatgtaatttataaaaaaaaatagttaataattaatattctaaactatatttttaaattttaaaattaataatgaaatttcttaactaagcgaaatattgccaaagatattaattatatcatatcatacgaattatattagaggaaatgttactgaacaagatatggtgacattttcacattttcatattttttaatattttatcacaaaataaaataatcattaaatcacttttcaaatcactaaatattttttttcaatataatattttgaattttaaattacatgataatatcacgtggcaatataaataaatattattaaaaattaatatgagtaaaatttaatacaaaattattatttaatttttattaaataaataaaagacatattttattttatataataatttaaaaaataaataaatacccgccgcgaagcgcgaattgtttactag

SEQ ID NO: 113429 - DNA, 1127 bp, Cannabis sativa
  modified_base (1088)..(1095): a, c, t, g, unknown or other
gggactactgactgtcacaaccacactaaaaagatcttctatcttttagatgagcgatttctcagatatccaattgtgcaagtctggagatggggattttgcgaatgaatctccaaaaagcaatagtttcatccccacatctctatcagaggacgaagttcctgcaagaagtgcccaagagggcttgctgtctactggcaagataaatcacatagttcaagagttagaaggaccaatcaccatagaggtacgaggaagcgagtccacggtatctgctcaagggactttcattcatccacaggctattccagacactgaagttaaggagatgggtgaaaactttgagtttcctgcttgcaaggtcgaagatgatggcaaggaaagcgagtcagactcaatagagaatgctcctttgaacgagctattttcctacaaacactcaatctcacgagttaggaagtttgacttgacaacgtttaagagactgaagttataaatatggctactacgaaactcatgtcgatgcagcatcctcattttccttttaccaatcttgtgatcattctgacccaaaatgtggtggcctcgattcccatcattcattgtggtgtcacccttccttttcacccttttgtaaaggtaatcttgacacacgacgacatctccccattccaactcacgcccaatagctatcaaataatccttgccttttggcaattcaccaattaaatttatgtccaaaattgtgaatggctatgggctggtgatagaatttaaatttcttggtggtttgttgacatatgtggtaatccgttgacacttgtcacagttcttagcaaagttatttgcacctgcctataaagttctagaattgatcaaattaccccttgatggtttagtgacttttagttagtgtgggggggcaaaattgtccttttcccctaaagttcttttgtctttttgtgagtttaattaactctgctaatcaaattttttatgctgaaattagatagataaaacttgttttattttgattttattaaaattagaagaaaaacacaaaaaaatactctctctctctctctctnnnnnnnnctctctctctctctctcgttttctcttgcttt

SEQ ID NO: 113430 - DNA, 1532 bp, Cannabis sativa
cagccgtagcagtggctgctgctgctacaggaagttcgagatttgaatcagcacttgtctttgctgcagcaacaaccatcgaagatgcaacaacagctgctgcagctgctgcagcagcagcaacagggacatttttaccatatttcgctggatttatttcggctggtgatgaaataacgtgtcctgttatttctcgattatcacgtccaaggtttacccctaaaccttcaacaagttttagaagctcttgttgaccaggagagtttgttttcgtgtgtaccttgtggtgtggtaaaggaggaagaaaggaaggccgagcaatatcatcttggcctctattttctcggtttccacttccagagccttctttagtttcacccgcgtaatctttttgggcattagcctcagctgttgatgcatctaagtgatcttgatagatttctgtaaacagattcgggggagcaataacaccgctttcaagcaacacatcatgaagtttttgagccaacttcgggttttctttggctgcatctatcatgtatttcgaaacatccttcactttctttttacgaacagcaggagaaccgacaccttcagtccaagaaggagatctcgcatgcccatgaccatgagggtagctacttttgttcggaaaatcccacacaagtcccttctcggcattgggtggttttttaaaatcgtccgagagaatctttgattctccctcagcttttgtttcctcaactttagattccacgggtagttgtgaatgagcggttaattcctctttgtcatcagaatccctccccgtggaatgcggatttcttaacctagatttgttttcaaatgtcccgaaatctgaatgatcctcaaatgaacttccaactccactactggaagaagctacatgagatgaatcaatgtctctggataaaggactagccgagaagcaagaatcgtcgtattctatatgtgatccagctgcatcagatggaatgagtgtaccgggatccgacattagatcaacaatgtactccctgaaattcagattagccaaacaatatacaaaataaatcatgtcagtactattttacattaacactataatgacaaatatgaataacaaaacattacaaatcaagaaacaaatggttgtctgagcgaaataccttccgccattaatctttacaaaattcatagccacatcactggagccagtatattgcggccccttaactagtcggcacggaatagtcacactatcagccaaaacctacaaaataacatagttgaattttacattggttgaaaaatttcacaagaaatttgctaacaaagcataaaactgcagacaatccaatcagacaaaaagcaaattaacaaaatttctcaaattttccctttgtttccgcatttacaaatatgatactttctgggcatttctgataatatcaagtgttattcctattctggcatttctaatttccggagttttagccccgattagaaaaggaccagaaaaactttctagt

SEQ ID NO: 113431 - DNA, 3762 bp, Cannabis sativa
gagtttgataatgaagacgatgatgttgttggttcctctgctgatccatttgacattgctaacaccaagaatgctcctccggagacgctcaagcgttggagggtacagttttctttattattattgttattgctattattgatatgattatttgttgaaatgtggtaaggttaaggtatggtgtgtttgtttttgatgtaatgaaattggaccaaagcattgggtagattcgtttccgtgagaatgaacgaatgaacgaatgaatgaatgaattgaccaaatacgtgaagattttatatgaatggagatttgaattgtttggcatttgatcagaatttagacacacaatgcttaccataaacggattggaaatggagttttgagtcctcaattggaaatgaccgagttttgtttgtctagtaaagattggaggattcgaaatatgagtaaaacagagaaaatgttgtgatgtaagaacgagaaaaactcttgaagaggtttagtcatttcatgaacatgttttattggaacaaattatcatgccctttctcagaacttctcagtataagaaacttcattgaagaattttggaggttgcaaagcagaatggtttctcaattcaacattaacttttaattgcttattcatttataaatttgagcaatgtcattgtttgtactcttcttttatgtttgaatcattctttattcaagaaaaacatgttgtacttttctgttgaataaaaaggtctggttctttgcagcaagctgctctcgtattaaatgcttcccgtcgctttcgctatactttggatttgaaaaaggaagaagataaagagaatagaagaaggatgattagatcccacgcacaagttataagagtaatgattttactcctaaaattcattaacactcacacatttatgtgtctaaatatatcaattctaattgatgattatttttcgacatatataggcagcattacttttcaaaatggcaggcgaacgacaaattggtatgacattagtattttattttgatttgaatggttaccttcatgtttgtttttctactttacatggtcttggtaaatttttgtatttagttttgcctttttatcctcttaggaggtgattccaatgaatgtttttatacattttgcattatgttaaggttattatatatacttgattatccctacgaaatgtcataaattgaaattactaggttaggtgcattattattgttttgaaactagcctcttcggtctaatcctattatatttggggactagaaaactacaattgctatgcgagtgtctaggagagactcaaacctcagaccatgtgggagcaaaccacatgccaaactaatcaagttacgtttcttgagtgttatgtgcattattttaagatgaccttagttagaataattgagcatgacatgcgttaaaccacatagtatagaaaatgatctagggtcctttacaaattctaagaacgagtgattggttaggtcatttgaagaggaagagatcaaaagggttgtgttttagtgtgaaggtaacaaagctccgtgcccaaatgactttatgttgaaattttattagcataatttggcaattcgagattgattatgcaagtctttcaagaatttcaccagaatgcattgtgaattcactaacaagacttataccaattccagcaaggttagtgattttgacctattctattcgctaggattaaagtgctttgacaaagatgactttagaagttgaaggagcttcatgaaggaagacaaatcttagatatacttttgatgactaatgatttagttgtatattttgccctgagccaacaattgacttcaaaaaatctacgacattgttgaatgtttttcattgattttgctcaagaaaggaaaggcttcaacttaaaatgaagatcttagatcagggggatgaggttttgagcctcttagttatgattttaatgggagatcaaggcggaggttcaaaggggatagatggttgaggcgaggacactcgatacaatcgttatcacccttcttgtgtatgttggtggttgatgccttgggttgattggtggataaagctaattcacttaattaggtttaacattgttatagattgaaatttctcatctctagtttgttgattacatgttttcttctctaagaagaatacaactaatttgtctcgtcgtctcattcttagtttgaacactctagcaagtggtatggggtgtaagctatggggcctgggttagtgtcttgtcctattagggcaagtttttgggatgttgggaggatgattaaccttactttatttttgttttgcaagctctcaacttacttcatttttttagcattcttaaaaaggtgggagattgagggacatgaaaattttcctttggaaaggtagcggttataaatgtggatcgcttaatcaattttgaagatgtttgatcgaaggagataggatggtagttgggaacattttaaagcaggaataagggttttgctatgaaatgactctgaggatttcccttagaatttgattccctttggcgtgagatcatcattaagagcaagaacgcagtgcactccgttggatgggtcgcaagagccacttttagaatccattggaagtttattgcttcgatttaaagaaattccacatttttgtttcctataggactagcaatggagaaagagttaacttttaagaagacacgtaagagatgattgtctagcaactagattcatactcctttttaggctaacctacacttttaacgctaacatagcttatctacaagggtaattgagatttttgaaaagtgtagtgctcttgctaaattttcatttctttagaaagataatcgatttagatttgattatgtttcttcaattgtactcctttagacatgctatcagggattgtagaatgtggaggatagatgattacaaatttttacttctaccagtttctttttatttggaaagcagttgctctgtattagatttaaggctttcaattgatttttgttgttggaaaagtaaaatgcttgtgataaccttcaaaaaagactcctattttatgctttccccatattggtgcattcttggtatgacgaggatcatctcttcctttattgtttgatgtcgcattccctttagtttatgctattgaaagcttttggaattcattgggtttggcctcatcgttgtcttgatattttgttgttgtgtggatgtttagggtctcggtccatcataagagagaaacttcggaatgtcgctatacaagcattttgttgggcactttggttagaaaacaaaaccaatttggatgtttcatctttgggagaaacttaaactttctatatctatttgtattttttaaaattatgaatttcatagatttatcctttttttcttacttagagatcgtaatgatttttgttggtttgtaaatctagaatgtctaaaggtgatccataaggggatagtttcttttacaatatagttgtaaatacataagggtgggaaattagaccatgtgacacattatcattattgatgacaaccatggccattgtaaaagttggtcttatcattatgcctagggatggagcaaagagttcatatcttggagttattgtatggtcgcttcgtgcctgtagaaaatagtgacttgaattgtgtgttgatttcatagaataatacatatttatataca

SEQ ID NO: 113432 - DNA, 2385 bp, Cannabis sativa
  modified_base (1967)..(1969): a, c, t, g, unknown or other
agagagagagagagagagacaaacttaattcttgagagtccttattgaagtctcaattcatcaagaatttctaggtaccatttattttgagaacaaatttagttgtaatatacctgttgaagtttcttaattatgagtggaaaccaaccatttgtggcaattgcaaaggagttgggcatgctactaatgattgtcgtaggaaagaagggaggaaacaagaatgagtggtcaaaatgaaagcgaaaaaccagaggtgcatgaaactagaacaaaccaagcctgctctaggagaaatccaaccagttactaaagggtggagggtttaagccaaagaaccactggtctaccttgccattgttaattcttttcaagctttaactactattcggactggagagaatcagattgaagccacattttaagaggagttcctacaagagaaggaaatggacaatacaggaggggcgtcctctttccaatggataagatcataagatggatcgtccgagagatcaatggctaacaaaaacaaaatatagtaagcaatttattattcgttagaaagttggtcttgttggtcttctttggagctttatatatggacatgtgctccgggtggtgcattacatcaaatttaatgtggcacaaaggtgggagaatcatagtagtttagaatccgttacattttaatgtaaatattttgagctgctcaagccaacttatacacttatttgttgcaactgttgacaataagcatagtttttatgttacctttatttatggctttaatgatgaagattgaaggaagaatttatggaaaagtttacaagatcttgcaagtggtgatccttggatcgtacttggagattttattgatattttaaacaaagatgaaaagaataggagacagagttaagcatagttcaatattatgggagcttcttcacttggagcaatgaacagtatgcttcagacaaaatttattccaagatcgatggagttttagcgaactattaatgatttatgttaaaagaaatttttgagtaagaattttaaattttttggtaattaataatatgtagtaaatattttccatttaaaataatttagaaaatttaatagtgtaccttatctgttttgacatttaaaataattttttagtcttttttttttcattagttgtagttatatcctactaaatttaacacgccgaagatggggttcatacagtctattacatacgtacgtgattattttattttatacgcgtctgaaatagactatttactttctatattatatattattctaaatttttaaaaattttataagatacctaaaataattaaaacatatagaacaatgcaaaaaaaaaaaataggattaaaattttttgttgattacgaaacagtctgagatgcaaactcgaccccaaactaaaacaagctaagcacgcgcatagaactcacccatgcagctatcttttcaataatttaatttcctcattaattgtgaaagtggcaagctcttcgatccaaaaacctatatatccccacacctaaaaaagaaatttcatatgtaataatagcacaaaaaaggaaaaataaatatattagaaggggggaaaacataatttgaaaagaaattaaaagaaaatataaaaaacttaacttttttttagttttgacaaaaaaaaaaataacaatattacaaaaatatactttagctggccaaataaacaaatatacaacccaaataaaaaaaattacaccaataccacttacacacacctttaacccaggatccatgctttctgggcaactatcatccaaccatcgtgcaactacgcagcaacccaagacaaacgaaataaaaattcaaccagaaagagaaccaccattaattctggcgaattcacctgagaagacaaccagaatcaatcaaaataagggttgtttcgaattcannnaaaaaagtgtagaaaaactactatacgaaaccaaaattcaactggaaatccattttaatttgcataaaactaatgtctagactccaatttttagatctatgaaaggcatatctcaaaaagttgaattggagttcccaaataatctaactcaagtataataaaaaaaataacatcaatactatagtaaaatatttatcttggtgtatttttgttgttttctaaatatctaatggtgaatttgttcatattaaatcataaacagacatgtagaaagagttacgtacgtgaaaacaatgttctgatttttaatgtatcacaacagttgcattatagctgcacaaatattttgctaacagttattttgtctgattgaaaccttcgtctgatgcaaccttcggccaaccacccagaaactt

SEQ ID NO: 113433 - DNA, 3071 bp, Cannabis sativa
taaattatatcattataataatacaatgagcaacaacactaaccaaataagatgatattaattattacttgagcaaaatcacaatataattgctttcaaggcataactcacattacacatactctttatctctttatagaaagactgattaaaagcacttaacttaaatttgaatcatctaattcaggtagaattttgagcgataaagcctttgataatagacatcaaatgatttgagggttgtgaattaggattaatagtgaagaaaccatgttgttgtccttcaaattctacatactcaatctttttgccccaattttggagcttcattgcatagtctttagcacggtcttggagtaggtcacttcccccaaccacaaccaaaataggatcaagttccactttctcaaggctgctactaaatggcccaaatggatttacaagtggatggtctgtggtttctccaattggtatagataacctccaaaacctatcaaatttccactttaaatcattttttcttgaatagataaataaatatatacatatatatataaaaacaattattttaatcatacctttgtgtacttgaacatttcagtcatgccaatataataaagattaattatattccctcacacttatttatcacaatttcctttttctttatagtaattagtatcatggtccaatttcatttttactctacaatggaataatgtctttataattttatttattaattatatataaaaccaatattttaagggttaatattattttcgccctatagtttctctactacataattaactcccattttatgtcaaacaaatgtaaattggaactctaaaggtgattatagtaaaaatatctttaaagctaattagaatttttgcttcccgaattttgacatgtatctagtaatattccatgaacttttaagatcgttaaaaatcatcttctgaattattgagattattgaatttaagaactttcaattttagtaaagaaagtctaacatggatgaaatttcagaaaatgtaatttagtacatgtcaaagtttgagaagcataatttgatagatatcaaagtctcgaaaacattatttagtacataaataatcattgaattagtaaaattaaatgcaatcaaaaaatccaacaatttcaataattcaaaaaaaaaaattaacggtcattaaaattcaagtagcataatttagtatattttaaaatttaaggggcaaaaatcttaattataattttttttaaattttaataagtctccattgttatattaattactaaaattgtaaatttccatgttatattaaaaactaaaatatatcttatgttatttttattctttttaaagctccaaatttgtatttatgtgaaaaactagagtatagtagtctttttataaaaacaagtccaattttctttctagaaatttacaaaagaacacttttataaaacataagaaaagatcaaacaactctaaatcatagaaggaaaataagagaattaccaacctatcaattaagtccaaattgagaaaagcatctttaggaccctcagcctccgatttacatctcacagttcccccaaaaaacggggccaaaagaacatagccctttactctaactcggcccaactcggccgattccttaccgagtcgaatcgccaagtgatgaccaatgtttccaccagccgagtccccacaaataaacacgttcccaaaatccgccacgtcacacatccacttatccggctcatccaccgactcggcttcgccttggagccacttcacagccgtgtacccgtcctcaatagccgccggaagcctattttccggcgcaagccgatagtccggcgcaacgatcacggcttggagatcagaagccagacgtaagcagtagttttggcagttcggccaagtacgcgagccgatgcagaagccgccaccgtgaatgtagaagaaaactggaagcttagagccggattgagccgcggctggcttgtagagccgaagggagagatggttgaccttgtcgaaaacgacatctttccatataacggagccgtcgtcgtttatagggacgttgaagcttggcttggaggagcggacgatggagccgtcgctgtaaacgcggaggactccacgacattcgtctacttcgtacggttcgtggtgagatgaggaggagtcgttggtgctgtgaaacgacatgtcgtttgcagtgaatatggatttttgaagtagtgaagagaattaaattttgttgatttttaaaggaaaaattagcaaagacaaggattactagagcaagtagtattttggtgtttgttatttggcacctggtttttgttgccttattatttgtgaagacagtgtaaactttaatgtctaatttgttaggtagatcaatttacaataaatgttaaaagatattagtggtgtctagcactctcttatgcacgtaatatttctatttatttaactaaatatcagatcgtatataatttaatataataattttaaagagtatgattaactaatcgcaaggccatacatttaaaaagtacaatattagacactactagtatctaataggccatacatctaaaaaatacaatattagacactactagtatctaataattatgctcatcatttatttacattattggtttatataattttgcatgcttaaatattggttttgtattaagggctcatcccaaaagttgttgagtggttttgttttatattttaacagcacacacaatgtttattaaatttatttatatattaatttggtcattaatttgtttctatttgatattaaaattaatattatacattccaagccggccggcacaggtgaaagtgaaatgcttttctgaaagctaatgggaaatgtaacattgggcattaagcatgttttttcaccaatgagtgagtttaatgtttaaacacaatacgtaataaaatgatacttcccaaacaaacaacacgaaatatatatagagaagagaaataaataaataataataattaaaaa

SEQ ID NO: 113434 - DNA, 1926 bp, Cannabis sativa
acaccaatttggtgttagactttttttttttttttttttttttgcattctaacccttattttaatttatttttaaaaataatcttacagtttagtcttcaaataaaaatttatcaaaaaaataataattattgatttaattaaaatactaacattttggaaaatataaaatagcaataacaaagatattaatattaattaaaataaaacaacataacactaagttacaaaactaaaaagaacaacataaatgaaaataaacattatgtaaaaaaaataatttaatatgatcgcttaaggatcttagccttgaagaatatcaaaatattggctatatggacttaatgtattttgagaaatttaatattcttgagatgcctgatattgttggtgagctcttttttgtataattcttgtttgctcattttgaaaatgatcgcgtatattaggatcaactatagaatttaaatctttcaataagattttgttctcttcttgttattcgtttaaatccaatctttgcttttgaattttataattttgttctctagtggagttgctccaaccaaatattttaatgagttgttgatttcttctttaatagttttgacaatagtagattattgttcattatttttcctttttaattttactttcttcaccccaatggatcgtttagatgaactacctccatcatcatcattatcatttattatgtctactgaatacgataaatatctatgagatgcagtttgggccttggggagacttggactccactaggtcaatatttttttgtaacattgatgttatctgtaaatttttctatatccttaggtatatctcaaacatgatcaaatttaaaacctttcttgtaatttttatcttgctagtagaattttggttcgattcaacaataaaaatcataaaatataacgttaaaaataacaacattaataataattaaaatgttacaaatgcttacgatattctattgagatacactatttgaatttaatccttcaatttgtcttatgcatctcctgaatttagaaataactttaaagatcaataatattcgagcatgcaacgattttttgtttctatcttgagtgacatacaaaggtttggaattattgaaatcattcgcaattcgagaccaaaattagtcactatattggtttttacttattataggatttttagaaatatcaacataaatataacagatgcatatcatcttcgtttgtgtatgaagaatttctttaagtacaatgagtagctattgttttgtgagagaacataaaagaaatgaattatagcttgaattgacaatatgtagaagaaaaatgatgtgacaaggatgtagtgacactgagatgcaacatataatttatagattttattacatgttcacataatgactttgtcagtacatacaaaacaaaataatcctgatcgcttgctataatattgtaataaatatattcaaataaacaaattaagttataacaaatagtgatttgttattgattacgttattcaagtgattggataagataaatccttaattattagaatattaaactaatgaattaaaaataagataatcgttaattaaccatgataatttactatcatttttataatataaacatcacacgtgcgagcagttcaaagaagaaattgtctgaagcacatgcgcgcgcggatcaccttgtctgagtgttatacgtgcatggtgctcgacctgcgacactcaatggaccctggttttcaaacttcaataacttattcgtttttcattggaatcgagttccttacaaaacgaaaattacttatttttcacaaggaatctaaataaattattttcaaaacgaaaataaaattattttcatggaaattttttgtaaatcacatacattca

SEQ ID NO: 113435 - DNA, 2503 bp, Cannabis sativa
  modified_base (2436)..(2466): a, c, t, g, unknown or other
gattataaaataatatacatatatttaatcaataatacagtagtaatccagttagtatttaacggtaatatctaactaaaattttaaatttgcaaagacaagtaaacttaaaggagttttaccaccaaaaaaagataaggagattaagtgtataaaaattaaaatataagggggttttcctacaaaaataaaataaaagagttaagtgtataaaaattataacataaaggggtttcaccgcaaattgctttttttttttatatatatattttaaatcagtttagatctaaattaaatatattttatatatcaataaatatattaaaatttgttaaagtaaaaaaaaatatattaattgttataaaaataagaggaattactgcatatattactttttaaactttgtttttctgtttttttacgatttttttaatttttttatttttacgatttgagttgtttcattaatttgcgatttaaattgcttcaaagactacggtgtggattgcgatttagataactttgtgggttgcacagttttgtaaaaatacaaaaaataataaaatttataaatgataaaacccctaaaaataattataaaaaaataattataaaaagagataaaaaaaaaatctccatttgttttgaaactactaactaatcaccaatttattttttctaagactaaaaatttataaatatcaatacaaccaattatgtttctaaaattattttttaaattaaaatttttatattgacatatttgataaaataaataaaaataattataaaaatatttttgaaattgattatgtgattttcgaaattgattttatgaatttttgaacttaatatttctatgtttggtgtgaaaaatatttttgtgaattaaattgtgctcattgttaaaataaatgtatagttttcttatatataataatattatcttcactttttgtttataagaaaagtattaaaatttattttatttctttaatttgatttttctattaataaatcgtggattaatgtatactttgtttctttattatttaaggaaactttgctgaaaatttgtctaagttcggtaaatctgtttgaacagattcttacttttagcccaacaagctcttagtattttattattgtattatttctatattatttatttgtaaaaattgtgcaggttgaacacacttagatatcgttcatcatgctttgggagaagactcgtttgagttaatttttgaaagaaagagtgcaagtgttatgatttgaaaagagttcaatatcttagcacttcaaaaatttgattaggagtttagatcgtaacagttgcgacaaattcaaagagagagtctttatttgtataagtcaattagattttgtaagcactatgagattcttctaataaatttcattctttgagcatggccccgtagactagtagtaattttaaaagataattgataccacgtataattttgtgtgttctttttttatgttcatttttactctttgttagttatatatttaaacatatctaaatagttcttatgcctgtttaaacatctctataacagtgagtaattaattaatttaaataattaattcagtaatcataaaaataaaatttcattttggtatcagagtgtgtctatcgaaatctttagaaaccgatttaataataaactaagctaaggaaatatgttcaagagatgaataagaacgttaatgaatcttagtccatatgagtcaatattactgaacttaaaaaactatggaatatgtttacacaatagtccataagtcaatatttacctcgtgcaagtgaatcgaacacctcttgaatcaaaaagatgcagcaaagtcatctataggtcgaacgagtcatcgccaagttatgacccgtatactgttagtcaaatagggtttcaatgtagtggggattaacttgacttttctaataaaaatgtaaatttgtaaatgcggttttttttttattcaaataagctacgtgtgtaattgtatttaattcttaaagaatcaaaatgttgagtaaagttttttgggtaacttcaagcattgattaaagcttgtagagttgatcttgaggtaactttaattatttctctagtaagttaaacactgccaaattacaaatttctagataagtgaacgagtgcttaacatagaacaactccccaagactcattatcaataaaaaccaacggtatttagtatgacaagtgacctatgaagatacttctttgatcactcgggagcatacacatcatagtatgtttatagggacatttaaaaaaaaattgcacacctaagtagtactttatggtttgaagtaatattaagaaatgttgacgttactccaatgattgaatttcttaatgttgggaatattttaccaagatctagatnnnnnnnnnnnnnnnnnnnnnnnnnnnnnnnatatgaatatctctaaaataatgacattaaacacata

SEQ ID NO: 113436 - DNA, 4267 bp, Cannabis sativa
tttttgggattttgaaaaaaaaggtatagtttttttagagtttaggtttttggtttaataataaatttttttaattatttaagtatataaaatcaaaattccctatgaaaattagactttcaaactctctcaagtttctttagataaaatttgaatgagtgaaaaactcaaatattaaaattttatatttataggaaaattattctatcaatatttacgccatattaattattaaaatatttagtaaatcaatttaaccatataattgtgatcaaatgcaataactcattttattacaatttatgccatatatatatagaaaatattcttataataattgcctcaatttaaggaatgcatgctagaattggtacaactttggtgaaattctactcactactatatataagttttagagaatttttttttataatgtaattgttttcaattaataatggctcatttcacccaattgcctcattttaagaaatactctctaacaccactatatataattttgaagatttttataagcgataatgtaattctttgtgacagaagtttatatataagcagatgccaataaaatttgaagtaattgtaaagaacaatatagcgacgagtattacaaataattatcagaccaatatatagatatataaattcatataaccaattataaataataattattcaccgaaaaaagaactgacaaatgttagctatgtattaatatatggataagcactacaatttcaattgcgctaaattacaaatcttacttgattatattattgattcaataacacactagtctccaaatcagtttgggacagacttatcaattaagaaaaagatgatatatatatacgaatcatcgatcattacaaaacccaaatgtaccgaaatgcctcaagctgcagatggagctgttacatacttaaccctaccggcagctttggagagagcatcaatgaagggctgcatattcaccgcctcggcttggacacctcccacggcggatccaatcggtttcttatagtctagggactcatcgttgtaaatgtcccaccatttctttatcaacatcttaatatcatctctctgcatattctcctcttttcctgtgtacctccatggctttgatccctgataacaacatttatttcatttttatttaactaacccaaccaatatattgttgtatatatatatatttattggaaacctagctagctattattatatatatacttaccgttgcacagtagtgcaccactttgaccttgtcaagctcaacattctccggatgacgccataacatagccaatacaagattgtaaacaagtggaataggcttataaatgtctttaaagtacatgttcaaaaagtcctgcatacacaaatcaaataattattaagctataataacaactacatatacacatatatagacaaagcgtatcaatattataaagttatatattgcatacattacatacctgttcagcaaatgaggttggagttgtgactttcaaagttcttaagagatcatgataagtagagagatttggctcaaagacaaacatgccagcgttgaagtaaagggccggaggtggacccaactcggctgtgggccacttcactctctcagggcattgctggcagtagcctaccttatactgaggagtgtgagaccatgtcttctcgcaaaaacagtccataacagcgtagaaattcccctcggccaaatcgaagaggtggtctatgttgtcgtatacctgaatatctccatccaagtatatcatcttactatactctacgaactgtacaaaaaaaattaaaaagggtaatttcgtcaattcatgtctacatgcaaactataagactgccacgtaatcaaacgacgtaagtagtaactacctactacgtacctcccatatacggagcttggagtagttgatgacgtaatatgccatggcgaattgggtctggttctcgggtgggtaaacgggttcgatctctcggactatacacccttgtgattctagaatccgacggtgatcctccggtacgtcgggtagtacggccaccactaaagggtacgccgatttaaccttccttaaccctttcgctaaaccaacaacgcctttcacgtagtcaccgttacccgctaagaaagtcacgtatgcccgtctgggtagggttgcgggtttggtaaacggagcggttttaaccgaggttgggacaagttccggtggagccatgttttaaggcgaaggagagcttttttcttggagagattaaacgagcgagaacgagcactagagagagagagagagctttaaagtgctttgtaagtgtttgtgaaatggtttttggttggggaattatgagaagtggcgaggtgcttaaataagcaggagaatgaaaatggattacgagaaaaagtgatcaaccacttgtgaaggatcttggcctctttgtcctacacgtgtcatgatgagtaatccaacggtgtatgagaaggttctatgaagattctggaattggtctatgttaatttaattcattttagtttggagtagaagacactagaaccatatagtttatgtattataacactgatcttgaatattcatgcccaaccgagttaaggtaggacttctctatggttcggtatagcttagctatgatattcctaaagtatttatattaatttatactttttatatttcctccaaaaaagaaaaatactactttttaattatgtatatttttttattagacattttgttagtaaagcccaaagatcaaggcccaatattaattgacccaaaactaatggaccaaaatactacttcttttgaacttcttgttttattcgtgtgtagctatgtctcagaaggtgttgcgtgctttaaagaagaggtcgggcgatgcctctagtcagatatcttcatccaaacggtcaaaggtcgatgaagttccgcccaataaggacatagtccttaaaacccaccagcctgcaggaagaactcaaagtcataggaggtaacttgctaaaaagaaaacgtaaagtctaaacatgtagttaaaatcctaaaggctcgggctgttggaatcagaacctcaaggatttggaagtaagcttacttagcaaaatttaggaggtatacactaaatactacatgaatttaaagataaaagtgtgcaaatattcaaagcgaattacatacatagaagtcccgttgcaagggcataaaaattttctttgcatttgcaaaaagagggacctttgtcccccaaagaaaaccaaaaagaaaaaatattattagtttgataaaaaaaatcaaggcaaagatggatcagtcggtggttgggtaaaatctggctggctgtcgttaggggcctccagagctgaagagtcaaccaaaggaggagcatcagcaattggaagggttgaatcttccaagttctcgccttccaagaggtcagttctagagcaactccccagatgctctagttgcctttgtgacttcttatgcttcatctagcttgaggatttgaggcataatctgttctttgtcatcatcatcatccaggaactccattatagacttattgagtttccaaagtgtaatggagagaacatgaaatcctgcttcaatctacaacatcttaacctcatgatcatacttctcctgagccctttattggttttggttctccaactccgaagctttattcttggatttctcaaaggcttccttagtagtacttaatttgacttcaacatcctccatctttttcagaacatctttctctgtttgctccacaatctgttgtaattccaaatagtgttttatctgtttctcaagagtggcagtagagacgatcttgttgttcaaagtgagagtatcattgttatactcctgggataaagaattgtacttaattatactccaaccaagtctttaaggtcctctttggcttttttcaagttctactctaaatcgctgatccgagattgagcctgagtatagaactcattatatttgtcttcatgctctctcaaccttattttcctttttctcatgagcaatgaccttgtccaaagactccttcaccctttgtttgatgacaacttcaatcttggcattaacttcgattggagctttagcgtgttaggctatttttagcctatgtttttggatctaatttatgtgcgtttttagctgtattgggacggaattacgcttgtttt

SEQ ID NO: 113437 - DNA, 1084 bp, Cannabis sativa
  modified_base (991)..(992): a, c, t, g, unknown or other
tatatgggacctaatacttagttggaccaatagcgatattgacacataggagaatgctaggcaccactggtgtcctttagcatttctctaataaatacttggtaaaactaacatataataaataatacacgttttttatttaaaaataatagaaaaaatttatatggtgttttggtagaacttcttatttgtttcggcatcgaacaactctttttaatgtatgaccacctgtaaattttttagaaaatcctaaatagtttaccgtgcagaaaaaaatattcaaatattttgttacacgcatgactgttttttttatacttatggtaagcaatttaaaccttatctaccgtgtcgaaaataagattcaaaaatatttttgttacttggcatattgttttgtattctcgatttgaaactacaacacattaccccctttatctctcgatctcatacttgaacccaccccctctatttctcaatctcattcccaacccctaaaccgaagccatgaggcactcgctaccaaatcacaccccctctaggcacataatcaatcccaacccctaaatcgaagcccgagacacgaagttggttgtctcatttccgccattgcttggataagcctccacgagatttttgcttttttttttttttttggttctttgatttgcaatttaggggtttggtttttgtgatattgtttaatattacgcattacattatttttttctcttttttttcgtttcttaatgaaattaggctttctttttcttttatttttaattgttttaaactcgataggcttgatgaaatttcgatgataactcaatacaagattgataggctcgacggggttcatttttgttgaatgtatttggttgaggatgagctcaataagttatcgatgtgggtgttaaactcgaggaaaaaatctcattgatcaaatcctatcaagttatttgttgagcgctgtgacagtcagtagtcccgnnatccgtaaggggaaataccgagtaagctgtgcaatcccacatcgcctggggaaggtcaagtaggatgattatgagactgtgtaggtatggga

SEQ ID NO: 113438 - DNA, 2146 bp, Cannabis sativa
  modified_base (45)..(58): a, c, t, g, unknown or other
tgttatttctgatctttataaataagtaaatctaattatattgannnnnnnnnnnnnnagggcacaaaacccaacaactatacccttgagggagactcataaacacatcctcatgcaaatctccatgaaggaaagtattattgacatctaattgatgtaaaaaccaacctttaatagttgctaaggcaagaataagcttcactgaaaccaactttgcaacaggggcaaaggtttcattgtattcaatgccttcttgttggttgtatcctttagccacaagtctggccttaaacctctcaactgaaccttcagcattcaacttaatcttgtagacccatttgcagcctatggcatgttgatcatcgggtaaaataacaacaatctaagtgtcattaacttcaagagcttcaatttcagtatccatgacattgtcccaaacaggtataccttgagcttgatgataaaattctggtttatagtggcttgaaatagctagcacagttgctcaaaattgtggtgataacttgttgtaatcaatgatctcagagataggatgagaattagacaacttagacacatgagattgaacactgttagtagagagaaaacagtgataatcttgaagaaaggttggtttttgagtgtgtctaataggcttattgtaacatattgttcaggcatatcaacaatatcaagattaggaacatatgactgagtttcagtagaagaacatggggattctgcaagaaatttattagaaacattagctggaaagaaattaaggaacggaaccagtcaaaacaaaaggaaaattttgttcatggaaaatgacatctctagaacaagaaactttgttggtatttagatcaagcaacgtataagctttcattccaataggataacccaagaaaacacaaacaatggcctagttgagaattttgatcttgcaactcctagtgtagaagcataagctaggcacccaaaaggttttaaatggtcataactaggtgctttagatttgaggattttaaaaggggatatgtgctttaggttaggagtgggtgtcttattaataagataggccaatgtgcttatgcattccccccagtaaggtaaaggtatatgagattaacaaaacggctctagtaacatttaataaaaaaaaaattgatgctttctttcaacaacagaattctattgaggcctttgcacacaagaatggtaatgaacaatacataggaaggaaaataactctggaaattgaagttttttggcattgtttgatctaattcccttaatttgaatattgtaccaggttttgattagctgtatgaaggcatgcatagctgtttaagcatcaaatttttttctttatgagatgaatccctatatacctagaataatcataaacaatggtgataaaatatctaaaaccttcaatagtttgagtattgtatggtccccaaatatcattatgaataagatcaaaataaaatttagaaatattgtgattggaaacagaaggcaattttttttattttgcaaaatggcaaatggaacaatggaaattagtactaagagaaattgaaattgcagattttcattgagaaaatgattccttacacaagaagtattgccaagtctataatgccacaaagtatcatcattgatttttgaatcagaaatatagtaaataataggaaaatcattctcaatcaggtagtaaagatttccaatcctttcacccatcctaatcacttgattctttgtagtatcctgaatgacacatttattaggaagaaaaagaaatgagtaatttgttaaatcagataaagcacaagttgagatcaaactatgtttaaactcatgaacacaaaggaaattttcaagaattatattgaataatttgaaagttccaatgaaagaaattttgatgttagttccatttggtaacctaacatgtgttgattttgtgtccttttgagtagaagaaaactaggtacaattagaacacacatggtgaatattaccagtgtcaatgatccaactagatttagggatgagattggcaataccagatatgtaaagaccgcttagtttagtttggaaattagcagttaattatgtttaattatgaaaattattt

SEQ ID NO: 113439 - DNA, 4543 bp, Cannabis sativa
tctaatttagtggtattcagttcaattccctgtggttcgacctcactcgtgtgagtttactacttgattacgtgcacttgtgtattgttcataattttcgtaacacctcctcacgacccaagaaaatggagtccaagctggtctagtaatacttaagggagaaactctgccagaaggccatagccaaaaagtgctcgcagacagtagactccctttgggaggagaagaaggcgaagtcagccaccactgatctgcgggaaaagtttactaggagaatgaaagagttagacaaagagatggaagccctatgatggagaatatcctcaactgcatctgaagataattgggaagaggacgactttgacgaggagtcccctttcttaagggagattcaagcggagcccttgcccataaatttcaaataacctaatatggtcccgtatgaatgtttgacaaacctaaaataccacctggacgccttcaacgagataacgtaaatgaagagggtcacaagcaaagcgaggtgctagtgttttgcggtgatgctcaagggggcagcatacaagtggttcaaaaggttggcgcccagatccatcacgtcttggaagtaattcattgatgaattcttggcccaacactatgcgtcctaggaatatactatccctagaatgagcctggaaaatatcaagcaaggagagactgagagccttaagagctacatccagtgcttcaatgctgaagcagccagggtaggaaggctgacaaaagatgagcacaagatggacatcgcggcaggcatccgtccaaagagtaagttgtgtaacaacaaggttaaaagaaaaaaattggaggacctagaagatttacacgaaagggccaaaaaatacatccaggtcgaagatgggcacgaaaatctcaccaagggaaagagcgagcctggggtcagccaaccctcgcgcgcatgaagagtcacgaaggaagagggagtttgatagaggcaaaaattactgaaataagagagttagaagggaagaggagccccgacgtagggagttcacgtattacactgggctcacatgctcaagagaacacatctttatggcaaatgaacactgggtgtcgttcaagaagccgcctccaaggagaaaagataggtccaagagagaacccaataagttctgaaaatttcacaaggatattgggcacaccacggaagagtgtacccacctcagaatggaaattgaggacctgatccaaaggggttactttgggggctactggagagaagaaagacgtcccaaggtgagagggcgggaggagaaaaggcgagaacacccctacaaggcccttgaggtgataagagatgtcagaactatcaacgaaggacctagaataaaaggagacactcggaagggaagagataggcatgccagggaggccaaacaaccacctatgatgatgaacctggaacaaagaccgcctaagaattcaaaagaggagaggtactctataacgttcaccgaagaagatgcatgaggagttcactttccccacaatgactgcttgtgtttcctgtccaactggctaatgctagggtccatcgagtactcatagacaatagaagttcggttgacctactctaccggagcgccctagaataaatggggttgggcatgaaggatttgaagccatgtgcaacacccatatatgagttcataggggactcagtccatccctcaggaatgattgagcttcccctcaccatgggagagcagcctaaacaggtgactgtgatggccacgttcattatggtggaaagtctgatagcttttaacgcggtgcttgggagaccctcgttctacaacttgaagggaattgtgtccacttatcacctacctatgaagttcccaactcccagggagtcacgatcgtaaggggggagtagaaggaggtaagagagtgctacaatacttcccttagaatggccacgaaaccctgcgagtccatggccatggttggttgcgaaaaggaggcagaccaaaaaagaatcagggtagacctggacccaagggtgaaggaggaggaagttcatgttgaacccatcgaagaaactaaagaaggggtgatatccgagcatcctttgaaagtgcttaagattgggaaagaactttacgaggacctcaaacgcgagctaaagtaataccttgtagggatggcagttgtcttcgcttggggacacaaagatatagtggggataagtcccacagtgatgtctcaccacctaaacatagacccgctggcgagactagtaagagagaagaggtgggcccttaactcggtgcgatatgtggcgttgaaagaggaagtggacaaactcgaatgcaccgcttcatatgggaagccttctacccagtgttggtgtctgaccctgtcctggtccccaagccaaatgggaaatggagggtttgtgtggacttcactaacttgaataaagcatgcccaaaagatagcttcccactcccccgcatagaccaaacggtggatgcaacggccaagaacgaagtgctatgcttcatggatgcatactcgggctataatcagatccccatgaacccagcagatgaggaacacacatccttcataacggatagggaactctatttctatcgagttatgccatttggtgtcaagaatgccggggccacatatgagatatttttcaacaaaatctttgccagccagatcgggtgcaatatggaagtgtacgtggatgacatgttggtgaagtcaaaaaaggcaggggacttgattaaagacctagatgaaacattcaccaccttgaagaagtatcaaatgaagctcaatcccgctgtgtctttgggtctcatcgggaaagttcttaggcttcatggttaatgaaaggggaatagaggccaacccagaaaagatacaggccctaatagacatggagtcaccaaagaaccgcaaggaagtgcaatgtctaacggggagggtagcagcactcaaccggtttatctcgaccgacaagtgtttaccgttctttaacatactcaaaggaaacaagcaattcatctggggagaggaatgtgaagaagctttccataagctcaaagaacacctgggaaagccaccactgctaggaaaaccagaaaaaaggagaactattgttccttgggtaagagtgtgagagttgaaacactttgagaaaactcattagagaatcaatctcgattgtattgtacctattcttggtcaatgaataaagaggattttggtggtgttccagaactggagtagagcgatagatcacatagatctattgaacttgaaccagtatatatcttggtgttatttttatcattttacagctttaattagtttctggttattcatactctgttcatccctatttttttttcttttgattattgttcgtgatttgtgaatcctgtcagtgctaattctttgattgtttaatgtttagttgatttgattctacacttgtaattttcccacaaatcagagcttggtaatcgatcaagaacacagaatcaagattctttacgctgcaattcttgaaaaaaatttagtgtcattaatggcgagatttgaattggagacattcgatataataggagactttgcgctatggaaagaaagttagaaaataatcctagtgcactagaaggtatccaaagttcttggagatgagaaaattttggccgagaaaaaactagaggaaaaagcagaattggaggagatagcgtactatacaatcatcgtgtatctgtccaacagtgtttgaaaaaaacacatcgcagagaagattacgaaaggagtttagaacaagttggaagaactaaaagccatcaattgctagcaagattaatttgctagaaatggttttagaatgattttttccctttctttagatgataatattgataaatttaatgagattattataggtttggctaatataaatcacaaggttgatgaagaaagcaaggccatcatctagttgagattgcttccaatttaaaatcaagaagtcaaggcaaccatcaagaataggagagacgtgattgcattgaaggatgttcttgctgcacttaagtcaaaagatttcaaattacaattgaaaaagaaatccaagaaagaagaagtgtaactaacaagaggaaaatcacccaagaaagtaagttcgaagagtaaacaccatcactcttaatcaagatcaaagtctagagagaaggaaactcgaaagtgttacttttgtggaaggtctagacacttgcaaagattttgcaagaagtacagggagcaaaaaggcttcaacaaatctcacaatggagataggaaggaaaacatgcatcatcaccatgtgaaggattctgctgtaatcacaagggatagtgatgactgcttcacagatggagaattgttctctatctcagattcctcaatgaacagggagtggattcttaactccaaatgcacttattgttggaattattttacc

SEQ ID NO: 113440 - DNA, 8009 bp, Cannabis sativa
tggtcttatagttcaagatgttcgaaatttacttttggctttatcttttgttgatttgtgttttgtaaaacgatatgcaaataagttgactcattgcttagcaggagattcttgtttctctacaggtcatatgcttcagttgcaggactgttcctctgaagtgcgttctattattttgaacgaatttattaattaatagatcttatgatttttattccaaaaaaaaaaaaaaccaaacaaataaatcatgttcactgaactttgcaatgcttgcatagtacacatttttactgtaagcgtacaatgttattctaaaaaagttttaattataaaaaaattatcgaacccacaaagaataattattaaattttactaattactatactttttttggttttatactttaattagacaattagaagtaaataataattaagaaagaaattataaaataaccgaaaaataaacagacaaacaacaattttaatcagaagataaagacctaaagtattgatttctttattttaaactatgaatctcaatttaccaattatcccaatttattctgttatttctagtttcaagaaccataatataatctattaacttctctcaagcgatgatataattaacttaattaactaatatgatatatttattcaatattaattaatcaagcaataataaagcaatatgattctctttaaataaaattcatagaattagtggaatttctcaatcacaattttcctatgtcatacaattttaagtataattttagattacatctctcaaacgtaaaacctaaaatctctatactaattaatggtgatcaagcattaataagatgataattaacacaaaattacacaaacaaatagcaaaaaataaaaatatgggaataatataaaaacttttattcataatctaaaaaagttttattaacactctagaaagaatttttagttcataatgacaaacataataaccatgttaatcatgctcataattaaataactaaacaaaagaataaagaaaaagaataagaaaaggactctaatgatagttgatgatgattgctcggaatctcttctctcttgttctttagtgtgttttctaatctcaaagttgatttatgtttctctctaattgtctcgagatgaaatatatgaatctatttatagtcaaaaaaagatagaaaatatgatgtttttaaaattaggtttaaaataaaattatacaaacgactcaatggtgccatgcaatatttcccgaggttttgtttttgtgcaaaaatataatttttcccaaaattagcgctatagcgcctcacttatggagttatagcaccacaagccatttttcgtcattcttttactacttcgaccttacttagtacatcatgcataacttttacgtccggactctaaatgaaatgatttaacatattttagaaaactaggaatgagctctatcattttggatttcataagctcttaaaaatctcagtccatcacaaaattatcttttaagcacaaatctacacacttagacaaaacacatcaaatctatataaaactttaagacataaatactaaatcatataataaaagactaggaatgagtgtgcaaatgtgcactcatcattgcaccacaaccaaacagtttgtttcaagagatactgtaacaccctactagtttaggcgtgttattgtgatttcatactaactgtgtaatccgttgctaatcaacggatttgttggaaaacatgtttaactaaaactttacttttagttgaaaataaataacctttataaaaactgggatcctgttatttaaaagttacatccataatacaaaatattaattacaaaagttgtcccctagcgactaatcaaaatacaacctactgtcctaaagatcaaacactccatgtctgaccactttgatatgtacaatattcatctgctcgcactcactactgctcagccttagctttgcccttacctacacatgtgaacaataactgtgagtcgacagacttagtaagaaaagcgtaatcaaaacataaacttaatccagattacaattaggcacccatacgcccaatcataaccctatcccgcatcccacatgtattgagtctagaacattcgtataacagttctattgaccataatatcagcctatactcggtactctagtcgtatcgatgtgatatcgtcaatcaatacttaagccaaacatacattcatcagtatctaatatagctctatgtatattgataccgttatttcaatatgttatttaacatgcattcataaacatgcacactaaacatgtagtcatatatgcatatcattatactaattttacctcaatcctgaaattaggtgttctggtcaacctgagtagaactgcttgacggtttacaggcccctaagtcacaacattcataaagttgataagtgacacgctaaattactttttggggacttaaaatcataactaaaagtttccctattgttggataacatgaaaataccttaagtaccgctaaaacatgaaaaactaggattccaaaactgctagaactggtaaactgaattcccaaaacgaaaaaccagttcttagggttctgcctggggaaccgatttactggttctacagggcaagcttgatttggttgaccggttctctgaaggaaccctaaaaaacttcattaacaaaacaattctacctcaaattatttcaaaccttccagaatacctatacaagccataataaacttaactcaagcaatagaaacaactttaaacttcataaatcaattttaccatggaagaacagtccaaacacaacaacaagcaacaattcaagccaaaaccagctaaaataactttaaaccaaccccaaaaatcaaaaccaaactcaaatcatacatacaataacttaataaaattgtatattaaatatgtataaaagtaattatattatatatgtatagtgtacaatatatatgttcgatcggttctcagtttaatcagttgttttactattgacactaaaaccgacagtgcaaaggcaatttttaatgggagtcaatttttttgatttttagttttttcaatatttgttttttcggtgttcgaacgattaacgattaatgtattcgatttagtcaatttctttgattttttgctcaaccctactttttaattttcttattagagatggagttaccatgagatttttgctattcaattacaaaagaatttgaggtgtaaaacatcatcaatgttataattgagtgggaaaatactatttgtccataaaactagatagtagtagttatagagaggtttattgatttaaaagatagaagggtagtttgggtaatttaattaaagagaatcacgtggtacctatataaataactaaatatttagagagaaagtaagaaaaggagagccgacaaatactcacatccctaaattccgtaatatccctcccccaatcactgccttgctgtcccttcttcacaactggctccctctatctctttcctttttcctctcttcttttcttattctacttttctacctcattatttaataactactttgtagttttagaaaaattgaaataccactttcaattattttattacattttgaagaaaatcatgcaaaagagagatcattaatgtattgtaaatgttctatactttcaaatctcaaatcaaatgtgcatttctttctttctttgaatatgaatagggaataccatggagtatggtacaagctaatttgtatggaacattccctagctactaatgttttcttttacacaaaaataaaataaaattgtggcattacttttaggtattgttgccatattctgaattattaacacttttttatccttttcctcacaagatccaaaatccttctacatcccacatgctttaatcccattatttatttatttagttctattgtttagatactaatttggtgctttatttgattattaaacttgtgaacactatttagtctcaaaattacttgaacttaaatttaatattacttgaacaaatgttaagaactaaccctcaaaatttacacttggaacactaataaatgaatgttacatcaattttaatttttaaaaaaaggggaagaaaatggaaacatggtatatttagcttatttgaaaatgataccacattattctgaagagtgaccattttctttttccttacaaataatacagtatggtagattatataaatgtatatatgtatatatatgacatgagagagtatttttgggatttaatgccaaaacaatatggagatagaaatgaaaggatgtaaagttttagtgtcacatggtgctgttgtggttggtgatataattcatggctgttgtttggttattttcttggatttattcatttcattgtttttctttgttcctattggtcaaatttaactgcttaaaacacaccgactcaaaataaacatatgaaattaaattaaaaacaaaattttctttcatattgaaagaggagaggaaaaaaaaggaaaaacccaagaaaataatatcacattagaatagggtcagctaagtttgacaaaggaaaagaatagtttggtaagcatttaaagttcattattttgtgttttcgtctttgtgccaaagttacataaattttgttgctatctctaacctgtgggtagattctctgactttgatgtgcttaaatgaaagcataattagcataaaagtgaccttaagttcacccttcataattattattatgcaagaaaataagtgtattaattgatttttttgaaggatgcttgtcacgttactattctttgggtattaccacaagtgagattaacaaaattaccaattttttttattattttattgtaaatctttttttttttttaacttaatctttagtttagaaccagttttatttttttatgaacttatttttatattttgtctttcttgattacatataaagctccatcttagagttggattgcaaaaacatattattgttacatttaaaatttactatatcgtattttataatattagattaaattgtattttatgtaatattttttataaaactatgtgttattagtttttatgagcatataaatatataatattttagtaaatcttaaaatttaacataatattatataaaatatgatatatatatatatatatatatacacacacaatacttcctaccaaagaagttctaagactattaaaaaaagtcacctagactcaaacccttcaccttttaactccaaagatgctaccattaccccctaggccaccagtttggtgtgttagatttgaattgaatgttatgaatatgaaatgacttattttattgtccttgcccattgtaaggtcaaaattatattttttgtgaattgcacgaacaaattgtatgtcattgagattgagttaagttagagatcctaaacctaacttggatatctggttatggccatattgaaatgaagttagttaattttaaggttgaagaaccaaatcttcatgttataagctaaaagatcaatcaatataatattatatagatagtgttaggtcatgaattggaattgtgtgactaatatagtagacatgctaatccttttattttcaagtaaaataatagttaggacatgtggtgttctcctattaaagagaaaatatagatgaaatcaaattctcatgaccgtttcttttattcccaacaaaaaaaaaaaaattaaaaaagtttatgaattatcattatgctcactaaaaattgctacacccacatgatacttcaattatgcccaaaataaatattagttggacatattgattggcccatgaacaactttgtcaatatattgaatgagagagaaaaaaaataagtaaacgtaattagtcattgggaatattttattgaggtggagctaaatatagatttgtcttctttctctctaaggctgtagatttcaccatcaatctttagtgagtcacaaaggacatgtcaatatcatattggtgggagctatttaaagatatgtttcaaatcacctaaccttaattgaagattagtattaagaaaataaaagagattgccatgttggcaaaactatagtatgttaagagaatgatgaaattatttggtggaaaaatataggagaaaatgaggtatttgggtatataattacaatcttgaaattgtgtgtttgtgaaagaaagatttataataaaaaaagagaaaaaaaacaaaggatagaacatgggtgttgctttcatttctttagggataccttcaacaaaatgctcaattcacccaactctagcatccatgcaatggaggagggaccacaccaattagcaaatgctatgacctttttggtccctttttcatttattattatagaagagaaagaaaatgagagatagaaagaaagaaagagagatttggttgtttgttggttttattttttattttcactaacactcatctttttgccaactttttgaatcaaagcgatttggctttgtttaattagaaatgctatgcaactaagcttagtgtggttactgtgtctatttcacacccaatatcacctttgtacttaagaagaggccccattagtggaaaaaggaaacttctctctttctttctttatcttgaattcattttatttatatgtcatattcatttagaagattctttctgaatttgaatgaatctatactattatactgtagttaattttcttaaatagatggagagagaattggtttgtagagggctgagaacttattccactgtcattatttcattataataattcatacctaattaatgtcataatgataaatacataaaatccaatttctactagctattattattattttaccaatcattataatattacattttttgaagaactgtctagaatcttttcatgggtaatagagtcgtgtaatataagtaataataataagatactcacatatatataaatatgtgcataagcatgtttgtaaactatgtataaatctatcaataatgcatgatttgaatatatgatcatgcttgggagatacgtcattggagtaaacaaaaagaataggaaataatgttatgatagtgttttgtttttaactctactattaaaatagcattccctttaaaatcccaaatgattaattgaataattaactaagcaacactagattgcttataagaattacacttcatgtcactcattgcacaagattagtggatctgtagatgaatgtttgtattgaatattatcatttttttttaagttgaagtgttataataattcataatcttttaaagctttgcaacaattttgttgtaaagtattccattttactaattttgttacaaaattaacatacatttttaatttaaaattattatgaacagaaatcttaaatgtttattgcatatttaccaaggaataagacaccagtattatatactatttgtagaatgaaaatggaattaaaccgctttgtaaaattacactattttctaatattaaaaaaaaaaaaaatcattgcatgttcttgttctttctccaaatatttgattttgttctccaatttattcttttggtgcatccttgagagaaggtagaatcgaacaagcaaactaatacagcccaaaataaggcccaaaatgcacacaatatcacaaaggggttcacttacatctcggtcactaagccaagaggcccagtacttgtcaattaatatagaatagggataagttgaaaactacttttttttattacagttaattaaatataactctaaaataattttaattgataaataccctcttttataattaaagtatcaaatataacctcacaaaacttattaaaattagacttcctaatgcacataatgggaatataa

SEQ ID NO: 113441 - DNA, 3366 bp, Cannabis sativa
tggttcagtaggtggtggtgattttagaaatggtgggtggtggtttcggtggctgtaaatggtggtggtgataatttgtgactgaaagaagaagaaggaagaagaacaagaatgaaaactgaagaaaaaaaaaaagaaagaaaatgaaaaagaaaataacatgttgatgggtagcccaaccataactggactggggcaatcagatcgataaaacatttttccttaaagttctcgacttagtttggagtggggacagtgagaggagaccagttaatagcgagacaatgttattgtatcgtgttgaaaggaagaatggcaactcatcagactttttttgtcataactgaagaagatagcaatcgaaaggcagaagatttggatccaagagttcaagatgaacagatgccactcgagccagtggaagagcttaaggaaataattttagacctaaacaaccctacctaaagtgtacaaattaaaaagggactaggggaagaactaaaatagcaattaattgactttctaaatgcaaaccaagatcaatttttctgaaaccattcagacatggtcaggattgacccaaacattatttgacatcacctcaacatagaccctctctatctgtcaagaagacaaaggtgacgtcccttagatcccaagtggcaaaatgctttaaaggaagaggttgccaaattatttatcaataacttcatcagaaaggtgttttatccgatatgaatctgaaacccatttattatcccaaaataaaatggtacccatagaacttgtattgacttttccgacccaaataaggcatgtctaaaggactgtttcccacttcccaggatcgactagttagtggatgtaacaacggggcacgagctcatgactttcatcaagaaggctgattaaatggtcaattgagctatgacaatttgacataacatatcatccacgagcagccatcaacattcaagccttagctaattttttggtagaaggagtaaactttgacaagacaaacaaagaacacccaaactaaaaaatgtggaagctatttgtatacggatcctcaaatgacaataacttggggcaggtataataatggtttctcctaaaaaatttaggttccattatgctctgcgattttaattcccaacatcaaacaacgagacagagtacgaatcactattagcaggattaagaattgtcgaagttttaaaagctaaggcaattcactgtatcaacctcctgattaattatgaatcaagtgcttggaaaatactaagaaaatggaatcaaaatggcaaaatacttagagaaagtttggaagaacctagataagttagattattacaaaatcgagcagggatttcttccctcattctatcatctctatgaaggtcttggaacttgtcagtccatccgtatgccctttcgggcaagatttgttcatcattcggccagatgggaggtggccttatttgggaaatagtagggcccattgggtgtgaggttttcccacgatccctatggtattgattttccccctatacataagtaaacttcccatgaataggggtcccttatgagaggcagttcttcaacccgagatctagccctttcattgaaccgtctaataagttcattagcctccctattatgacggttcagctttgtctggtggtcttgtaggatcgtagcttattaatccatccattcttggaattctcatctctactatgtgaaagcatcgctcacagcagtgcgtgttttttcttattcatgctagaggatgtttgtatgatcctggacttgccctatgacccctcttagcctggccagctcaaaattatttcccaagtcaacatggggttcgttgacactaggttagccaaccccacacccagtttctttagcatatacctggggatagtccttattaaaagaacccccgtagtactttgttggatctttcccggtattgactgggccttttggtcagaaccgtgtagatggttttgcccgatgtggtcgggtagggttggccgaattatcaccaattttggagacacatacattgggatccacagccatcggatcttggggttcagtggacatgcttctccttattaggaccatggtgattaccaggtgaaaagagatgaaatcttcgtaaaaaaagttgaagttttcaatgaaagcacaaaaaatgttgactggaaaatagccaactaactcgaagtcaaataaacactaattaatcactaataaggagtagaataataaataaaaagacaaaacactaggatttataaaagtttgtcccttatatatgggtaatgacttacttcccttttatctgtattgattgtgagataatgtcgtgcagatcactaaggtagacagagtgaattatagctacaactctcaaagtgtttacaaataatatcttttagcaaagtgctcttagatacaagaatatgattttaggccccttccccttgtgaatttattcactatttataaggagaaggttgttataattaactctgtaaatagagtgatcaaagagtaaatatccttatactcttgagtatagttatgatatgttgaagcttttatattctcgagtagattagttggatcagagtttataggattcagttcgagatatttatggaagtttgttgaaaagaaatcaaggctcgtgtaatcttgctcgatattcttggcatcgtttcttctggccgacatattaactacccggccaggctcttctcaagacttatctttcttgtgggattactcctcttttctttggccggcatgttgatggcccggctagatacttcatggaagtcaatctgtggctcatggatgtcaaccccatatgggacctgcaaggcacacttctggccagagttccttgtcatgttaagagttggctggattataccacgtgtaggtaccacgtcaagtgtgaacactttgggataacactttgtatctctaattgacttatttttttattccatttatttttagttatacatctgttaagagggagttgactataggagaaactggaagttgagttcaagctcatgccttggatatcaaattctaccatgtgaaaaggaaaaaattatttatatgctagtaacaaaaagaatgtcctcgagaagtgtaaggtattggttaagcctataagggttgtgttcacgcttattattattatttaaattttattttggcatgtcactatttttgtttatatagaaatttaaataacatagcaccaagttcaatgttgctgaaatttattaaatactacgcaagtatacgcaatcaagtagtaaactc

SEQ ID NO: 113442 - DNA, 1515 bp, Cannabis sativa
catccacataattaatactatttataacacgttgtttatttaatggtagtagtactagctttaatatggttgaccttattattgatctgatcttcagctataatattggattttaaattcaactaccttacaattcgtttattcattttagtgcatatctagcgtaatcttgagtctctttgcctagatcatgtagtaaaatacgtaactaattaatagattatgtcccatccagtacacatcactagcgtttcagtttataatatagcgtttcagcaaacaaacacaaaaacaaacagtgtctgctttgtgttacattttgtctagcaatttcacttgtgacttgtgtgtttgatcaatcatatcattgatgatcggcatgaaaatgttttctttttttcatttcttttcttcttatcgaaactgttttgagcaccatgtcttgaagtgtcatcgtccggacaactgtcccagaaagttttaaataaacttcctaaatttcaaacattcccatatctcaacttcaaatacctcactccatgacaaaccatattaggtgggatagttagaaaaatgaagacatgaaggcccatcgatgaggcaactaacatgatggtggagttgtcataaagtgatgcagctcaaagaggtaggggcaattcatcaaattactatttatttaaaggcacaccatataaataaatatatatatatttatataatatcccatgaaactgatagacccaataaggttggataatatcaatcaaacaaactgcactaaacaacatcacacttagaacatatacagttccatcctcttaatattatccactttagttatttattattattttagttactctttattttttctctaatttgtctgtttcgatcattatttgacatattggggtggaatttgtagttttggattgaggttttcgtaaaatggggggcaaacacaatctggacttgatttgggttttggcttttggaaaaaagaaacagaccagccctcggtgtcaataatatcactctttgagttgtgttatgtgtgcgtatatatataataataataataatatgtttgtactattctttgggggaaaagagagatagatcatgagctagaatgctataaagtaattatactactgaatctgaccaatattggttttatcctattgaggattatgggtccttttaatttactacaattaggaactcaaaaatgtatggtaccctttttgatcgacaaatggaccccaacctcctgtcacctcatcctaatacaaacccaccatacatattattgctattccgtttcccttaagagaatactcttgctttattaataataatataaatataattgctttaatatatatgtacgtaccatagaaattaaagaccaaacaccctagttcaatgaaacataagtaggcttattaactttggtcagtagattttgcattatattgagatagtgagtgcaatcaactatagctagag

SEQ ID NO: 113443 - DNA, 1612 bp, Cannabis sativa
aaaaaaaaagttggctttcaacttaaacagaaaactgaccttaggaggcaaccattctacaccgtgaagcaagcaagattcaccataacaggatctaactgcagctacaaacaaagtgctcctaaaaaaacgagtatttccatcataaggctccccataatgggtcaatgatctaacatcagcaacaggaggaggccctgttaatcaataaatgaaacaaattaacctcaacaagcaattgaaaacagtcccatgaaattctaaaattgatgaaagacgcaaagaaaataccaagttcatcatcaaatgcaaggcagtaagcttttaattcgcggtctgtttctctgttcatacgctgaccaattaaaaaagccgaaagcaaagaagcacttacaccactgggcattgcatcatcattatccattttcaatggaagaacatctcttaaaacaccttgaacttcctcaaacccaaggtgccctccagctaaaacttctcttagagcaccaaccaatctcatttcgctactagaattgccaacaaatcgaggcccaattgaactcccagcacctataatagatccttcgggatcagctatgaagatcacatcaggcggtagtgctcgaacaagcagtggccaaaatgtgttcatggctctcctttccccttcactccattgtgtagcttctggaaacgcattggctcgaatcgtcatcccagcaaaaaaagcacccatttgtgcctttgacacttcttcctcatctttcagctcgccccgagctgaaaaattgccaaaaataattaccaaaaaataaaataaaataaacattaacagatttcccaaccaaagaaaagtagttaccagatttcaaaatggtatcgagaaccttagtagcctgttcttcgctgagcggtttagtctgagtaggtccggtacaaaccctagcctgagcatcaagcaccgtctgattcggcttcggcaactccgaactccgatacgtggaagaaacagccggattccgaatatccgattcggaaagtccgaactggtcgatggtggccgattccagcacagctctcgcagtgaaacatgtccggcttccaatccgaagtccaagattcttcgagtggagattgaagagtgttccgatgtggtgattgggagtccaattaggggattttccggcgcaaagggaagagatgggaatgaaagatagttgtggattgagaagagctttcatggcggtcatgacagtgtgtgcttcgttaaattcaactcaaccaaaccaaacggctctatacgttaaagcaattttcttgtctgtgctatttatgcacgcacgccaatatccatttttacatcattctctttgtacagttgctctttctttttttctcttttcgaattttctaagtactttttgttaacattttatgggtaagtgtttatttatttatttttttttagtatgggtaagtgtttgatgtgattaaatttataatccaactcttaaaatggatatattgatgcactttttctgttttagcactcgaaataattttgggaaaaaaacaaaaaaatacaaaaaaggaaaaaaaattacaaaaatac

SEQ ID NO: 113444 - DNA, 4665 bp, Cannabis sativa
aaccctacgacatagaaggaataggaaagggccatctagaactgttttaaatttaaaacgtatcagtcgacttggtctacaaatctattcaaactatattaaggaatcaaattggatattagcaagaaaagctcggtaagaactttcatttttaggtagctaaatccgatttcatattcatatcgttttttatatttgtagttgctatagttgttatcgattgaatagatacgaacttgattacgtagcaatagcacatccctatatatttaaatatttaatagttccattaaaatataaatagttatatttttatatgacttgttataatagtttatatataggtaaaaaatttatttttaaatttaaataattatatatttaaaataaattaaatttttaattaaaatatttaataagatatttttcacaactaatatttataaataatttttaatttttatttataaaaaataaataaaatcaagttatagtagaggttataggtaattttttaattatttttatttaatttttaaattaatcacaatcgttaaatattgatcaaataactaaaataaatataatcaaagtaattatatatttgatataattattaaaagaggatttataaataaatcacaattcatagaactaatttaagtacgtacatatatataatatcacaatcagaatatataacgaagtaaaatcattcaatatataataattaattaacatgttatataagagggaaagaaaaagaaaaaaaaaaaaaaaagtcacgtgataatcacgcgagtcatttggtcggaaagtgaacattataactcattaatttctccttctccaataacatattcatatccacaaacattctattcatgctaaagtggggtccctcgcttagctccacactttccacttcctcctaaaacttcctcaaaatctacaccgtccaaatccaaatccaaatccaaatccacatcatatcatatcattatcatctctctctttctctttccctcctccgccgttttttagttactaatcatggtcccagtacttcattatcatacgtgtatatatatcacaaaaaatatggcattattatcaaacataaaaaaaaaaaaatgaggctttgttatagaatagctataacctcatcagtgcaacaaactacttctactactgcgcccttattattacctccttattcttctgatcatatttcttcttttacgtgtttcgcaatcaaaaacgacaccacttcactactgaaaatgcagactcaaaaaatgacaacgttgaccgaaaatgacgccttttataattgtcatttgtgcccaccaaaactgggaaagaagtggagagagtaccaaggttgcaacgactgggagggcttgctcgaccctctacaccatgctatgcgttgtgagattctaaggtacggacagtttgtagacgcggcttaccgtgcttttgactttgaccccacttcttcttcttatgccacgtgtcggttttccaaaaatgtgctcctcactcggaccgggtttggttcgaccgggtatcgggtcaccaagcacttgcatgccacgtgtggagtccaaacgccaggttggattgataggctgcctagctggatgtctattaagtctagttggattggttacgtggcagtttgtcaagacaaggatgagattagtcgtcttggtcgtagagatgttgtgatcgccttacgtggcactgccacgtgtttggagtggctagagaatttgcacaccacattgactgatttgcccccgcatgtgggtcccagtggaagttgccgacccagggttgagagagggttttgtagtctttacacctcgcgtacagccacgtgtccgagcttgcaagacatgattagagacgaggtggcgagaatcgttgagttgtacggtgatgagccacttagcttgacgatcacaggtcatagtctcggagctgcactcgcgattctcagcgcgtatgatataactaccactttcgctgacgcaccatctgtaacggtattctctttcggtgggcctcgcgtcgggaataaaagcttgaggtgccagctggacaaaagtgggaccaagatactacgcattgtaaactccgatgatttggttacgaaagtgccgggctttgtcattgaagaggataatgacgtggcaagaatgtatagtttccacgtggcaagttggattcgaaagcgcatgaaaagcaccgagtggggctatgccaacgtggggaaagagcttaagctatgtagtaaagagtcgccatacttgaacaacatcaactttgccacatgtcatgatttaaagacgtaccttcacttggttaaagggtttgttagttccacgtgtccttttaaagcaactaaggaagtgttatctacacgccttataaattaaattgagatgattggcatgtacataaattgtaataataataataattaatctccaacatcatgcacatatgtaatagtgtaatagtggcagtgtagttctgaaatcgtgtactcgtaaattaccagcccgtttggctcaatttttaaaaaacataaaagctgttttttaaaaaaattgggacaaaaaaaaatatttaataagcaattaaaaaataatttattaaaaaatttatgaaaatactaaaaattaaaagttaaaattagtacaatccaacttttaaagaaaagtgttttgattaaaaaaactctataataaattcttttttactaaaatttatttaattatttattatatattacaaaaaaaaataaaaatattttttaaggaaaaaacattttaaataaataatactgaaatttctaattttttatttagtttttaaaaatattttatatttatatttatattattaacaaacaatattaacttaagtttaaactacaattttttttataagtgataaaaatacaatttaaagttattaaaaattatttttatcaaatgcatataaatttatactataaaaaaaataattaaaaatatataaaaaaaaatcacataacatatttttatacacatatttgtgatcagggaccgacacacttatatacttgtggggcctatagcccacaataaaaaaattacattaaaaaaattaaatattttttttatttgataattatagcacaaaacattaaaaaaaaaaaactcaataaaaataaataaagtaaacataaaaaaaaattaataacaattaagcccccacataataaaaattatgagtccatcactgtttatgattataatgaactagattataatattatcagtttttttcacaatactcctacaaatgtttttttcttatagtacaatgtcaaacttgtcctatatatgtatatatataaagttttttaaaaaaaaaattaaaatcaattaagatggcaaattgaaaatacacaacaattaataaaaactcattaaagatgatacacaaaaattaaacatgtctcaattgactatgttaagtgatataaaacttattactttttatgtagtggtcacgtatattatatacattttacattctcttcgtcccctgcattttctccttcttcctcactcctactagcagtaactatctcaataaagctcttaaggtcgctaaatgaatcaaacattttaactatgaaaaattaattgatgaacatcattgttgctcacgaccacgatggaccaagaccgttcccaaaataattcttcaatctattgacgccatctttgaatccagaatttcatacttggcaatgcttcaattgattgcttataagttgtttgtaggtaggaatggtcatttgggccattttacaggttggggctcggcccccagcccgacaggacgactttgggccaattgattcgggattttatcgagcccacagcccagccaagtacatattgtttcaggtcaggtttgtaaatatactcactcaaattgtcacttgcaagacaactgagagatctgagaagctcttgctgagacctaccagtcggcatcaatggctcatgtatctaaactacaaatattattgcagaatctcaagaaagttggactctctatttgtgactatattctcaagctcaaattattgtttaatactcactgctatgctatggatgggcatgtttctcattctgaccatcaaatttatttactaaatttccaaattgcataccaccttgcacaaagttaatagctaatgcaaattatgaaattgtggcatgcgtctcataaactacatataaataaaccataccaaaataacaatggtacagaagttattagaaaacaagtagatcataacaaaggcatatgcaaatcctcattactaggactatagatccagaatatgacaagatactttagatcatatccaaaaaacaccaaaataggaatatgaaaattggaagcataggcacaataaataaagatcttcaacctcgatgacaagcaatcaaatcacaacggacttagatcctgaaaaaggcaaaacataacaaatcaacaaagcggatatggttaccagaaacattataagcatcaacataattttgtagactttggaacaaactgcactaatagacttacatattttgt

SEQ ID NO: 113445 - DNA, 1130 bp, Cannabis sativa
tttggcggtcggttgtgattggatcggtcggttgtcattagattggatcgatttatgcacacccctagatatgagattggatagtatagtctggtatttgttaatgtgtgtgtgacgtactaacttatatttattcgtgtttaaaaaaaaatggatcgtttcgtgtatatatattattttacataataaaactaatgataaagttattatgtttttgtattttaaataaaaactaactaaacattaacactatgtttggtaggagggggagatgggtggatggagaggggtggagggagagcgatgaaaggagagactaaattatttgtttggcaagagagagagaaggaggaagaggagagatggagggagacattctctttccaaacctttaaaatttaatccttccaaattaggaaagattgtagaaaaagacaaaatacattttataaaatgtacaataattgcccttaaaaaaataataaaattttgtttttataagaataattatgtaattttactaattaattttttctccgtccttcccagctcacacctaataccaaataatacaaaggagattaacaatcatctctatccctcttactctccatcctctctaacctctccatccatcctactctctctccctcccaccaaacatagcaaaattttgcatcatattttacaattgtgcattgagaattgctataaggcactaatagtgctcaacaccatctagagatgatgctttgctattgactagcgatattctaaaaaattattatattaaattatataagacttgagattcgatatttaattacattaataataatattacatcgtggagggtaccaccggtgtcttttagtatttttcttgtgtattagattaatataaatctatcccaaagtcatttttttacatcattttttatttaatagtttacaaattaaacctaataaagatctatactaagtaccaaataaactccaaaggtgtgatattaattatttatgtccatcaactgttaaacattcacatagattatgaactatccaaacatacattaaacttgttcataatcattaaaaccaaaatctatactttatttagagcatcacaaa

SEQ ID NO: 113446 - DNA, 5086 bp, Cannabis sativa
ttttgttgctagttatgtggaaaaaaaaaatattttttcataaatattatataatttaatattaaatagtaaccaatttaaaataacgaattcgatccgcacttttataaattgaattgaatttgatttgagctattgtgcggattagattggattcgaaatatgaaatccacacttagtgtgaatcaaatgccctataagtaaaataatacggattaaattggatgaacaccatcatgtaaaacaaaacatgtctcatatttaagtttgtctacagtgttccgtgttccgactacactaaaatactttttagtgttatggttggaatagaaaaatatatagtactaaaattattatttattagtgttacttttactgttcgattggtagattttgtcgaaaaagctacagcatatttaggtttttaaggtgccattagagagaccttagtgatctaagtctaactattacctgttaatataagtgcaaatgatagtgagtgatttcttctgagtatcttaccaagatgaaagaagatacttcataatcaaaaacaatttacatacaggagatattatatacaatataatgacccgatacagagacactgggaagagcagaaccactaattctagacaacaaatctcaggcatggtacatcctattactgttagagacctatcagtaggtcatgcaatgaagttcaacccttttgtctcaagtcaagtttacaggaaaactaccatggttcggaattattacctaagaaattcctagcaaatgatggcttgctccaaccttcttccattgaaatgagattaaggcgtaccatcaatttatttactgcgtcttcctcaagactgctaactggatccggcgattctttttgtgtagaaggaacctgggaatattataatgagcttttcagtaaactagatatgtacaatgcaatgaataccatactgagagatagaaatgaccttggattcttgatagagctttaggtaatctaatgattgctcataaaacccacaaaggtaaagaagaatgctataatctctcaattccttcacatcggtttccaggaggattagacgttcacaagctgtaacattaacaaatctaattagaaaaagggtagacagaaaattaaagtaaatgttgatgcagggttcaggagcaattgtgtgattatttcccttaaaaggaaaaaaaaagattaaaaagcgccaaatttttaaagtagcagaataaagaggttagcatgacaataaaagcaagaccatattgcacataatgttgtcattctctagattacataaagaattggctttcatatgtacaaaccagctaatgctcgtctcatatccccaaaccgtacactggtccaaacaccacgttctagcctatgttgagcagccttagcagatgcaagtcgaaaaccactgcaaaagataaaaaatacataagcaacataacaagaaccttttcttcacccctactagctatcttcccgaaacaaaggaaaaaacaaatagagaaggaaataagagaatatactagttgaaaaaattattcatcaatacaagagcattttatgttcatgtataattaaacaacctatcttcattaatgtttggtctatctatgcagttagcagcacgtgcagctcttaggaataaactccctgtctgatcatcttgaaatggccagaaagcttccttcaaatttcccaacatctgcagacatgttaaactatgaacaacatatgcaactgattaacgtgtaactgagcacatgtaccaatgataacaggctgacactgagctatttcttcatgaagatatttgaatgatattcttaaaaattaccaaaactaggttagcttcaagttttccttccatatacctcccaaaaaaaaggagagagagacataatactgacgcacttcccaacaaactctccgcattgtcttagaaactttttcggtagagccaaacaattcattgtgatttattctaatacctcacacaagcagaggttttgtttcaaaaaaatacatagataatacctcttaaagactaactccattgtgtacatatccaatagttttggcccactagtgagaaatttccaaacagtttataggattaagagtgctttcataaagtgtttcacaacccttctcccaaaccatgcgaggttctacatataaactacatgaggcaattgaatagtttcaattcaccatattctgtcatgttagtagaatgtgttacagactggctcatcaatataattttacaagaataccaatttctaaacaggaaatgttctagtttaccgagggtaaaaagaaacaactcaattctaaagtcaggatgtaatacttcaacattgcttgaaatacacacagaggaagtctaaggatattctttgctcttacaatggaagataaagaaataacttcaatgactattattattttattagaggaaaaaataacaaaaccttactaagaataaaatactagaaaatgtaagtaaacgagcagaaactccttcaatacacggcatgaccaacaaaactacaagaaacaaagaagaagcttctggatagcatagttttacaaaaacccaacaagaaaataagcattcagtactttattgaacttgatcagcacacattctaaaaacgtataatttgtatgaaagaggcaagaaagagcactgaaaatgatagaaaagaagttacctccactagcagggcttgtgatgtcaatacatgtgagtgatcagattccttactttttagtttatggtaacctcgaggaagactatggaaatcatgagggaagaatatttccacatcaaaatccaaaaggccccataaccgaagcatcttcagaatctctgaatatatgagtgaaagcattgtcaatgaacctgaacggtgtgtcaaaacctgttcaaacagaaggattaaatattcaaaacgatgaccgtgtaacagtaagtagttcctcttgaaatgaataagaaagacaccatgtaaaagcatgtgagggtcagagttccatacagtgtgaagatatagagatcgcggttccaactgaaactttgtattgcttcttcggaaaccctgaaattggaaaccactttttatgaagagaaaaaaaaaagcacaaaacctgagaaaagaaaaacattttgtaatgagaataaataaacacccagaataaagagagagaaatgatatgagggtaaaacatctcaaatatgcacccttttccttatagtttgtcatttttctttttgctcgagggaaatattcatctcatttcattgattcaaatcattaaaatcacataagataatttcaaaagaggactccctccaaccaaactaagtcattgctattactaaggaaatactttcccaatctgtgtactgccataatagcaaaccagaatacataattaacataagccctgagaaagaacataacaacctatactgtaatgtatatatcaaagcctgcttaacagaaagagcatcaatctcattgacactttaatagttataatgaagcaacagattttcatgagtactctatacatattgttataaagaaaacatgaaaaaatgaagaaagcagagttgtctccaataccttcttgtcatacaaatagttttccaaactgtccaaaaaattctctggcgatgatcttgatgctgaattgtaatgagagcagtaacccattgaaagatcatccaatctatcaacgaaggcatcaacaggaagaggaactgaagaatgagacacgagagagtcgtcctctgcagctatataaagagctgttttccccaaatcaacatgtctattaatactaatactggtttccctctctatatcagaaagtttctcaatctgtgagcaaaatccctccctagcttcctgctccatccattttcaatcaaaacctttttagatttcataactaaaagtgaaaaaacaaaggaaatttcaacactaaactactatatccatccaaaacgaaattcgtgatgattgttaaaaaaaaaaaaaacattaagaaaaataagcataaaattataattaagtgataagaattgaatggcgaagaagaagaagaagcaaaccctagcatgagaggtttgaattccggaagaatcgagagcgtcgtggagagaaaacttgaggtggctggtgatgggtatggagcgagaggatgatccagtgcagcagaggacacgaaaagaggaagagaaaggagaagagaggtggtgatgttgagaggttgaggtgaatttggaaggtagagctatggcggaagaagaagatgaagtaggagatacccaggccatggttgattgtactgtactaagttccaacttcaaactccatgaataggcaaaatcaatttctcaatattatatattttgaaaaggcacacttctacaatcacttacttcattttcaccatgtcaaatacaaattattatgtgatatatttttatatttatataatatattagtttttttttttaataatattctaatatattaatgataattaaaaacaatatgaaaataaatgtgaattttgttgcactatgtttggtgcacactttttgttagaatttgataagatgtgattaaattaaggtgtatgagtttcatctcaaaatcaattaaggatgaaaaaaaatagttcatgcatcttatatggtattagaatcaattacttttgaaataaaatatcatgcaccataccaaagtcttaacacttttaaccaatttaatgcataatctatttatttttagcactgattttgataaacaagtgtcagagttagttttttgacagttagcattttctgttgtaacagtttaatgtttattattttgctgttagtattttctgttaattactctattctttacttcttgtatcaactctctaatcagctccctataaatacaatgtctcatttcaagacttgcaacttttgcaaagtcttgtgattcaatttcttcaattgtgtcctcctagaattgcata

SEQ ID NO: 113447 - DNA, 4069 bp, Cannabis sativa
tgacgtataaagaaaatattttcgttcagccaaataatctcaaacgacgccgtaacagaggaaagaattgtaacacgtgggcaaatgagactgagacaacggagagaggaaagagcaaacgcagaacaacagagaaagaaggaacatgattaaaaaatggaaactatttatttattaaataaaattattattatttattgtatgaaaaatgaaaaaagaaaaaggaaaaaacgaacggtgttgataaagcactgtctctaatctcagtcgtctcctacctcattccttctccagcgtccgatcttcctccattctcacccgatctaaagcctctccttctctcgcgcccaattttacaaatcccaactactctaccggttggtttcactatatttacatataataccattgtttctttttctttctctctctctctccatttgtatacatatattttatgtgtatattcatgtttcatttctcttatttcttaattatggcagagctagggtttctggtttcggttctgattttgttgttgctgtacttttttcgtggttgggggttggtggtgtgctgtgttgttggtttagggtttcgggtttgcagcgatggctgaagctccggcgagtccaggtggagggagtcacgagagcggtggtgatcagagcccgcgttctaatgttcgtgagcaggatcgatatcttccgattgctaatattagtcggatcatgaagaaggctcttccggctaatggaaaaatcgctaaggatgccaaggagaccgtacaggagtgcgtctccgagttcatcagctttatcactagcgagtatgtaaactgaaattgaatggattatggttttataaacatcggtattttctgttttaaatttggcttatttacgatttttcttttgtttgttttattttggattgaataatggttcagggctagtgataaatgccagagagaaaagaggaagacaattaatggggatgacttgctttgggctatggcgactttagggtttgaagactatattgatccacttaagatttatttgaccagatacagagaggtatgtttattattatcattatcgttaacaattttgggtgattttgatctttttgtttatgaaagctgaaatctttttacgtttttaccttcaatttctccacgctttagcgtttatgaattatgataaaatgttatgtagctttatttggatataggcttttctttacaagctagtttattgctattgctcatattattattattattattattattattatctttttggttctgggatttttttttcgttctttctcattatgacgtgcagtttaattttgattttaaggttttttttttccttaagcttaaactaacttgctcctttctcctgtttgtcttgtttgattgcttttgggttcacatgtgggatgttgcagatggaggtaagtaaaactgttcatattcagttacaacgttttcaactttttttctgtcttgatatgttttggagtttattatttcgtatttaactgttatatctgacagggtgacactaagggttcagcaaaaggtggagattcatccacgtctagtaagaaagatattcaccctagtccaaatgctcaggttcttaatttatttttttgctgccaaagtgcttcgttttttttttttttgcttccaaattttattagtagggattaaggtgctttatagaatggaaggttgtcatgtacttgatatggcttattgttaatctttcagattgcacatcaaggctccttctcgcaaggtgttaattatgcaaattctcaagtaaagtctcttttatctctcttgtatttaattaatattattactaacaaattgccctcataattttagtagtgtttgtagatgttaaattattaatagcacatttccatatccttatataggttgtacttaaaagaactgatccttgaattggcaaattagtttcttgcactatttgtgttattgtatcaagccttgacatatacatgtaatatattttgatatactgaataatatattgtaaggatatcagggagtatctctttcgctcgtatatgggtttgtttgagtttattgtaggttttttttcggtgttcaagtctttattcagtaattgaatcactttggttttgtttcgtgatatacttgctcatggatgtttttggtggtggtaatttcccaaccttttttttttttttttttttgaaaaaaagagtaaaaggtcacttgtctttagactgaccttcactgtggtggtttcacaacttaaatgagggaggacatgaatttgtctacttgcgaaactctattttatttaagggcaatttgaagtagttgtatgtaattcaatcacttaagtgaatctttgatacaaatagttggctttagttatataaaaagacatgtatatgatattgtattactttgtgcctgtagcattagtaaatttgaaatcatgtgaagtgagagaaggaaacttcttccgtggtctaggatttcgatggcgggagggtgggttaattaggctgatctttctctgagtacatctgtattgcatagctagggtatgtttaactcttcaggtgattcttgtagctggattttgcatgatgtggccttatatcattttaagaaagattggatgaatgcactaggtagcatagtagcacactgaattaatattctatctttgataaatctaatattgttgtgaattttgtttttaaatcagttttttattttctctctcaagttaatgtttgctggtactaatgcttccgtatctgtctaatgaatgtagtcacaggctcaacatatgatggttcctatgcatggctcagagtagataacagagattggttcttcttcaattattgccataattgagttcagtttgccattgaagaagatatttatccgtccccacaacaaaattcgtaacaagttatttgtctaaagtgaatacactgagatattgggttggttctggttcccatgtctattatattgtggtaatacttgtatatttaggagagacatttggttgtgtagattgactatttaaagaatgtgcggtgtaaatcttggtcccatctagtaattaatcatctagtaataaattaatttgttctgtacaactgtttatttctaggactattgatgtgatacgtgtttggaaaacttcatactatattttcataatccgaaggccaaattgtaatagcttttactttttacatgaaagatatgccacagttttttgctgctcaataattgagttcaatcaaaagaggtactgatctcatgctgtttgaaaaggcttagtagttttcttcaaattgcagtaatctaaacgaaacaacccactcgactgagctgactttaaatcacgcagagtcgcatgaatgctatttggggtgtcgtttggctttttgaattcactttttatgtggagaaagttgattgaaagtttatggtccttaatatattctgcaagtctgggtcgatatggaaatgttatgcttatttgtatcatagttctttaaattattaaagttttagcaagttggtacttcaattttatttttaacaaattggtccacaaactacattctaacaagtttatttcaaaaatttattttttttagtaaattgattcccaaacttttattttattagcaacattaaattatcactcttaaatattgatattttttattatttttttatttattttactttaatttattttttgtggtaaattcaaataattttatttttttttaattttaatactttgataaaataattatattaatatattttatttattgaataaacttaacaactttattaactagcaatcgttaataacaatagaaaacacttgttggaaaaattctcaattgaagcacgcgacctgtagagaaacaagaatccctggctaaaacatgagccagcttgtttgcagaatgtttgacaaaacacaactcaacattatttaaagat

SEQ ID NO: 113448 - DNA, 5097 bp, Cannabis sativa
taaagacggcacggacaaaactcaaactagtcaaggccctggtatctttagaccacagaatgaacctcatgtggatatcgtaggaattgacccagagatggatcagttgcgagatgcacgataggccaaatgcaaggtcagttccaaactatacaccaggagcaaactcaaactcgagcgaccttaactgaaagtctcgctaaccaaaggagagagttccaatctatgttggaagatcatgctcgagatatgaggaggtgccaagatgaccaagatcgccacactcaagaagatgttgacttaatacgaagctatttcaaccaaaacactcaagggttgggtattgacgcccataaccaataaatgtctcaagacaatcgaaactatccacaggaagtccataccctgagaaaccaatgggagagggtggtctacaggcctgaagaacgcccaaggaaccaaaagagagcttgaagtcaccttttcaatagggttccccacaacaacaatcgatcactccctgcagatgaacaagtcctacccggtcactatatgggacgagatgactcccataattttcgtctcaatgagaggggtaggggaaactctagaattaacaatggtgaccattgtagagatggtggaaggacaacccaacactaggagtggcagccctacaacaaacaacgagagggcaatgattacctgagaaatagtaggtccagagggagaagggaagaccccgagatcaattgtgattatcatcctaactactccgacggtcatggcaataacgaagctgaaagtcgggccaatgacgaactgaatcctgggctggcggttaccaagtcgaagggtcgtatgcccctaataggcaacatcaacccgaaaattgtcctcaaaagggtagagattgccaaatacctcccctagtcaatggaagggctgacagtcaaaatgtaggaggaaggccaagatccggatcaatctttgaacgtgtaaggcttggttggatgagttaacccaattagtcaaggatcttactgcaccgtaactcattgacttagaactagaaaagaggagggcgtctgctttctcaaaaacgatcaatgacctccctattctagcaaaattcaaaatgtctacttgcaagtacacgggtaatgaagaccccctgactcatgttgaaaacttcaaaatccaattggaccttcaagggattagggatgacatcagatgtcgaatctttcctgcaaccctcacggatacagcgcaatagtggttcaccaaattaccgtagggaggatcacttgttgggacaagtttgaagggttattctatacccagttttcttcagtccgatagacactgtaaaattgagtgacttagttgtcgtcaagcaaaatcctgacgagtcgcttaaagactatatccaatgctttgtgcaaagcaactaaggtgagaaatctaagtgatgatggcaaataggttgctatcatgggggcattaagtcggccgtggaaagatacaaggcagaaactaacccataccatgcgagatttcttggacaggattgatgagttcattaaattggaagaagccgagcaaaatgctcaaggcttcaactaagctaagagcaaaaagaacagaacaagctcaaatagccaaagctctcagggaggcagtggtaagaatggctccaacaatggcaagagggggaatatcaatagtggtggtaacaacaacaatgatagcaagcaaccaaagaatagtcctgagctaaccaggcaggatcaagccctaaggttcactacctacagcatcctccttaaaatgagagaaaacatctacaatgcatctcactcagtggtgccatatcgtaagccttatcccatgagaaagaatattagcaaatgagacatgaataagtttttccaaatccacaatgattacagtcatgacactaatgagtgcaataatctgaagtaaaaaaaaagttctctatcagacaagacaacccctatttgaggagatacgtacgtcgtgacaacaatcaactcccacggaaacaacaacaggtggctggggatgaccaaaaactgttacctcctctcgttatgggttgcttagatgtgatatctagaggacgtcaattggctaaaaactccaaaaattcccaaggaaaattactaagtcccttagacatgagttgagtgccgatgtgttggcagtccaggagcgagctctcgaacaacctcgatataaatatgaatcaatcacattctctaaggatgacaccagccacatttgatacccacacaatgaccccttagtggtagaagtacaaatcgccaatatgatagtagcaagaacaatgattgataataggtcattaaccaataccctcttcatgtcctcactggagaggatgggtttgggaccaaaggatttagaaacctgtgaacatctcatatatggaatcataggaaatggtatggcactagctgggctcattagcctaccattgactgtgggaacaatccccaagagtgtcactactatgcattgtttgtggtattggatatcgtatcaccatacaatgccttgattggccatccagccctatacgacctaaatgcggtcgcatccatctttcacctcctcgtcaagtttcctaccaagggtggaataggctgcctgaagggtaaccaactagtagcacgggagtgttacaacctatccatcacaactaggggaaaagcatccaaatccctcaaatctatagtagtacttgtcagcattaaggactcgcccaaaacagggtcgaagacattgatccccattttggggatactgatacaggggttggtcaaattgaagagttgaagaggttccattagaccccaaacaaccctctagactaatcaagattagtaaagaattccctaaggacataagatctgacttgatccagatcttaagggagaaccaagaagtttttgcctggtcacacgaagacatagagggaataagccccatcgtgataagtcatgctttaaaataaatatcgacaactttaagctgattcaacagaaaaggagattgctcgacaaagagagagccaatgcactaaaggaagaggtggaaaaactttggaacaataaattcatcaaagaagccttctacaaaatctgagtcttaaactctatattagttccaaagccaaatagaacttggagggcatgcattgactttaccaccatatgtcggtaacacttcactttatagtgacaaagaaagagcaaaatctagtctagaaagtcgagaatttttgcgagagttagaaaaacttcgaaaaataaaattgatgagtgagtaaaaatttcataaggaaaaggacacgggcttttatagaccttttagggtgaatattgatcaacaaccatccaacaattagggaaaaaactattgaaatttcattgatccaatggctaggatagcctgatagagaaatattataaaaagggtagttgcaatactcgaatatttgcctaatagtgatattaaggaaggtttccatcaaagaggcaagaatcgaattgtttttaccaaaaacgaggaaaatgattatgaactataaataatccacgcgcatgttggatgacttctgatgatgtcatttcttgaaacagatggcaagtctcattttacaaaggtgcaaaacgagacttgggggtaaatgttgcccctaatttctcccaatggacgtggcgaaccaggagtaagccatgtggagtgaaattataaataccgggaataattatggccaaccccttaggataaccgtcaggacttagtgatcatgtccgggaagctcttctaggagcttaagtcacatcttgctaagcccagaggattatgcccaccttgaggagttggataaaatacacagatccggttgctagaccctgaacctgagtcactgtggatgcattaattgcgacatggagaagacgtctgcaaatggttctaaaaatatgtgtcagaggcattaaatccattattcagcgattacactttgccctatgactcttatgacggctacataatgaactatcgcatcaatcaataaaggttaaggacttatcttacaaaacacctagaaaaagcctatgcagtgtaccaaacaaacaaacatggcctaatatccaaatgtgggaacttgtgcaagtaatgcttctacacttgcgacaatagtaacattttcaccttctttatgagactataaataccccaactacattctgaggaagggttggaaaaaatggtgtaaaaatcatctgaaaaagactactatattttatagcagtgattcgtggaataaggctcattaatgccctgaccacgtaaaaatacttgcattaaatttcttctaatcattaaaacaactctaattaattagttgtcaaaaatctcggtcaatagttatttatctaaattttaatcattgtcttgttttatttactttttctatctaaccctttttattaatcaaacagaataaaataattaattgattggcaattggtaatcaattctcgtgggaacgatactttatttatcattatattacttgtttcgattgtgtacacttgtgttgagtggacactttttattaatcaaaaatatgtatttctgtaataaattttttgtttatagactcatgagttgagtggatcttaagcatatacctaacctgctgaagtccattttagccaaataaatatatttagtagtatgagtactccagctctattgtaaattttactatactgatttatagcctttttaatgaagtttttcattaagaaaaaaaacattattggtgactcataaatgtataaccacactaaaaaaatgacttcaaataattaatattatagatttttttctgataatttacagaatagttatagggtatcaagatacctagtatcaagctcccatgttccctgaagttccaaggaacctctctatcaacccccaaccgactcacccaaaagctcccacaagcactacctgttggaattattttac

SEQ ID NO: 113449 - DNA, 5679 bp, Cannabis sativa
ctcaaccactcctccgtacataaccctctattcaacctctccatgatcctagaattattatgttcattacaccaagtcagctcatgtttaaatgaactgaaatcaatgaatcggcaatcgtctatgacttctttaaagccatccattgcccctggtaacctatcacgaccaccaactttttcagagagactcacaattttgttgaaatcaccaatacacaaccacgacccccatacttcctttcttaaatcacgtagaagttgccacgagaacctcctttggctagcatcaggattaccgtataacccagtaaaataccacggagagaaaccaactccagccacagttgcaagaatatgcccaggcgaactagataaaacttgcaatgtgatagcagatttccacatcaataacaaacctccactcattcccactctatcaaccgtccacaaattttcataattcagaacactacaaacacgctcagcttgatcccgagataatttactctcagctaagaaaataatatcaggaccaatatcacgcacatgggattgtaaggcacgtaatgtccaaggattcccaatcccttgaacattccagcttaagagtttcattgtgatcggcggccttgatcatcaaggctcgccgcttcagattcaacacaagaagcaggtaaatccatagaactagaaacacctaccccataaacattagcaaaaactctatcaccctccattgactcagcactacccatgttgaacacttccttaccatctgcttgagccgcctgcatcccagaggtttgaatagccgaacgaagtcctcccatcttattcttacctcgagctttatgtttaatggacacccttttccttcgcccattactctgttgaccctcaccactaatctccacaccactccccggcataaaacttcccgtctccgctcttaatcaacgttaatcaggcagcctgagagagaagcctcgctctccaaccctcaaagtgggagctaattttttcgatgataaaatcaaagtcattacttctactacctttgaagatcaatgggttccccagaaattcccgccccccccccccatccatttcttcaaaacctaactggtttctaattgactcacaacagaaatgcgagcaatttttggagaagaaaatcttggatttcctctcattaatctgctgacctgaccagtagcaatattgatccagagcatccatcaccgcagccacattgccactctcggccttagcaaagaccaaaagatcatccgcatacatcaaatgtgtaatcgggaaacgtccctaccgaccgaataaccacttaaaagtccttcttcttcttttaatagaaagagtttagaaagaacctccgcacaaagaatgaacaataaaggcgattaatacaccaatacaaagaacaaaatccaagatagataatcaagacaatgagaatcaaacatacaaagaaactgaaaacagaattaagagaagaagtgagttagaaacaaaaataagcaatacaaccttcaaaaatgattgctttctttattaatcaccaatgtattttacaatccaagataagagcttagttttacacacttacaattcagctcacatgagaggcattgatcaaaaacacaatgcactttttagcatccctcaaatacacacatatacaatattttgttcactacaaaatgaataggggtgttagacttctatttgtagtacatgaattaacactagatgagatagcagagaaataacagaaattaaagatgtaactacgaactgttgagatgcaactgaaaaactgtcattcacactatcaaaatagcttaataacacaacaaaaattaatttgatagtagttagggttgccaccacaatcactaaaagaaatcacagtgttaaacaattactactgcaataatttttaagacaattaattcaagattagtaaccagttttcatctcattagtaaaaaagtagtacaataaaaataatattatgaaaatatgtgaaagagaagctattagaatgtaatatatatatatatatatatatataaactcacaataaaaaaatccacgaagttatgtatcaaactttataaaaaatataaaaatattttatgtaattttctctattgtttcatagaaaaaaaatatgccaaattgaattttgtatttttcttttttttttttttttgaaaaaaataaaataaaaattggagtctaataacttaagttgcttaacccaatgagctcagtccaaccctattagaaaatcatgatacgttatttggtgtaattattctaaaagttaagtaatagaatgaaattatcaactcaaggaaccaccttatacataatacatatcaccttacaatggcagagcaccaccaactcatgtggttcataatttaatgaggaacccatcgaagctctctttctctctcttcctatttttgtaggaaataaataattaaaaatgcaatccaaagcacacgaaaaaaattacttaagtcacttattgattgatttcgaacactttgtataatattttttttggttttttttttccttttcttgaactaacgattgtagaaaaatgatgcctaacaatgctttaatgatgtagttgcgatgaaaatctgatttttggcaaaaacaaaaaatatgataaaatgatgcctattgatggtttaacgacagtttgcgatagttttatgacggtaaaatgaaggtatgatgtttggcaaaagaagtgatggtaaaacattgccttaattatggttttgcaatgattggtaatggtgcaatgaaaatataattttgggaaaaaaatgatgtaaaataatatctacgatagattacgatagttttacaatacatttacaatggtgccatgaaaacatgatttttggcctaaaaaaaataatgcataacaatggttttgtgatgcatttacatacaataatgtaataaaaacatgatttatggccaaaaatgatggaatgatacgattccctaacgatttgtgatagttttggtagaaatttgattaaaactttggtaatgtaaaacttttcgctcacataacaatttgaaatgattttttcccccttaatttggtaattttttttttaagatgtacacattaatgtagaattcaaattttgagaagtatagaaacacaacaacaacaaaaaagttttttactttgttaaaagttgatataaatttgacagcgttcattgttaagtttgtttatttatttttaatgttttaggtagtcttcatacaagctacaaagtaagagaactattgagattgatttaaagtctttttttctaagtaacttttcaataacttttttagtagtgacaaaaatggtttgatttttaaataaagattgcttttgtaaaaaataataaataataatgtttttctttgaataaaaatgagaaacttcaattaaactaaatcaaacaatgtagtttgagcctcataaggaaaatcacttcctctgaaacgatgatcggaaataaaagttcttgttaaataatttaataaaacctttatatattaataaattgtttattttcccctttatgccatttgtagaatgtattttgttttaaaaaaaaaaaattaataaaatctaatttgaaaaagagttgtcacatcttagagtatttttttctcttttttaataacaatcaaatttaagaaaaaaagtaataaataagactctctttttaaccttattgttattcccttctttattattttcttttattttttttatccgtatcttctatttttgtttcagtttcttcttcttcttcttcttcttcttttttcttgtttttgttagtaaattagaaatgggtaagaaatatttcaaagaaaactctcatagccctacattttttatagcttcgaacctaaaaggaaattagttgttcattctctagaaaagagaaaatcaaaacgttcgaaaccgatcattgaaaattcagactttgatttcgaatttgatgataaagattttgaaatacccaaagtactgaaggtacgtatttatattgttttttagttgttttagggtttgtttttctttttttgctgtagaagttttagtttctttttctctgatctatgtcttcagctcatatttttttattgttgttatgtattttgtattttttgttttttattgtatgcatatttttaatgttttttaacggttgtattgttgttatatgacttgttcttttgagtaagttttctttttaaaactgaatacaagttaccccaaactcattacttattaatcttctcatctccatcatctttaaaattttcttcttcttcttaagcttttttttcttcaatttttttctttatttgtttgaaagattgatccacgttttttcaattatggtttccattacttcttgctattctcatctccatcatcttcaaaattttcttcagctactttagcttcttttttcagttttttttgtttgtgcatgttcagtctcatatatcaatttagaattttgtttatcactctctgattttgttaaattttatatgttttgttgttttgtatgtgttattttgtatttagtattatctacttgatttttatattttttaaacgattatttttggttattctgaattatttttaatgtatttagggtaagaggaaatattttaaggtgaagggaagtctcaactagcaaaagagttatcgaggtataatattttttttgtaattttattttgtaattttactgctgttttaccgttattttaggtgattttttatattattgtttcaagattggaatcttaaatacttacgttctgactggagtctgatgttgttctagtggttcgggctgtaagtgttgaaaatggagacttcgtatgtgttttggggtgtgtacagtataaaagaaaaaaaattaaagtgagaacagtatttttataaaaaatttcgtatagcagtataaatgtaaaactagccccaaatttagtatttttgtaaaaatctttttttttttctaacttaagttgaatctcaaaatttattgtacaagaatggcatcttcgaagagcattttgcaaggcccaacgtattccaaaaaccaggatttgggccttgaaagttgtgaattcctccttcacataattaaacctgtacatatttgaactattttggttggatttttgtgccctattcctacaacccaaaccaacaagtggaaattacattgtatacccactttactttacatgttttgatttttacttttattttcatattttttttggaatatacccatttttatcgataatgtccccattatacccctaaagttaataaaaattatgtgttagactcaagtagaggatgagggtatattgggcaacccacctacaaaagtgggtacattttaatgaaatataatataaaagtatttttgattaatggatatatagaaaaggtattcctcaacttattgaactcaaaaatctagaaactaacttggtgtaagttgaaaaatactccttttattaatcaattaatcaaatttacctttaattttatatttatttgaaacatacctct

SEQ ID NO: 113450 - DNA, 2321 bp, Cannabis sativa
cacgtaaaaatatctggagttataatttcttttattgcttattcatttctgtagaatatttattactaaaaggctatttaattttggttaataaaaatttgcgttaacaccacttattcttataataagggaccaaaacaattatttttcttaaagtccaaatcaactcagggccaaccctatttatattgtttattcaaaataaataaatcatataaaactattattaaaggagcttatttattaataatatattatttgggtcattatctataaatctgagcattgagatatatgtaccataatgacatcgtaattaattatcaattctacataattaaaactaaattagtttaaatataaatgcatgagtgttagaatttaagataagatgcataagctttcatctcaaaatcaattgattaatagatgagtagctcacaaatcttatatattatattatcttttcagacattaataatgtgagactctctgaagctaggagaagtttgaggcagaggaatcttatgtcccccttactctttgtattgagaatggaatacctaagtaggatcataaaaaaagttgggaaaaaaaaaagactttgcctttcatgacagatgcagtgagctgagactaaatcatctcagctttgctgatgatgtattattattttacaatggtaattttaagagtatctacctgatgtcgcaagaccttaagttgttttctaacatatctggtttacaactaaatgtgtccaaaactactatatatagcaatggcatgcaggaaggggaggtaacaagggtgctgaacatgtctgatttcagcaaacataacacaccatttagataccttgtaataccaatatgtgccaagaaaatatcagcagctgagtgaaccggtctggtgcagaaaatggcagcaagaattaaaacatagagtacaagaaacctttcttttgcaagtcgagttgtgctcataaactctgtattattgacaattcatacctactagtgtcatatattaattatgcccaagaaaattattacagagattgaaaaagtttgtagagattttctgtggaagcaaagcaactcagagggctctggtagtgttgcttggtttaaactgtgaagatcaaaagctgtagggggtttaggcttcatgaacacaacaaactggaatatggcagctctgttcaagcatgtcgtgttaatagtcaataaaaatgataatttatggattaaatgggtccaatgtgtgcatcaagcaagatgactggtggaagtataaagctccttcaagtagcagctggtattggagaaaagtagtggaagcaaaggaaaaagtaaggcagctactgaatcatgttcaattttttcttgagaaatactcaatattagctagttataagctgctgaacctaaacatggattatactggagtaaagaggtctggagtaggttaaatgtcccaaagcgtagctttgttttatggttagcaatgcaagacaagttgaagacaaaagagaggctctacaagttcaaagtcttgaatgatcctaagtgtgtcttctccaacatggcagaggaaactaaatatcatttattttttgaatgtagattctctattgatgctcttaatcaggtcaaaacttggcttggctgggggattttctttggtcccttgcaggggatcctaagaagaattaaaagagccaagtattccaagttcaaaaaacaagttctttgtgctgctgttgtagctttggtgtaccaggtatggcgtaactgaaatgagaaaatatggagcttaaagattaataattcgaatcagttacttcaataaataaagtagttggttaaaaataaaattgctagtgtcatgccaaagaaagtggctaaaaaagaccggacttagtttgattctctttaaaataatgatattaaggtttttttttcttactattatatgaatcatacatgtataaaatatgtacatgcctgtttcttaaaaggtgctcgtaggttgtaaattgttatggtagaatgaagaattttgagtcatcaaaaaaatgtgagactctctaacaataagtcaatatttaattacattaataactgcaatatatattttatttggcgtttctctaaatacaatatttaatttgaattttggtaaataaataaataattgttataattaaaattgatgcatggtcgatgtggagatgtgaatggatataaagcattattcttagtcacccgtgacacccagtagttctgtaatccgtaaggagaaatactaggtaagtt

SEQ ID NO: 113451 - DNA, 2599 bp, Cannabis sativa
aaaaaatcaatctccattacacttttgcagattcatgatattgaaagaacaagagagaaagaaagaatgaaaaaacaatcgatattgtaactattgtaagcaaatttttaaaaaaaaaaaattaaaaatttaaacaataggaatcaaactgtactggtagtggtactatactattataaacagccatacaattagaggggaaaaggtaaaaaataaaataaaaatatatgagatgagagcttttcaatgaattaacaatcttttccattttctaatttctctccaatattctgttatatgctacataagaacactccccccaacaaaattccttttttttttaataatgatagtattttattattaataataattattactatttcatttccaagcttctgtaatccaaaacaccagatttcaaacccaagaaatcataaccaacactggtgcttgggttattgctatccatacttgaaattgtacagcaacactctttactgttctgcaaacccaaactacaggcgaagcagagagaagcaccgccgctcttcaattggtcaggctgctggcgttgttgttgttgatgcggcggataaggagggctaattcttagctcaaggttcaggtcaggacactgttcttgatgaactgggtttaacaacagaacacttgtcgttttctcttcttctttaacaacagaagcaccaaatgatattgtggtggttgtgttggtaccggcagtggtgttggtggctgcggtggcgcttgtggtggtcgaagtattagtcgtctcttgacctgactcgttcagtggtcggtgtgttgcagggtcaattcctctgttcaaaagctttcttcttatgtgggtgttccagtagttctttatctcattgtctgttcttccaggtagtcttccagctattaaagaccatctgtttcagaaatttcaagcaaaacccattattacttgagtggtgaaaaacaaatttttttaatttcaaaatcatttcttcgtgtgagaaggggaaaaaaaaaaggaaaaaaagcttacttgtttccaaggagactatggagcttgatgatgagttcgtcttcttcttctgtaaagtttccacgtttgaggtcaggtctaaggtaattaatccaacgaagtctacaactcttgccacaccttaggagaccggcggctttaggtagtgaacgccagcaaccctcgccgtgagcccttatgtatgcaataagtcgatcatcttcttctttagtccacgctcctttgtttgtgtgagctttctcacaacaaggagaccttcccattgagcaggagaaagaagaaatacagaactgaaaaaattagttttctttccaaattaaaaaataaacactttctcttttatttttttcttctttgtttttctttttagcaggagcggtaggaaatctggtggccttgttttttgtgttgctgaaacattaaggccggcccttgggaggacttggggtctgattttataggcttttgactaaataagagagagagaaagagagagaggagtgaccctaattgcttctagatgcgagttggtgagacaggttagagggagtggctggtggcctctctcacttgatgatattagcttcaatcatataataagttaaagagacattaactacgggtaacctccaggtaggtgtaaagtaaggtatattaaagtacaggcaagacaaggtgtgatttctgcctttttctttttcttttttttttcccctttatctatctaatctctttatatagccaagttattttagattactaattttaaatctctttatatatacacgtagaatgcaattatcagccttgtcaatttgaaactattattcctaatcaactgttttgtagagaaaaggtctacctcaatttgttcataatatctctttatttttttcactcttaactggtaaaagttacctaattatataccggtttctttttttttttttttttacttggcattgattacagtttacattggctttacataagtctaaggatgttgattgagtaatgagaagagtgaaaaagtttataaatttttaaggcgtggttaaactcaatctcaaaccaacatgtggtatattaaatttgaataagaaaatcatagctttgcttgtatggtaatactaaaaagaaaaaaactatgttattttagtaagttagttgtggtgggcatttgggaaaagaaacgttacaagtggtttggctattcttatgcacaagaatagtgatggtagttctatttctttattgattgatacactatcaagcaagagagagagagagagagagagagagagagtttctagaaggtttggaagttgggttcaaggcaggatgatgatgaaagaaaaagaagaaagttgggagatagaaaaataaaataaaagataatgagtagtgtggttgtggttgtattgtgggctttggttcaccttccacttttcttttcccttcttttttctctctctctctctctcgatttttcctaagcagcaaggggctgtgaattttcagctgaatatcaagaattctaattga

SEQ ID NO: 113452 - DNA, 4807 bp, Cannabis sativa
  modified_base (45)..(71): a, c, t, g, unknown or other
  modified_base (4045)..(4052): a, c, t, g, unknown or other
  modified_base (4205)..(4208): a, c, t, g, unknown or other
atgcaacataaaatattatttatgatctttattaactagtaaatnnnnnnnnnnnnnnnnnnnnnnnnnnnagggcacaaaacccaacaactagtgctgtagatttcatcattcaacaagtgagatgggggaaaacaactaaatttgcctggtacgaccgaacgtatatgacattctttttcatttttgatgctgcaagaccttagaaatggacccacatacgagaaaattgacctaactttggattcaataaattgtgcctcaaattgaactgtgggattctgaggaatttcaaacttacgctctttctacgacatgatgtcaaatcttagtttacctggggaaaaagtaatgataaccttgccaaggggtactttgttaaactaggagactctggccaagctgcatctcgcaaaaagcgacgatttcccattaataaccttgtctataaaacatttaaatcaagcagaggtttcttctcgatcaagtttctcattgaacaacctaattctctcatcatttatttttaatattgtttttgaatgttctaattgcgatttgaaaggtaaggaaggaagttttaagttttcttgttctaaaaaatttgaattcaaaaatttctaactaggggtaaacattctttgtacaaaaaacaaaatatcctataagtttaggaattttcgggaagataattcagggaaaagaatcgtcaaaatattaaccaccttatctattttaagcaaaaatattataaagaatgtttcaaaaaacccacaataaaaacaaatatatgacaaggagagaatttagggcaaagtttagtgacttaccggtatctgggttatactagaaatgttgaaggtttttgattgggaatctcctataccaagggtccgaaatataacaaaaacgaggttgaaaaaaaatggtattgatcacacgaaggaagaaagtcaaagacaagctggatatgcaagaacttcgtgagtaaaaatggattttttactctctggtttgtatatcgaacaaggtaaagaagaagacaaatggtgaaaaaaaactcctttttatatctaaatggagaaccattaatctaatttcaaaagtggataaaaagggctaggtttatttcaaaaaaataaaaagacgtgttaaaaatctgccaggagaaaggatgtttaattaatatgatattaatttttctcaaagaaagtaaaactgccaaaggaatgtactcattactaaattaggtaaaagacaaaattttctcaatttggatcatttaaaaaattcttccaattctagaaagagctttttaggggtaattattatgcccatatttggaaccataaatatggacatgacacatagaactttagacacaaaaattatggtaaactcataaatacatgaattgtcttagagagataattaaataacaagcaatgttagtcttacattacgcgttggcaataagactaggaattgagcaacgtatggcgagatggtaacaataaaagtcttctcgggtgtaaaggattgaagtatattgcaggaaagggtagataatgagttctttacgaacttgcattgacccacatactcattaatatattgaaagactaaggaaataaacataatataacttatttcaactatagcgaggacaaacaattttaactatcgtctcgcagaatacaaccagctatccctctaacactgtcgaataatgcgagccacaaccagaatgtgtcatctccgtaaaagcaaactgtttccaaataaaatcaaaagaaagttgacattggttattctattttaatccacatgttgtaaatgtgaaatgtggagattgtccacgtttcacgaatagttacttatataggatcgaaaagagtaactgtcatagaaaactcctttaaatagggacaaaacctaacgagaagatgatggatcattttttggaaggaaagaccttgtgagattgagtgaatattcatatttattcctctgtaataaaagtactttcccaagaaatattcagaaataggaatgactcgtaaagtatgtagatttaactacaacattacgtgaaaactctttgtgctctacatatatttattaactataagtattaatacttaattttcagggcttcatttattgttaacgaaaatctgagataatattaagattttaaaaaattataaaagagtaactaatcgttatattagtaactaaataatttttttctttctagaaatagtgaaaaaatatatgattttcatataataaaatgttcacattgaagagtagattacaattgtatttttctaagctcatccgagtagtgacgtgacaataaattatttttaaaatttgaaagaagagagataaataagaaagagagaaatgaagtagcttaagagaaggaaaaaaagagagaaagaaaggtgaaaataaaagtattgaaacatacccaaataaataaaaatattattgatacttgaccaatttatttttgacagttagatttaaaaaataacgaagttattcaaaatgacttgtttttgatctaattatcaaaaaaaacttggtcaaaatttcagtaacatttttatttattttggtatgtttgaatactcttatttatacatatctctctctctctctctctctctctttccttttttctcttctccgacattactctttttcttcccttcttctttctctctttcttatttctctttattctctcaaactgtaaaaataatttttaatcacgttgttacttggaggagcctaaaacaatactattgcaatctactctttaatgtgaatattttataatgtgggaggcatatatattttttgttatttttagaaaagaaagcatctaattactaatatagtgattagttactgttttataaatatttttaaatcttagttaacattcatttacaattaagttaattgaattatattatattatacgataactaattagtttttaaaataacaaaaatgtatataaaataattggtatataaaaatagtaaattaattatattacatgacaatttactaatttcgattttttttaaagttatctaatgtattttaaattataatctaccataatctaacttaaaaataactaattagttattaagatgtatataaataaattttaagagagtaaccaaaatacatctcaaattatatgatataaaaataaaactttttacataaaagaaactaattagtttcttattaacattattagtaattaaaaagttatttttaaaaatacagaaaaataaaaaaagaaaaaattagaaaactttaaaaaatatcaaaaagttaaatttagttgatattagtaatcatagtaatgttattattgtaaattagataaaaaatgtatattattataatttttcttaaaaaaataagccgtgaagtataaaattcattttttttttcttttggtctgtcggcgtcagaagcaaaccaccgcttcattttgttccagccgcattcctctcttcaatgcatatgttcagttcttctgccttttcccaaagcccaacagtggcccattctatttctttctttctttgttccctttcaaaattaatatagtataagcccaaataaaaacaaaaaactaattaatttggactgataaatggataggcactttatacaataaatttggctttagtgagataaaaaacaaaaacaatttgatgaaccacataataaaagtgctctccattttgaccccataccacaaatttattatttgtatttaaatttctacaaaatcacaaaattgaattagttatagaaaattaaataaaaaaataaaggaaaattacccttttttttacttttttttttttttttaatttacggtttaagtttctaaagtagttacagcggtagttgcaataggaatctctgtacgattttttgttacaatttaggttgcagtgctatttgcaatagtagtttctatatagaattccgtaannnnnnnnaaaaaaaaaaaaaaaactgttttcaagggaaaaaaaaaaaaaaaaaaaaaaaaacccgtaattttattatataaaaaaataaaaaaaaaacataaatacttcatataatttaatattataactaatagcaatatataataataataataatannnntaataataataataataatacattcatacatacgcgtattggttttagatgagaggttaattaagtcttttaccaccttgtttcttgacacatgtattgaatgagtgtagggtctttagggtaattttttacacaaaatgaaacattttgtataatagcattaattgttattatgaacttaatgatgctcaacatcatattaacgtggtgcgttagttgtttttttatatattttttattaaattaaaatatatgatttaatattaatttacaccaataacaataacaatatatatgttatatcttatagtgtttgtattcaggggcggacccacatagaggcgaggtagggcagtcgcccaccctgaaaaaaaaaatcgtgaaaaaaatgtatatgcattttacttagttacagcatatatttataaataaaagtgatatctatatatataaaataagctttggtataatggtaaagtcattctaatcccgataaaagcatgtttactttagtattttactttttgaacctctaccaataatataatgttttaattattgaaccaaatatattttattgttattttttttttttactt

SEQ ID NO: 113453 - DNA, 4165 bp, Cannabis sativa
  modified_base (4110)..(4139): a, c, t, g, unknown or other
agagagagagagagagaggggacatggacttcattaaatagggtaacagtaaacatcttaggcatatttgcaccttaaaaaactttttgacaatctctggagatgaatcccaaggttgcatactgaaaggatgcttcatcttgacagaatttcgtggaaaatttgccaacagatctgacagatgaaaacaaattctacttacatattttataatcattaattcgagaataaaaagtaaaaagatgggtgcatatgtatcacactactgaactccagctttaagtggaaagtatcatttaaactcaagaccactctgctaaaatacaattgtaagcaactgctcatgccaaaagaattaaagattaaacttttaaaataagtggacaagcttctgattaagtagttccctgaaaaactgatccaaataccttgatgtccagtagtagaatgaccagaacaccgcggtctatttgatactgcttgtaattctctgctctccaactcttcatcatccacgagcattgaaatctgatttaagctttcttgagaatgtcctccctccaaagcaagttcacattttgttttgcccgtcggcttctgatttgcatctttgtaagatttcacctggaatgtaacaacatgttatgtatagaatatctaagagattgtgaaggcacagatcgcatttcaataacaaataggtacttacctctcttcttttaacaaaatatttcttcttcttcttctcttgtaatttgtcccttagccttccctgtatctaaataagcaaccaacctttcagcctaccagtaaacttttttcaaattagaattcaaataaattttgaaaatattcaatcataaaccctcaatcaagcttataaggaaatagaaaagtatgcaacaccgtctaaatgacttacagtaagaattttttggttttttggttttctagcttgaatgtgtggatttcgtgcaacagattttgaaattgatggcccagtttcttcattggtaaaatcgatgctggtaggataatctccagcatgaggattaattacccgccatgctgtcattaaacctttacccataccatgcttctttgatggtgcattcttgccactacaaattgtatttatgaaagcatgcttggaaacctaattgagatcatactgttagttaaaaaatacgaaaacttggtgccaagtaaaggaagaagaaagaagcccgtatgaatatcaaaggttcaagaaagaggttcatttactcccaacagaaaatctgtggcctaagccaaatataaaaaataactaaaagaagaagcttttctaaaatttcgtttcaggtaccttcgtccttttagccgctctctggctctctttgcaagaagaatagcaaatttcggaatctaagagaagtagagaacagcaacaaaaaatcaagaagtgtgtgaaaacacatccaaaatctaaagtcataatgaaaaacaaagtaaaaagagcagattggcagaaaaagaacacagcaataagaataatcattaaaccacataaagacgtggactaaaaaattatccaggaaaatactctcactgtaatactattcacaagcagactggtttttattacagtacagctgtcaaacaacacattctatagatataaaaaacggatacaaagccaaaatgttttaggcaagaactagacaagtagcaagtagctaagcaccagttaacaatacattaataaagttttttaaacagaggctcaaatgctcaaagaaagaccatcaacaataattaatgctaagatgaagaaggatttagacaagctaagtttataaaaccttcaatacacattcaaaagccctagtaattttttgatttgagtaagctcacagaacaaaagaaaatcacatttccaaacattaggacgaaagccttaaattatatttctataaagtagtgaatcaatcctactgcgtacctttgcaatagagaaggtctcctgaagaaggagaatcaaattccacaccaaggggaggaccatccttccgaaagacccttctgagaatgtagtctggggtaaacaaatcctgggaaattatgttcttagtagtagatgccttttggcgtttggaagataaagaacgtgcaaccacctttctagcagcatgtttctcctttgaagttgaatttgatgatatagttattacattttctcttttctcctttcttcttttctcaacaaaccaacactgaatctgcttggaagtcaatccggcagtagcggcatagttttcaatgtccatttgtgtaggatatttgttttctgactcagtaatcataatattagatactccaaccattcggggtaaacatcaaaatagattcttgtggcataagcttaaataagtgtatacgaaccatataatgtcttctaaactacagatcattgttatgtaagctattgcacaaaaaacagaggttcaatgagtgcttttcggttttggcaatcctctatacctcttgtccttttaggcttcatatcgttgttttcttaattattgtcaaacaagttacattcgttcctttaaaattaataataaaaataaaatataattatcattttgaaagaagaaaaaataaggcttgtagtgggggtttaattgcaaaggaaggagagaaatataagagcaacagaaaatatatgaaatgtctactgttgcttcacaacaacatatcatgggtttttggaataattgggcttccggtatgtattgttcagctttttgttgagcatgaagttgtaagtatagcatatatgttgggtaattgagcttcctcttggatagcataacttcaaaattggttctatttgtattcaatactttatttctttcttaatttttttttttttaagaaaaaaagagagatagagaaagaggttacgcttgttacctaagtacatggtgtcaagaccttcaagttgtacaggtgttttcctcttaatctccatgatttttcccttgtgggtattttccgcttccggtatctgcaactcccaataaaaaataaataaataaaccttcatttcctcatgtaattgcactaaaacttcagtatctagaagtatagaaagaaggaaatcatttctcttactttctttcttttccattcggtttgaaaacgaaaagtatacataaataaacaaatggattaacatcaacgaatgttaaattttcaatcaagtgcaaattattcaattatattctgaattaagcccaaaaccacttggagtagcgaaaacaaagaaagccataagaattttgcagaaaatagaagaagagcgagggaaatgaaaagagaaaaacaaaaacaaagtaagtttgggttgggttggtctacagattggagagaatagaattgagaaacttacacagagagtctctctgtctgggtcggtgtctcagtgagatgccatggaagacgtgaggttgattgaggatgagctcgagaggaaaagcagagcagtgaagtgagaagggtttagaggcatgtgaagataaattatcaacacgtagggttttgggtgtgggttttaccataaaattatttttaatttttattacaaaattaaataaatatctacatatctttttctcctcatttacgtgccactgccaccaaaatattttcttttcttttttaatatctgttaattccatatttttagacattatataagaaaagaaatagtaaatatttactctcttatttatttattttaaaagtatttactctcttatttaaaaaagaattaataataacagattaaaattaaatcatatttcacaaggtgctacacctacagaaaaaaagggaaaacaaaaattattgtcataaatttaaatatatatataagttaggaaactaatgttgtcgaaatataatttaaaatataatattttgatatgtgtattataaataaaataataatattaaaattagatatataattttgggtgattctaccgtacacccctttaaaaggatgtactgatgtaccgtctacttgttttggcatctagaaaaaaaatttagtctattttnnnnnnnnnnnnnnnnnnnnnnnnnnnnnnttaagatatcctacaaaattttgaga

SEQ ID NO: 113454 - DNA, 4905 bp, Cannabis sativa
  modified_base (26)..(44): a, c, t, g, unknown or other
  modified_base (2989)..(3022): a, c, t, g, unknown or other
  modified_base (4610)..(4611): a, c, t, g, unknown or other
  modified_base (4845)..(4848): a, c, t, g, unknown or other
tattaataaataaatctgattatatnnnnnnnnnnnnnnnnnnnggcataaaacccaacactacattgcatagaaagatcagtgggaagctgtaatatctaatcatcactagacttgacatagcctatcctgtaaacaaactaagtcaattttttactgctcctagatctaggcatctccaagctgcacaaagggttttgcaatatgttaagtcaagtccatgataaggaatacttttgcctgttacatttgaaatattactcaaagcctacacaaactctaactgggcagcatgtgtggatactaggagattaactatatgattttatgtttttcttggtgattctatcatctcttggaaaagaaaaaagcaacagatagtttcgaggtcctctgctgaagtagagtacagggcaatgacaaatactgtgagtgagattacttgggaattgtcattgctcgaggaactcaggattgaacacaaaggtccagctttgatgttctgtgacaacaaggcagctttgcatattgcagccaatcctatgtttcatgaaagaacgaaagacattgagattgactgccatttaatcagacaaaagatacaggacaacttgattaagacctcacatgtctccaccaaagatcaacttgcagatatatggtaaccaaggcacttctacctaaccagttcaagactttaaaggacaagattggattggtagacatataccatccatcttgagggggagtatcaagctagaccgttgaactgttagttagagttagttaggcaagttgttagtggttaattgttgttcagttatggtcataagcaactaacttgtaaatgtatattcgagttatatatagctcattcattatactctgtattcaactcttgtcaatcaataaaacagagttcattttccttctatgttcattattttctctctcgatctaataaatgtgattcttgagacaaattgtcttattgttttttaagcaatctgtaataatgtggtgtgtcattaaagaatgtcgatccttgcatttagagttcagaagtattttattattttttgttaaatgttttgctaataaagtagttcatttcttagcacaacatgtgtttttaatttcattatagattgtatttttaatgagctttctatttgctttgatttcaaaactgtgttactatacgatttgtattaataaagtctttgaaaaaataccatccagaagagttatatttaaagtgatcttaatgtgtctaatctcaaatatagtacaagcacaatattattgtgatgaaagtggtcagagttattgacaatagttattattaatgtttgcacaaaaattgagatgagtaaatgtgatttctcatatggcatggtgtgggaggaacattgttacggttcattaagatgtctagcattattatgaagtgatattttataattggttaacgattttttaatctttattaaaataaaatatgtagacctaatattgaattgcaccaataataatattacacatctcaaatatgctaagactataagtgccttttagagcatctccaatggagtgccaaaaaggtggtgtattgctatattttagcacacttgaaaaaaattactactccaataatgttctaaaaagtgtgttaattttggcccaagttaaatgttgtgtcaaattcggcacaagatatagcattgtgctaaatttagtccacaataaatattatttttttatttactataatgtcactaattattatgattcattggcttttactaaactttacattctttatttaccatattacaattattaaataataaaaaaaaattatttttctatattctcaataaaatattaaatggccatcaatataatttatttttttttttcatatttacatcttgtgtattggagtacaattataaatagtcgcctaaatatagtacaaacttattttgtgtgctaaatttagcttaaattttagatcttccattggagatagtcttagcgtttctcggtgtgagagtggtcaaccatgtagtgagactctctccaatgcaatgttgaagataaatgttaaaagacatcagtggtgcctagtacattctaatatgtttttattagtataattaagtattgagtctcaaataatttaatataataatttttgtaatatatcactactcaatcacaaaacgtcacttttaagtggtactaaacaccactagtatcttgtagcaatattcaatatttaaatattgtgttaaatttaacacaaaaaagtaaacaaatattatatttgttacaatatttggtactatactctaatacacaatggcattttaagatacaatgtaaaatgtcaacaataattattaataaattaaatatttaaaaaataattaataatattgtaattaaaatatatatattaaagtttgttgatatgtagcaaaacatatattaaaaagttgaatttattgtgcgttaaatttggtataatattttttttttttgtaataaattttatataatataattttttgtattaaatttgacagaacttttggtataaatcaaattaatacaagatttaacattggagttaattttttaaaaaaattactaaaatatagcataacactatgttagcacttattggaaatgtatacactattgaagtctcatttgttattgctatcaccaattggattattctatcacctattatgttaagccaaaattgttcattattgcagccataaattacaatacaaattgttcttttcttttttgtttgttgttggataccattaagccatacttccattcactatggttaggtggtggaattgtattgtattgtaccatatgtacttggattcgttatgagatcttgtcttcaaattattatagtcggtgtaattaccacaattgtaaaataataataataatnnnnnnnnnnnnnnnnnnnnnnnnnnnnnnnnnnataataataataataataacccaaaccaacaactactatatattgttttcttctttttttttttccaaataaaagcttaggttataagagcaaccttttatttttggcagttaaggtgggattcaaatgttttgagttttttgaataataacaaattgtaccatacagtagtccatgtgagtgagtaccatatgtgtttctaaatggtagttcatatctttattttaacttagtaactatagactctgtcttttacctctttggccaggaattgtagtatgaagatgttaacccatcggattgtaataatgagctgtagtcccacattgagaattgataaggaaatttgatacctaagacaagagagtgtgagaaccaaacacatctagattttggaatagtaggtgatatatataaatacataggatagctatgtatgattaagatttaaaagagaaaacaaaaaacatgttccatttctataaatgaacacttgagtgatgtgtagtgaattatgtttttaattatttgagtaacaattatttaaaagagtatggacccatgatagctaactaaaagggaaaaggaaaatattaaggcattaagtgagactgtagttgtagaggacttgagaatgatagaacgtctacattccaaacaagtgtgaaagatggttcatatttcactcagctttcaaatctgccttcttctcatttttttttatttttttttagcttgcctttatatgaagttattttctttttttatactttgtcaaatgtttggtttgagttgtatgtggataaatacccttttcttttcccttgtcttcttataaactcaatgtatagcttagcgtgacagctactatgcctatattatcatggtcattttaatggaacagtttaagccaattttattcaattattagcaattgtaaagataccactttttgataatctttagaaaagagcatatattataagctgttgcaattattgtgagaaggggtcatgtgagttatgatcattgcttcaaaggaccctcttgtgaaggacctccaagcaaggacccagtttggaaaaagaaattttacaagtcactcttttgatcaattgataataacagtaatggaaacaataatgggtcttttgagtgatgatcattgtcccaaaggtccctacctttaattatcttttattttatttattttggaagaactgtaaagacccatttttctttggggaaagaaattacatgtcacccttctgagcacttgatgataagaggaaaaaaagggtgaaaccaacaaggcaaccaatgacatctttagaacgtaatctctctatctatctaagtctagtgattttgagaaaatattaataaaataaacatttgcatggtgtggaaacagaggaatgttatggcatgtgttgtccattgtgattttattaagatcatggatctgcataatgataagaaggcatgggcgtatcgtcaaacctagtgtctttaattaacagtgtgttgtactatttataaatgcttgtttggtcaagcttagattaaattattattattattattnntattattattatttgaataaaaattatgaaatttattaattaataaattcgttcaaaacagtagaacgcacttcagaagaaaagtcctcaagctgaagcacacgacctgtagagaaacaagagtctcttgccaagcaatgagccaacttatttgcggatcgttttacaaaacacaaatcaataaaagataaagtcaaaagcaaaattcgaaacatcttgaacaataagaccaannnntgaaggcataaaaataccgctctaaatcgcttggacacacaccaagctatctgtttc

SEQ ID NO: 113455 - DNA, 1248 bp, Cannabis sativa
atccgattcgtaaaaaaattaagcggggcgggtcggatctgatccaagatccaataactatccgaatgtttcggatcagtaatgatccgtcgaatcgaatcactgatccgacccgaatgaatgaatctttttgccatgcctaaatatttctacatttgtttcattaattatatatcacatattatagatgatattattacctactcattactcattttccattacttcatacacaaatgtataatatattaatctattcttctttataacacattttctattttaaaaaaagatgagtaaattgtgttgctcaaaaattaaatacatgatgtgcaaaaatcagttgagactactcaacttttcaaaccaaattatatcatctttttcttttaaaatgaaaaaaacttatcatctatatcttttttttaatcttaattatttacaataataatagtatacatttttcgcttcccaaagcacaatattccgagcttcccaactttacaaccaagtgatgaacttatattttggaatactaaaatgattctaaataaaagcatacccaactttcttcaagctgtctctttcggccaaagtttgggacaaagttgagaaatgttaaatttcattgacatgaattcaattagataaattttgtctttaatctcatcctttacctttacaattttcttccgataccaacttccccttgtggagctttatagctctaccaatcttgatttttaatatacactgagttaatccatttcacacacaaattatctttctctgaacaatgtcccacacatattttgccaaagctccaatgttctattgttcaatatttctaaaacccaatccacgtaagcctttgttaaacctcgaactcaatcccacatgctgggaatgactccaagaacaatccgagaacactcacaacttagaacataatgtgtatagctttactactctgtaatgacaagaatgtttacaatttgatgaactatcttacatgtaaaggattagaggtatttacagactgaatatccccactaataatatcttaacagaattgagacaagtctgtgaagttaataggcttaactggctataacagctaacaactaactaactacctaattgacactacaaaaaaaactgttatttttagtgacaactttttagtcataatataatttttttgtaactaaatatgacttttagtcacagcaaaatgttacttgtgac

SEQ ID NO: 113456 - DNA, 4787 bp, Cannabis sativa
  modified_base (2742)..(2750): a, c, t, g, unknown or other
  modified_base (4620)..(4641): a, c, t, g, unknown or other
atccacataattattaatatttataacagatttaatatttttatattcggtaatagtagaaatttgatggattggtcaaaaatatcagtataaatagtatttaagaggcagatattttattaatacttgataattatgaatttatgtgggagaattgaaattgaatattttaaccctaagtttaatatattagtttattaagaaaaggtattttagtcatttacccttttattttgatgatatacatcaattatatgtagataagttagaatttttagtaaaaataaaaaatcaatataactcttccctttgctccatttttggccgaaccaaacaaattttcctcaccaaatttctctccatctttgtgagaattcaaggtaagaattgaggtttggtcaattgaagagctaaaagaggaatcaaggtatgaatcggaggttaattctttagtttttatatgtgggagttaggtttttgttacgggaagatagaaaaactttaacttattaatggtaaattttgattctttgagtcaaattaaaaaattagatgctagtcttgattataatattctattgtttaaggaagtttggttcaatttggataggttttggacaaatttaagggcttagaattcaaaatattaatgttacaacctgccaggaatcgaaattccggttgacaattggacttccagatggggcagtttcaggaacgactaattttttgtattttgaccataactttttacttcgatattcattttggacgttctatatatggttagaaagcttgtgaaaagctctacagcatggtatataatttagaactaaaatatgtgtgttattttagggtattttcactacgtagttcggtagaaaaactctaaattttacgcatgggtattagaaagtgttttagaatagacacttactaatttatcgctaatgtgacttaagactttcgatcatcgagcagttttccactcagtttaaccgacacacttgaatttagaattaaaataagattagtaattagatgcacatatgcacatgtttagtatacatgcattatgtattgcgatgtagctaacatatcagaaataacagtattggtgtacatagagttgtaccgagataccgataaatatatgttagacaatattaaaaagtatgaattaacgctaccaacactagtacgactacagtactgagtgcagtttagtattatggttaattgtactatagttacaaatgttcaagactctcaaatatatttccatgtgtacataaagccaaagcaaagactgaataatagtgatattagagcttgatgaagattgtacatatctagacgtctagacctagatggttgcaatctttgagaaactacatgcttagttttgtttatgtcgttggacgatacttttgtttaatatgtaaattatgtacttttataaatagattttgggatcccgaattgtaagtgttttataaatatgttgtatgtttagtaatattttaattattacaagaattttattaaacacacttttatagcaacaatattttactagcaaaagatagcacgacaattaagaaaataccataacgtgccttagctagtagggcgttacaatttggtgtcagagctgcaaagtttgttctccaaagaccgctagatatgtataatcatcatcagagacaagctcgactcacagttcagtaagcttttatgtgttttagtagctcaaataagatagcatgattagaaatacataataggaatcatattagtagtatgacagttgaataactataagattacgtttccatgttatgcaataattatggtatgcttatgatcactgcttggccgacctaacttatgaataccaggctcgtcctatagaatggacacccaacaaaataatagaagtcagggtgacatggttgagactggaggtggttggagaaatcagaatccctctcatactcgtagccgaggaagaggctgtggtcggggtcatggcgatagtaatgtcaatctgccataggctctagtagactgggaacgagggtttgcagaaatacaaactagaattcagagacaagaagatgagatacaacagcttcggcagcaagctcctcctattacacctcctcctccggcacccctagttcttgttccaaagttgccagtaggacaacctgctgctggtaacaggatggaacctctttacggaaggtttcaaaagtagggacctccaaatatagatatgctataaattatctattgttacaatctaaacagtcattgatcctctataggcgatttatattgaataaggatgaatttactattttacccttcaatatattttatccttaaaatacttagctacatgtaaatgatattttagtaaactaataattactaaaatgagcattaatgccctggaaagaatattctacttataaagtgtaagaaaaaacatcgttgattatcaagttagtgtaaatccagtgcactaataaatcatgagactaaatagtttaaagcatataataatgattattttccactgtgtagaaaatactataatcatgaatagctatatgtttgagatttaataaaatttatatattaaacatataatcatgaaagtaattatgtgaaccatacaacataaaatgatttctgatcttttattagttaataaatctgattatattgaannnnnnnnnatttagggcataaaatctcaaaaaactcccacttacactaatataaaactaaatacatttcaattaatatcgtcttcttgatgtccaaatcaagagtggtatgtagtattatctttgtaataggatctgacagattgtattcagtatcgaccttctccaccattacatcctccttagtcacaaaatccttgatattgtaaaactcctatctatatgtgtactcctcttagggtattggattctttactatttcacaactatatccgtgttatcaggaagtaacactagtagttaatacatgattggaataacgccaaaaatggtacagaacttttcataggctgaataattatctagtagccttctggaacactttaatattcagtctcactagtagagttagagactctggataagtttttacactttcccaaaaattactgctccaccccagagtaatcactatcccaaatttggagtttctagcattaatgtaaatcttagaaatctgagtcgctgtagtctaaagggttccaaaaaatatcaaccgtatagactaacatataagtcttccttaatcttaagatttatttgattgtcttctaatgttcctttcttagattataccgatacctactcataactcccactcaacatcatgtgtctggtctaatgcataccaaaacatacatgagacctctcattgttgatgctcaagaaattctttccttaacttttatcttttataggaatagttgaaaatgttccttagataaactctatgtctgggagtcaaatgacttcttttagagttagccattgaaaaatgctctaacatcttacaaaagtaagttgcttgcactggagtaagtaagttatcaggtataccacaagccataagttcaaatgatctcaaacctatgatactaggatcaagaagtttgcttaaatccattgaatggacctattattagaatttctcttattatccttataatagaaaacttttagttgctctatgtgaatagttttaaccatagttatcttggctccaattcttagtcccttactaggactatccattgcttatttaaactaacaatgaactgtcattattagtgtctttcaagtcataacaaagtgggttcttagaaaacctcccactacgacgagatactgggactttctatctaagaacatcagtggtattgaccttatcggttgtgttaatacaacaaagacagtgagaccatcttacatagaataagatgatagaatactttgggattgaatcaaatagtatctcctctactttgctactttattttcaaatttagttatgttcttagaaaattagtatttattgaaataaacactttcttatcttaatgaccataggatggtccacctctaatcactttagaaaagctattaaacatgcaaatcttagttaacagttctaacttttcttgagttcatgatcaaggcatccctgaatctagtaattgtacactaagtatacgaccattccatcattttaaggttttcttcgaatcagacatagatgggacaacctatagaatgtcgtttgatgtctctaagatgttggattatattttaccaggacctagatttactaacaagtatggttattaacatcctaaatatgaatttttaaaacaatgaatcgtaaacacatataaagtatgagaaactttacattggttgcagcgaaattaaatgactctttccactcagatctctaatccttgttcctttctatcgcagagtataatcaagatctgggcccgacactccttcagttgtttggattcttcacagtcctacacactatgattgaggactaacnnnnnnnnnnnnnnnnnnnnnncaatcactaaggctcgaatttttaatgtgaagagcactataggatttcgaaaatagaagagagaaaagaagaagaagaagaagtctcaaactctctagttgtcagacaagatgtaaactaggtttagagtcattagtttgattatg

SEQ ID NO: 113457 - DNA, 2692 bp, Cannabis sativa
  modified_base (1913)..(1920): a, c, t, g, unknown or other
ggcggtagtggtgccaccgccaccgccaccggtgtgggctccaagagcaataaaggtgggttattggtggcaagatgagaaggtggcatgggaggtaaagttggctgagccggggaagatgtagtggcggcagcggcggcggcggcaacagctggagacaccccatttccacgtaggagaagatcaaggcgagagtaaagaggccatgaagatgcatcggtagtggactcagatcggtaccttttcttcatggactcaatcttgtttttgcattgagtttgtgtttttggtgatttggtagaattggctcttgaagatacatatcttgcaacatcttcccaatcatgtcccttaagcttagctctatttcttaaaacccacttactttcataagcctctaaaaggcttgaaacagctccttcactccactcatctctctttaacctatctccgcccccactaccgccaccaccgttaaagggttttcgaggagactcttctttcgggatggcggttaatggagcggcgatagtagtgttgttaggaagaagagatggactctgatgatggtgatgaatactattttctttgtccatctcttctcatccccatactatgtcttaatttgtttgtttgttttgggttttttttttctttttttttttacctctttgttttaagcagctataaaactacatagatagatagaagagaaaagaagagaaccactagcatttgagagaaggaaaaaggagatgggtatagcgtaagtggccaaccaaagaaagaaagtgagtgaaaagtgagagggaaagccactagcagtatatctattattagtgaatatgtatacactcatcctagactaatattctaaccctactaattaactttatcaaatgtttttttgtaaatatttttatttatttatttagatataataatttttttagtaatgataaggattcaaacttttagaatttaaaatttatttttaagataattaaatatgaattttcgagagcagttttatttcatgttgttcgctctaagaatttaacacctcatgcagttagacaatgaattattttgattcgaggaggtttagcataaaccgtatatgaccgtatataaattggttttggtatctttaaaaaattaagaacaaaaagggaataaaaggaaagatttaaagagttagtggaggaaggaaaagaaaaatgaatagtgatgagactttttgagggggtcaaataagtaaatgatgtgaagttgttttaactttttttttaattggttgattatgtggtttgtaagtatgttggttttattgttgtgttatatattttggctgttagcgttgatatgaagccaaccaagagatccactggagaaagtgttagagagaggtggtgtggtggtggtggtgggtcagtcacgtgggtctgtcacccactccatatatatatatctctatcatcatgcaccactatatatatacttactactactactactaccactaaaccaaattgtgataccgtcactcataccctaaccccctactactactactattacctctccttttcatcttttcttttttatcattatatacaaaaattgatttcctttttaactttgcctttatttatgcccttttgaaaactttttggtgggattcatattgccacttgaattgagagcttttatttcttttttaatttgaagggagagaaggaattagggcccatcaaccgctctccaatattactattattattatgtattgttaattaatgagaagtagtttagggtgattatacaatgcatttttttaaagagatgtattgatgtatactttaatgtacattgtagttattcaagatatcttataaaattttgagaaattnnnnnnnntttataatataaaaaataatatttaaacaatctattttacacgcgtataaaataaaataggtatgtgtataacatactgtttgaacgcagtttttggcatgttaaatttttctgaatttcttaaaattttacaggatatcttaaataactatattttacatgactatgagaaaaaaattaattaaaaaataatttcgaatactaaataagataaagatgtattagtgcatctcttttaaaaatgtacattataaaattttccaataatttatatgtgtattatatcatatctctttgttattggtagatacacttattctttttgaccaaccgtaaaatgccatgccaccattgccatatcacttggaggtttgctgagtcattttgatgccaaagttggaaacctaaaacacaaattaaaccacacacaatatcaccatgtccatcgaataatatttgttcgaataaagaagaatgataaacataaatagtggattttttaaaaaaggaaaaggaagccctttaccattatatcttcttattaatttattataataatatgaccttggtattgttggtgctttttgatagattcatatatgaaaactaaaggatatgtgaataattctatgtgaaatacacactactacaatgttggcctttaaaggttactttttcacccacatttataaaaaaggaagctaaaggctgtgaaaatacccgctttgttcgaaattgacatttagaggcggttttttgataaaaaccgtag

SEQ ID NO: 113458 - DNA, 1306 bp, Cannabis sativa
  modified_base (1267)..(1275): a, c, t, g, unknown or other
aatttacatcactttttggcacaccattagagcacattaaatgagctatattttaatttttcaccacttatttgcacctcaattgaagatgctcttaggaaagaaaatatacacttctaattcattcatacatattaagagtaaaaaagtggttggaaaaagtaaaaaacaaataatcttaatggctctatatctgaacgaatcagattcaaactctcattaagtgcaaacaaaattaataatttgtaattataatcattgttattagtaattgttcacaagttaatattgttacagtaaattaaaaattgtctttatattcctcaatgaagttgtttaatttagactattcctcatcagaccattctactatttttcttgaaaagcacactcaccaacatggtgtttctttcaagtcttttagatttgagaatgctttgttatttgatcccatgtgttttcaaattgtaaaaaacagctagaaaactaatgaaggggctttggtccaagaaaagcttgttatttgtggtgaaaatttagcatgttggggtgattctgttactgaaattttcaagcagcgtattaataatgctaaggtggcccttaagtgcttgaagggtaaaagtgatcctgaggcatgtagcttgtatgtgggtgagaaaaatagtttggctactgctcttcaccaacgtgagatttactggtgtcaacgttctaagcagctctgactcaaagatggttattagaatagtaagtttttccatgcttctgcgtcttcgagaagaaaaaataattttattcacaagcttcaaagtgattatggtctttggattaattgggataatgggttggataaagttatggtggattattttaaaatacttttttcccttctaatgtggaatggtaaaaaattgttgattatgcatttaatttagtttctgatggtcaaaatgaggagcttttgaagctagattcttttgaggaagttaagagtgttttgtttgatatgcatccagattctcttggtctgatgggatgacccctgcattttataaaaaaaaaaaattggtctattgtgggttctgatgtggtggctacagttagagcttttttcgaatgttctcttgttcctccgagtttgaatgatactaaccttgtccctgttccaaaaaagaaaaatcccttagggatgggagatcttagaccgattgagctatgtaatgtcctttataaaaggctaattaggatttttttcccccgaacnnnnnnnnntaccaaatcatgccccctgaactattgagat

SEQ ID NO: 113459 - DNA, 942 bp, Cannabis sativa
gtaaaaaatgtagaacccaattcagagtaaaatactaaagtctcatttcagagattaaaccctaaatctcattaaactaaaaatctttcagagagagagagaggttgggagagagagagagtaagagcgatatacatagaggaagagattacctgaacggaagccattgaagatcattgaaattgcagaactaatggagagcgagagagaagcgagaaaagaggaaaaaagtgtttttaattttttttttttaaaatcattcaaaatctgtttttaaaaatttacataaatttgattttaaattttaaaaacaaaaaacaaaatattttaccgaacgtacttttattttaaattactaaattttttattaaaaaaacaaaaaatcatttttaaaatgattaccgaacaaccccttattttttgaagatgttgtttctcatttaaatgggcaacactacattccaaagaaacgtcttttctattctatgtcctactctaatttttaaggatcctcttaagctgttgaggttgctcaattcctcaagcttgccaacatcctttgacttcgaactgcattatttaaacatgtctaacctacaaagagaagtcaatctatcaaatccacttggcatatgagttaacctgtaacaaccttccagcaaaagatgcctcaagttcaacaatttctctatctcttgaggtaatatcctaagactactacaatgtttaagattcaaagtatgcaaattatgcaacctagttatagaattagaaagaaatgcgaacctttttgatgaaatatcaagttatcttaaatgttttagtttaccaatagtgctcgatagttttttttaaggctaattagcaatttcccctccgaactttgacatatactaaatcatgccccttgaacttttttggtcgttaaaaattctccctgaa

SEQ ID NO: 113460 - DNA, 3571 bp, Cannabis sativa
agtttttaaaatgtataaattttttaaataatttttttttgcacatttttttgtaattattttatttttgttgtacatttatgaaaaaagcccttaaaaatatgtggtacaaagaatattaagggtatatcaattataaccatctacaaacaaaattaacaccatttttttttttataaacattaacataattattattataataataacctcataaaatgactcgttaaagctgttctatatttagagtattattattattaattagtacatatttgcctatatacctttttgttttgacactgccttttatagataggaattcatggttttccttcattcctaagaaaaaaaaaaaaaaactaagcatggccattagattgacgaaataaacgattacacatctttaattaaacaccattatttcgtttcttttcactcatttttctccaatctctctctttctctcttcttaagtttctttcttttttcttttcccactttctatctctcaacttttccaggaaaaaaaaaagaaaaaagaaaaagaaagtgaaatgaaatgaaatgcacacgaaattgagtacattggaattgagaagattatgaattcatcaacaacaatacaagagtaaaaattttattataaaatgaatcatcactagagagagattattttttattctcagctacatttcttataaatcattatatttttccttccatattatgacaacaataagatgatgggcttgttaaaaggcttaagagatagatctctccaatatttggtacgtatacatttctcagcagttagccctatctaaacgtcattattcctgtcttctaatattaaagtgttcttttgttgaggttatggcattattaattttgtgctaatcaacattccacttcaaaacttttagccaacgctttagtcatgaaccatcgatgtaacctcatgccttcatgtgtttgtgtattttatctatatttgatatatgaaatatggttttaatatttgtagcatcatattcgtttattctcgggatggataggatagttttaggggcctggttttttttttgaagtatttgcttctcaattttattttattattttttttaatgaagtatttgcttctcaattgatttcaagaaaattttgaatttccatatatgtgatcttagtcttgttttacttgttattattgttgtggttgttaattattaattatgaaagcataattggttaatatataattaatgagaaagaatcaaccactttttaagtaagtcgtgtgcatgctaatgaatttaatgtaattatttaaaatacaataaataatacaaccaattgaatgacactcctacccgcaatattgactctgggcttggccctctaaacttgaaaaataaatttgattaaataaaattaattatttaattaatatataaatatagttagatcaaataaattatattttaattaaaagattataactaaatagaattacaattaaatattaatataataataataacaataaataatcattactaatatatcataataaaataatttttaagtaaatataatatttatatatgtattacaatttaaaataaaattattaattttaaataaaataaaattatatattatatattttattaatatataattattttcttttaatagatgacttacagtttatagcttatttataattgacagggatttgattttgttataacaaattagaccgtattttaataaactttattagaaattttattatatatattaaaaaaatataatttttaagaaaaaaaaaagaaaaaagaaaaagtctaaaagtatggaatgagagtgtcgtgtgactcgtgtctgtgtcactgtgtgcacgcttttcctccaacttagaaagggaatgacgtgtataactgccgcatattaggagggcccggtctctatggctttgcttgaccattcggctttgctttctttccgtcgaggaacaacacaatgccatttcttgcttaacctcaccaatgaactccaaagctattacacaatctcccccaaccccccccaaaaaaaaagaaaattaggaaacagctaaaaaacccatttccttttttttttcttctcagcgttctcaatgaagggtatgtttctaatgaacatttgtttttggtggggtatggtctgttttgatgatcattcagtggaactttcctgttgttgtgttgtcatattgttcttgttcttggtattgtgatatttgagctgcattttaatttgatcaaaatgtggatgcagggtggagttggtcaggctttctggagtttctaatgtatttgtgatttggggattagaggatgactacccggatccaggaagctcctcaggtagctttatgctttataccaatccttattcttatttttagattctattttttactttttccaatatttatgcgtacatacatatattatgaagagacatgtggacatgcacatcatacatatacatgtgtcgatagatatgcatatggacatttcacatgtctaagttctagcttgcatagcgggctagctattataatttttttaaaaaaatcagcatttgataaagtttgttttcgtaaattgtttagaaagttctgatcacctggggtatctttgtttagggagattattgtgtttctcttggtggtggtggtggtggtggtgctactgctactgctccagctcctcctcctctgcccagtccagctgagcaattgcgtactcgtgtttgcaatacggtaaagatcatgttttcccccactagattttggagctgaatttaaattatatccattggtttgtactaagttcttgtctggcatcagcattatcatatattgagtgttataatcgttacccaaagtacccatgtctattgttgtttcttttcacatagagtattttgttcagtctcatttatgttgtactcgtcacatcttcagtgcatcaaaaattttgtgaaaacattgattatgatggaatttatgcttctacttcatggattctttagcagttcgctcattaagtcatttgttcctaacaccatcgttctttgaaaattgagaaactctttaatctaaatcaatatatttttaatttttcaggttttcaagagtgggccactgttcatatcatcgaaaggtctaacatttatttctcccatataaaaatggctagtttttttttttttttttttttttaatggatttgaaaagggaaatttgattttctatacttagaaaatcttaaaatttttttcctaaatacatacttaataatattggttatatatgaccacattcctaatatcccacaaatacccctcccatttgaaaaaaataaaaaactcaaattatctatccatggctgcctcatcccgaacctctctctccctctcgctgaccacggcttcagcgccagaccaccacgccaggccaccgacgactacccaccaccccgactacgcacgaccaccgtccgaaccacgcacgacc

SEQ ID NO: 113461 - DNA, 1967 bp, Cannabis sativa
atatatataaatatatatatcttaattccaagcaataaaaagagaaatagaaaaaattgatgatttgaaaagcaaaagaacagtcaaagggacttaccaatacaaaggaaaaaaagatgacagagaagagagtctcactcatataagctctctctggaccaagctcctacggtacaaaataaaaaaatattaaaacatatgtacaactagaaattgtgagccatcaacaaccaactgtatgaaccaagcaaaactggtacccaccggaagaagaaagaacccggcatcctgaagtgttggtcccgggcgatgcagataatgaactccatgagcagccaagccatgtaaatacttcaaataacaacaaatatgatgaacgtcaaagaagtgagtaattgggctcaaacacaagtttgtattataatagaacaagagtcattaaacagctaaaaaaatcagaagctaaaataagcataattctgtttgaaagagaaacaacaaaaatgacaaggtacattctcatacacacaacattttattcaaagagcttccaatatcgtagttattctcttagtgaagaccttaaatttgaagtttagacaagattaaaaatcttttataaaactattaccagatggaacataacattgttagctgcttgtcacacgataaaaaagccaaatacagctagtaacaaaattacaccacaacactaaaaatggaagaatagttgttctgatctatctagtatttacttaataactataaccaaaccaggtggagaaactgttaaatacgttctcacagaaacatattatataaacctcgcaggccaaacaaatttgataggcatcccttcattatacatacaacaacatttaattagtgataatactgttatataaaaatataaaattagagaattacgcatattttgaagaaaaagaaataggaaagtaaacctgaacaaaaattccaccgagaaggaacttccaattctcggaaagaagcgaaacctctacagatgtctctgagcaaattttcctccatagcttcacatttttcaggcacaaaattaatcaaaattctcacccagaaaagtaaacaaaagaaaaataatgacaaagagattggaaatgaatgaaaaaaccttaggagcctcacgagcgacgtaaagcggcattatcatgattcagttacggtgttgttgttgatgatgatgatgatgattttatgatgaaattaaagttcgacattaatcactatctgaaacaatgccaaaatataaacaaaattcaacattttctgttccaaatttcaatttgtaaaatcatacatttaaatttcggaagtatctcatacataaacagattttcaccaatatccaatccaaagcaacactttctcgctcttctctttctctctctcactcttgaacgaggcagttgagaagaaagttctaaaattggggtgcaacttcaaaataattcatttattctaaagaaaaattactaaatgacctgttttattttttattttattatttactaataataataatgatatatttcccgggctatttgtttcaggggaagtgattgtaaagagctggtgtgtaagtgagccgtgaaatgtgtaaattttgaccgtctatcaaaaccatttgatgactagaacatagcacaaccgttgattgaaattgatagagtgaaaatgagcgcagttgattttcacttcccctaaagactcatgactccatgagtgtcactactcactactagttcctatcttgcggttattaacgcttaattacgcgcggtgggcttccttaagaggccctactgtggggcctagaatcggtagaatgaaattatactgggcctacataatattggtccattttttaaagtgaaattttatggttcattatggatgaaagataaaagaaaatctctctctctctctct

SEQ ID NO: 113462 - DNA, 1508 bp, Cannabis sativa
aatggatctccttcaaatggctgcaaacacaatacttaagttatattttatacatggattgtgatttaaaaaattcaatacttaagttatgattcgtgagcttttttattttattgtttttcttttcttcaattaccttaatatatgtttttctgttacgtaaataataatattaacatttcttgcaaaataaataaataaaaaataataataatattaacgtggtcgtacaataccccatacgcaactcctgtattacttgttcagcaagttatatctattgtagtccaaagttattgggttgtgattttttcgtttaatattaatacttatattattataaagatagttaaattatacactaatgacataccaagaccaagagtataaaaatattcttgtatataccaaaaatatacatcaggtgtgtactatttcttataatctgctgtcattatagaaatttcttaaaaacaattataaataataataataataataataataataataaatgaataataataatatgagatttttaggtggggtttggtttgagttcaaaacggagtgggccttgacaaaaaaaatgggcttttggaaaaataacatcaatttgaaacatatcaacatttcaaacatagaaacaatataatacattatgtatataattttacatgaaaaaagaaaacaacatatatctatgttaattttcttaagaaaaaaatgttatttttatgtagcagagggaaaacaaccacccatactttgtaagaaaaaaagttaaaatctgtaaaaaaaaaaaaaaattgtcatttttaggtatttatgaaaatataaaaataaataaataaaataaagaaacaaagagaaactttgtgagttgattaatgcaaagggtaattgaagtgtagaagatgcatttgttactctagaagacctgtgtacatcttgtaattgttcttgatcatagtagaagaggctcgatcgagtttgtgctcaaaaaatatatctttgttgatttgattagatttgaatcgtttctcttttgcgttttcattctttgttcattttattttttgataatcattattgttgtattagttcttgattgttctttcagaattatagtatatgggaattttgatgactaacatatttatgtcttaaaaaccgtatttttgcaaaagctaacaaatttttacacaataacagtaaaaacacaattgtaacaattcgcagtaaaatataattctgtcactgcataaaacagttttgcagaaacaaactagaaccaaaattaaaatactagaaataatagtgcagaatttaaaaattgacacaagagaattatacgtggtataagtgttctttcaaatactactagtccacgggccacgctcaaagaataaaatcaattagtaaggtatcaaagattacaaaagcaattgacttaaacaaatttagattccctctagtgatttgccgcaaccctttgtaatccacct

SEQ ID NO: 113463 - DNA, 2064 bp, Cannabis sativa
gtgtgattgtattgataagttttcatttctatcagatgaatgacttgctatcaagaagaccttccattgctgaactaactggaatcagtgattcaaggcttggttgctttgcaactcaacttcgtgcctatcttgtcggatcaactacagttggaactcaaataaatgagcatcagaatgccagaattgagcaatccgatgctactaccctccaggatggacaattttcatccgtattatcaaaatctctaagattgcggcaccctgggagtcaggtagtaaggcctaattcatcatttcaggccagcttaagtcctagatcaagttcctttaaagaaggcatctccagaaatttgtcttcccttaagaactctgctagagaaatgttgaggcgacgtggggacagccatcctgctgttgataacctgaccatcacttcagtgttagctcctgatggatctttgagtcactttgagaatgtcaaggtgcctgagactataagaagtttgtcattaccttcttcttcctttttggagtcattagggaacttgtctgtacctgcaactctcagctcagaatcccaaattcctttaatgggcgctcctcttttgtctccctactactgctggtgccctccaggttcatcgacactgcagtgctcagctgaaccgatacaatttcccagctcatcattggaatctcctttgctcccaccactttcctctctattgccatcaacaatttcctccagtttgttgacacaaaccccaccttttaatctggttgattctccatctctagacttccctgcttttcttcctgatccattggtccgattcccaaggcctactgcccagcagatcccaacgtttacaccactaatgtgcgaccctattgttcacattccagtgatagatgtctgctcttcgggtcaaggctatctggtgagcgctggtcctgctatgtcaactgccatccctccactgcatccaaatcttgttaacccattgataccagacactaactcaatggtggaaaagggtgcaagagagactctacggatgctcataaacagttcaagccagaatatgcactctcaggccaacgagaatccaggaatgatggttggtgggagcaggggtttatacggtagaacaatggatgttggtgttattgttggtgggagcaggggtctatttgggggatcaagggatgttggagttatcgcgagtagcattgcggctattggtttggtttcactttcaggtagatcagatggggattcccatggacattctggtttgcacgaagaggaatcttgtggttataatggttcttgttcagatgatgaagattagatgtatgttaccatcaaatagaaatcgttcccatcctttgtctttttcttttgggtgttacaaatgtagatgtagatattcaaagccttggccctctgaaatgtaattagcgccagccccatctttgttgtggttctttgttgtttttgtggactagaatgtgaatgaattttgtattttgctatgctagcgagtgttagtgtatattcttggttttttccctcttcaagaggctgtatatttcactctttttttcttcttcttctttacttcggtcatttatagatgtggccctaaatatataagccatcatataaaggggtggtggaattatttctaagccctcgtgatactatgggcgtgttaatgccttttcgggttgttctttttcaagtttttatttatttcttttttatgttaatttgtgtaagccgtaggaatgaaaattgttaatttgttattaagaaaaacaaatcaggttaagaaccattcatgagttcaaaagagtttcttggcacagaaacttcctgaaattttttttgtatatatatatagatatatatttatagggtaatactatggtaggacctagcaaaaattccttaccggtagggaattcttttttttaccgttgattttagatcttgtagttattattgtaaggtatatactcttattatagaattgcttgtatataattaaaatt

SEQ ID NO: 113464 - DNA, 1415 bp, Cannabis sativa
  modified_base (50)..(72): a, c, t, g, unknown or other
  modified_base (1345)..(1383): a, c, t, g, unknown or other
atgcaacataaaatgttatttctggtctttattaataagtaaatctgatnnnnnnnnnnnnnnnnnnnnnnngggcacaaaacccaacactaagaaattacagtctaatggaagcatactcaattgatggaggagtatgaaacattcttagactcatgtggcacttaatgtccattctttgagaatcagcgtcctaaagtgtggatggttttaaagcttggagttgggcccatatatcctatggagcccacctcctgcttagagcttactttgctcaattttatgtcaaacctggaatcgctccctttcagctcttgttagtcgtgtataaactacttgttgggtggtttgtattctgcaggtcatagggtcaacctgcaccgactccaaaagagatattgtacttctacgagttcaaatttcaacctatgggagggtatcccaaaaagattggcttttattgccttcagaagtacagacatgctcagtgccccacgagcacttcttgctattgctcagaccaccatgagtactggtttttcacaactggctttctcatggagtgtgttctagcactctccctggacttcaaaatccaaggtataatctccttggttaatttccctgatagattgaaagatgcctccattttagggtttgactctagcttgtttcttgtagattctgttcccaaaacagtgcttacgaggtagcagattactttctacgatccctactcaaaggaagagctaaggatagagggcctgctaactaccaagttactgtgccaatatggcctcattgccacattccaacgcattcacagaattaaagagaggggtcaacctcaaaaccctagcaacatcaaagagcaaactgctttggaactgtcagttgtgataacaaaagcagccaaggacgaggagcttcttgccgctgcctggaatattcatcatcccaaatgcctcacaaaagaagaggaaattaaagctaggttccaggcagtgtatctggatgcgagcacttccagaatgagtaattcaagaagatgtaaactatccttctacataatttgtaccctcagcctatctcagatgtcgttggtagataaagggggtttcgacaattttttcctaagcctggatcctcgtagatatctaatgaaggattacattgatagggtagatcaattatttaggcaccctaacaaccaagaattcccccacaacattattcaagtgggtcctttccttgctatgttcttcttgaacttcaggaaatatggcaacttcattgactgaaaagaagtaactttgtttataagacttaaatttataccaaatannnnnnnnnnnnnnnnnnnnnnnnnnnnnnnnnnnnnnnactctaagtctgatttgcccatacaagtagga

SEQ ID NO: 113465 - DNA, 1930 bp, Cannabis sativa
ggccgtcattatgttcagagacaatagtgggttatcttggagctgtattttttataatctctcaagagaattgggtagaaaattgcaagtgagccaactgtttgatgatcgagtaatcatttggtgcaacaacgagactgaggtggagaattttgtggagataggaaactggtttatcactggcacaggggataccagagtctcatttaaaagatggtcagcggaggagcaaaatagagacatcaaaatgagaaaaattggagatttgtgtgggggactgttagacatagaaaaggacacagcagagatgaattttctcaatcacttgagaatcaaacttgaaggggacaacaaaggtttcgtgccagaatttctgcattttgagtttgaaaattttgtaattaagctagagttatttaagctaaacgacttgggatacaaattcagtggctttttcaacacatgttggcatcaagattttgaaataggcaaggtgatcgaagaggaagatggctgtgatatctcagcttcggctgagtcagaattgctggagtccgagagtaggaactcccctcttttgcagtcgccggagttaatggcagaagaggtatcgcaagtcgatctccgggaagaagaagattttttcgaaattagggcagagaagcatttattggagtcggttgctttgtgcgactcaagatggggtgaagtttccaaagaaaagaaatttaagaataacggcgaggtggacttccagagaatttttagctgaatctttatggatttaaatgcacatgtcgatagaagcccaagtattcagattttaatttctccaaatgacacgtggagctgtaagtctcaagttacgtgttttcaaaagcaaaaattatattgcccctccaaacagttgatgggcttaaaagggcccatctcacttagagtacactatgcgtggggcccatcattggtggtttctcaaagggagacagtttatgggcttttgtctttgattctttgctctgaagatagaatgaagcacatcccctcgatcagaaggcgaggtccgatttcccttggtgatacaacaagaaaatctattacggataaggcactttatagaaaggaaaatacaagacaaatcttcaatgaattcctgaattgtcatattagatcagtcaaggccaaagctcgcgatgatttcaagacaacagtaattttttgttggaaagattttgaaatacaaaccagagaagtaaagaattcagttttacagtattccgaagttgaagaataagcagattcagggaagccaaagaagatgacgaaggtttattctagaaagaaaaaaacaaagagcatatctacaaaagtaagtgatagcatgggactcgataaccttttttttctggaggaggaggccattgatgaaataattgatgaagaatcacaatttacaagttcggacagtgaagactcggaagatgatgtgtcaatatcagaggaagatggagctgaagcagaggaagacattatttgtgacttaatcgaactttagtaagaggaagtccaaattcatcctcggagtttggtatcaagtagtgaacatagggtggcaaaggaggacaataaggaatggatttctttgactgagtctttggctgagatgggaatgtaataatcccaaatccgagtccagaattcagagtggagacaaaatccaaaacaagtaaaaacagtgcagagaattgtctaagctaacgttcaatgtgaactatgagaagaaacaaaaggattcagggaggaagaaaaagaatcaatgaagatactcacttggaatatcagaggaagtggggaaaaggtcaaaaggagagcaatcaaagcgactatttgtaaaatcaatccggatttggttattttacaagaagtcaaa

SEQ ID NO: 113466 - DNA, 1577 bp, Cannabis sativa
taaggaccattatgaccccatttactaccatcaaatgttgaagcaaattccttaataaattccaacactaaaggatgacctttatcaaaaaccaaaactgcattattcaatctactccattgaccagtttccaaatcaatagtttgagctccaataacatttttcaacttagaaaaactcttcacaaaaatcatatccgtatctatataaacaccaccatatttataaagaagagctaatctaagcaaattagagagattttgacccaaaggaatctcacccggattcactttacccattttcaacaaactaaaccaattttcagctggagtgtttttgaaaacgtaatcataatcaggtgaaacagcaagtacactaagacccatttttaaaaacggtttaagtactctattcaaaccctcattcgaatccatagttttcgaaactataaccaaacaagaattgggatgaaacttgaaaaggctttcaatagcaaaagattccctctcaccaaatgatttcaatgaagatatccacgtcatgaaaaaacgtggctttgaacaatttttagaatcgaaaaactccttaaccgtttttgaaaacggctctttattaccactactaattacactactcgataaagatcgaatctttcgtttcatcttcttcaatcttctggtttttttgtttgaaacttcgattttgggcaaaagggtatttgtttttatgaacaaaggagcattttcttctctaacaacataagaagaagaagaaagcttggtcaccggcggccattgatctccggcgagattttggcgggagaaattggagggaagaatgagatgatgattatgatgagatttaggaaaaggggtttttgataagaaagggatatgaatagtgaagatagagaagccattgtaggctagaagaatgagaaggagaagagctagaagagaggttggaagagagaggagaaagctaaagattgaatttttgaatgtttgtaattggtttagtgttttttggattggttttgggattttggtttgatgagtttttgaattgtctaacattgttggtttgggggaaaaagatttgatctttggttggtttggggttgttggtttctatggtgagttgatgagagttggagatgatgaagaaagcatttttatttgtaatggtggcaaatatatgtgtatgtatatatatgtgtatggttttggagaaaaatgaaaatgatgagtgttttgagttgtaattgaagagaaaagttcaagcttttgtttctttaattggggttctttaatagtttgagattgagaattaaatgtgtgtgtatatagtattggattgtgtgaggttagctcattctactaattaaagaaatatatatgaaaatattatttttgttttgtgatggaagagaaaatattattttgggaggaattgctagtgctcaactattacaaggtataaaccacttggggttagctcaagtggccataggtgggtgtgtgagtgttggaggtcctgggttcgagtcccaggtaaaacatgatgtaatatataaa

SEQ ID NO: 113467 - DNA, 2680 bp, Cannabis sativa
actaatatttttagccacggacctcttagtcacaacacaataataatattttataattagccataacttttttatctttagtaacaaattttgtaataactaaaaataaatttttttgtagtgatatttatatatatatatatatatatattggtgtacatattcaaattatttagaatttgtcataagtttacacttaattagtacctctttgtattaattattgtttgttatgttcccatgtcgaattgaagttaaaaggaagaacatatatagaatttcgtttcttctgagttaatatgatcattgtaaagttttattttctagttgttctttctttaaaaaaacttcattatcagtgtcttcctttatttattctctattcattatttaaaaaaaaacatttggttttgtataattatatgggtcagaattatatagttgccgcgaacaagagtttatgtaaactaattggagtttttatatggtatattattttctaaagtttcttacttttatattgtgacacggtaatattaacatttttattgtactaacttgttagttttaggtacgtatgttagtttttggtttttgtcctaactaaatttgctagcctctaacgaaaatctcttttaaattgggtttatttttgttggacctactgtgtataaaagggactttccctttactcctctgtaatcacttttttacttgctttttcttagaaataaagctcttcaatttctgttatggtatcagacgaaacctaaagtcttccactcatataccttcttctccaatggtctccaatggcacgtactcggtcttcaggaccctcctcttacagagctcctcctctggccgtagatccgcccattcccattgtcgtcaacctgtccacaactccagatgatgttttgcccacttctcaggaacctgcaatgccagatccacctcttgctcctcctctataaacatctactgtcgacaataatggccatggtgtcggttcaaatttcttcaatcgtctaggtgttggtctcgatcgtcctcgttaagatgaccctaaaagtccctaccatcttaacaatggagatcaccccggctacctcatcattcctaaacccctaacgtgccaagaaaacttcctttcttggaaaagagctgcttcgatctctattgcagccaagaacaaaacaagattcatcgatggcactctctctcccctcctgctcacgatcccaccctcagttcttggatcacctgcaacaacatggttatggcttggattcttcaatcagtttcccctgaaattggacccaatataatgttccaagacaaggttgttgacatgtggaatgaacttcatgatcgcttcaactaaggcagcggtacaaggattttcgagcttcagacctccctctccaacctcaaacaaggtgattctaatgtcacttcttatttcagtcgtctcaaagcaatttgtgatgagcttcaggaattccaatcttttactacctgcacttgtggtgccatgaacaaaatccaagactgctaaaatcgggatcaaattttacaattcctcatgggtctcaatgagtcctatgctcaggttcgagcccaaatccttcttcaccactctattccccccttgtctactattttttctatgattgttcaggaggagaaacaacgtggccttggctttaatcctatcattgttgcggcttcaaagccccctggtccacattccaagaagccaagactaacatgctccaactgccacaaaccaaggcactgggttgataaatgttatttcatccatggttttcccctggatatggtgacaagaaacgatctgaggaggtctccaaaccatcgatcaataatacacatgccactccctcaacttccaccaatccctgtccagaccccaactcattagcagtgactgcaaatcaggcccaagagctcatatctttgctctgccagtccctcaaacagactcctcaacctaaagcctcacccatggtctcaaatttctctggtaaaatccatccaaattcttacttgatagtggacagtggtgctacccacaatgtatgcaataatccatcttttttttaatctttttccaatattacccatagcgtgactttacctacaggatgtccatattgctgacactggtactgttagaaataattagcatattactttacaagttattttgtttattcctcaatttaaactaaacattttttcagtggcagcttttcttgccagctcaactaactgcttggtgtttacctcctctgtgtgttttattcagggccatcctcagactacaatgactgagattgctaaacagcatggcaagctgtacatattgcctcataatcaatccattttttcaaaaatttcaattaatacttgtactgctccttggcataatcgccttggacaccctgctatgcaaataacacaaaatatcaataaagaaattattttttcctattctaaatctcataattctttttgccctgtttgtcccttggctaagaaaaagtgattaaaatttgaaatttttacacaaaaaatacaaaatagaatttttattacataaatacttacacacggttacctcaacatttttaatttttctctttattttatt

SEQ ID NO: 113468 - DNA, 4239 bp, Cannabis sativa
  modified_base (49)..(49): a, c, t, g, unknown or other
aaaataccgtctggcagtatttttataaaaaaaatggcaaaagttagtntaccatgtaaatttccctatttattcccaaaaaaaaaccttagatatacttatgacccaacaaaaaaaaatattcaaattgagagattataattcaacatagatacactacttgatgggataagcaaactttcctagactctatataaggccaattttgagttgaaatggaccttaaacaaaaaaaaaaaaattgggcccttactataatgataaataatatttttaaaaattattaaaaatatatattttttatttgggcccctaaaatgagtatgctctaggcgcaggcctagcccgcctatgcctagggtcggccttgctactatatgaacttgttgggatcaaagctagagaatacagttagagtccatcaatctgaggtggatctcggaccaaaaattactacaacccatatagacatcatccagggcgagtacactgcttagaaagttaagaatgcactctttcctattctcaaagaaataaatactatcacaatcactctcattctgaagacaacatgtcctagtactatcactgattttagacccacttcatgttgtaatgttctataaaattgctgctaaaattatatgttctaggctacagttaattctctctgatctaattacagaaaattaaggtggctttgtgcatagtagatacattgattctacatacgaaagttcattaaagtattattactgtcaaaataactaagtatttatctacaactgaaagttaaacttagatatttatgcagcaaattacttttatttttattggggatagaatttctttttgtatgatttgtatttccttagagtatttattttgcattattagttatttggaagatgacggtattatgtaagaaaatatatatatagatttttggaattgattttagtcaaaatgttttgaatcctttcaatagcttttctaaaattgttaagttttaaaaaattagcacaaaaattgtaaaataattcaccatcaaatgctttactatatgtattttagcttaatttctattttcttctctacgttcaaatattattcattcattcttcaaatttcttctaataatacttctctcatcttatttttcttcaatgtgctcgaaaccttttcaaccttatttataagactactaaacaaccacacggaaagttgagtataccacccatttttttctctctttggtgagagaagaaagtgggaggatagaaaggaaatgagggaaataagagagaggagaggtcaaattctcctctatggtaagggttattaaaatgaaaagaaaagtgttaggataataaatccactcaaataaacaattttgaattcttcaatttatagaaacattggtactctccatttttatttgttcaaaattagaaaattattctctaaagaataataaaaaaactaatttgaaaatagtttagtaattttatagatgcatagtgatctatcatttcacttctctatctctcttaccaaacaatgtacatgaattactcatctcctctcctctcatttttttatactttgagaaatactaataagtactattggtgtctaacacccttctaagtctcatatcgttattgatgcaattaagtatcaagttccataaaatttaatgtaataatttttaagaaatatcgctaacaaatcgtaaggtgccacttctagaagttgctaggcactactaatgtctaatatcaatgctctttccatcctctcaattctctttacaccctactaaacattagggtgttcattggaccacatctaatatttttaggcttatctagattcgatccaattatagattgaataatatattttaccattcgatatgatccaattaatttcagtcatccattagatattggattggatcggttatatatattgaatgtatttcatatatatttattgatttaatttaagtttatcaaatattttagtcatagtatttttttgatcggattgaattcatcaaatattttagatccaatatgtattagattagattagattcatccaacccaagaaaaatgagtaaaattttaataatttatatatatatatttttatgtataataataaaaaaaaattaattactaatccaaactaaataaaaatactaattagtttgattggatgttaggcgtattaaatttttggacatcccatctaatattcgatatgatccaattaaatatttaaaaataatatacaatttgattcaattacaattaaatatctaatatttaaaaataaattgccattaaattagattaatttatacatacccataccaaacatatgattagaaaaggaaatagaaaattgcctacattaaataaaatggtgatctagttaaaaaagaacctataaaagctgttattatataaaataatagtaataattttactttatttatttatttatttggaaaaaggtaaaattaatagatgtctactctacaaatcatgtgaaatagggcactcaatattggtactcctagcaagaccaggctgccacaccataaaagaacaaataattatttagtatcttccacatgttacacaaatatatctttatatataaaggaatagtatttaatagtatatagtgaatgaataatactatattattgttatgttcaaaaaaaaaatactatattattgtacatcattccaaactaaaaagaatattattattgctatttatttatgtaaaaataaataatatattgtatatgtagtaatagtatcattattgtactctctttttattaatgactttgtcattaatgtaatattgtactatttgattgagctcacttatgctaaccaaaattgaccaagctcataagttttttgttttgataatctttaatttattgctccattgtatttccattttttttcaaaaaaataatacaatatctcacttagggcccgtttaataccgtttattatattatattatattatattgtattaatattaatattatttgatacaatactatgtttagtattaacttgtattaataaattatgtaaaattgtaatatagtttcaatacactcaaccccaacactacgggttgggtcccgggtcctcagtctgggtttgggtcctgggttcgagttcgagtccggattcggattcgaaatttgagtcaggtctaggttcgagtctgcttctcgagttcgggtctggatctgagtctcgagttcgggacagagtctcgtgtttgggtcaaaaattaggattaaccacgaatcttttgtaaaaattataatataagctaatatagattatttgttatgcatcaaataatataacttacattgtattaaaattttggtcgtaataattaatataatataagtgttatttattatttaatacaatatgatccttatatgacatattaaacgagctttaaagattaataatattttatataattcgtttttactaattactatgcaaaaatcgataacattattcacatcttaatttttttcaaatgaaaattgatttataataaatgaataatatgatgattcacagttaataataacacaagggttaaaaaaagagagatgaatatcataagaagaaaaagggcattattggtcattttgaagaaaatatatatttttttttttgctaactttgaagaaaaatacaattactaacctgaaataatgttctgtgacaaacagattcccaccatcacagttctctaaaagaagtaatatttattgtaaaaacttatatgacataacatatatgaatatcatcctatgttttgttttgttttgtttagtttgaagatattaaagcaattaaaataaatgtaagagaatatactttgtgtgtcactttaatatatattttttcttttaagaatccaaatcggagattatatatatttttttctttagcaaaataaaaatgagtgttatcattctaaaagaaaaacagaaagaaagaaaagaaaagaaaaagtgttatctattatctcttcacagcttcacttagtaataataaaaatgtatatattttaaggtgcttttatacaacaattgctttaaaagaaatatactgatacttttttttttttttttgacaaagtgattagaatcactcatgaa

SEQ ID NO: 113469 - DNA, 4238 bp, Cannabis sativa
  modified_base (4186)..(4194): a, c, t, g, unknown or other
aaaaaaaaaaaaacacacacaagcagcttcttgtgaaatttctttcaattttcttatttggatattttcgaatctcgttttacaatatatttattttatgttataagatttgctgtctgtctataaatttgctatttcatctctcataaagaagaaaactcaaacaatacatcaaaaataaagaactttaactgtgaaacttgccgatacaatttcaatgtcaaaaatcactcctttatataagcttaaacacactgcatcatcagccaaaactacatcgcctgactcactcgagtcacaccaattgcaaccttttctaatcaacaaaacaaaaaataattgtctgcaaatccatgaatccctcatccatactgcttttaacaactgaaaattcccatattatcaatcataccaatgtaatgataatatagttctaacctgtgcaataagaagtaattatcacatgaactactgccacataatggtgacattgtaccagtgtctccataaatagatataaccacgaaattaccagtaatctccacatgaacactggccatcatcaaaatgatgaaatctatttgaatctcgtaaaactattttacgaccaacaatctttgatatatatttgaaggcggagtggcagtcaccacaaactcggagatttttcataatcctaataggcaactctgacttgcgagtgagaacaaaagcaacagcaagcttctcactgtgatagctcaaaatttcttccttattctccatctcaaggtcataaagtgcaaattttatttcagggatatagccagcatccctcattttcttgttaagttccttcaacttttcatatatcaattctttctctggatgtgatttatctccagctacaaaaacatgaacgccatctttcattgtcacccagctacacccagcttctttctttactgatgccttcctcattgccattctagcctttgccacatcctcccacttctccccagatgcatacaagttagcaagaagcacataattgaccccattttgcggctctaattccaaaagcatttctgcagctctctgccctagctcggtattacggccattagttctaccgcaagcccctagaattgtcctccaaataagaacattaggcttgaaaggcattttagttatgaaatcctctatcttcttaagttcacctgcccgcccaagaagatcaaccatacatgaatagtgctccatcttaggagccaaaccatagacttcactcatggatttaaaatgtttgaatccttcatccaccaaacctacatggctacaggctgataatacccccacaaacgtgacatgatctggtaactgatcatgcagtttcatttgtataaaaagcttcaaagctttgtctccatgtccatggcgagcatacccagatatcattgaattccatgaatacacatttcttacaggcatcaactcaaaaaatctcgaagcataatcaattcttccacattttgcatacatgtcaacaatggcacttcctacaacaacatcagattctaaacaagctcttatagcgctagcatgaacttctgtgccacgttctaatgttgcaacagaggcacatgcactgaggacagtagcgaaggtgaaggagtccaatcttctacctttctgcatcataaaccacactaaatctatggctttaggcaatagctcattgtgtatgtatcccgatatcatggaattccaacttacatcatccctcctcccagacatcctagagaaaattttctcacaatgatctatctctccacactttccatagcaagccaaaagtgcattctcaatagcacaatcatttgccacagggtattttaatactacagcatgaatttgctgaagaggctcactaagtgaaatagatgaaaccgcaccaagaatgttaataaaagttattttatttagtgtccaccctgctcgcatcatgtccataaaatactttacagcttctaacgctgaggccttagaatcagctaaagcaccaattatagaattccatgatacttgatcatactctggcatcatgaagaaaactttatggcactcagcaagataccctgcctcagcatacaacaaaagaagagcatttgaaactgacacatccagatcaagtcctaatttgagtgcttcgcagtgtatttcttgaccaagaatgatccatcccaaacttgtacacgaactcaaagcactaattaacgtaaaatttgaagcaaccaatccaaatcttctcatatcacacaaactcatgactgcatcttcaaaacgcccattctggtcaaggccagaaatcagggtgttccatgagactaaatctttgtcaatcatgtgtttgaaaaccaagccagcatctgttataagtccacatttagcatacatgctaacaagcccatttccaattgcaaccttcatatttaccaaaccagtgcagataacatatccatgaacctcttgaccttttctctttcctacctccaaatcagaaaattcagcaaaagagcttaagagaaccacatatgaatccaggtttggttcaacttgtcccttcatatatgaaaaaacttccgcagcttcttctccccgtttttgtctcaccaatccaaccattaaaccattcatagagactgaatttttattacccatctgctcgaatatctgcaaagcataatcaattaatccagactttgaaaatccactgaccaaagcactccctacatacaaatcttgtaataatcctgatttcttcactgtggccaacatttgctctaacatgctcgaacttgaattggccaaatagcaagcagaaggtattaagctaccaaaagtaaactcgttgggcttcaaactatatctgaaaccttgtgtttgcattctagaaaagagctcaaaagcagaaactgcatcccctctatgggaataaaccgaaataatagaattccatgaaatcgaattttttatttttgtttcatcaaaaacacgtcgtgcatcattaatagatgccaaacaatttccatacattgaaatcagtacattggcaaccacaatgtcagaggcatatggtgttttggaaagtaacccatgaatctgcagtccaagtgtaagcattggtggcccagaatattgacaagctcgaagggcactaccaaatgcataatgattgggtaaaaaactagcagaaatcatccttttaaaatgcaagcatgcctcatttagcataccattcttggtatagcccgtaatcaaactcgcccacgtaacagagttcctctcaggcatttcatcaaacaactgacgtgcacaaaccaaattacccatcctaacatatatattgataagggaattgtacaaaaacaaatcagaagtaaacccatttttgagaatttgcacatgaagggtgttagcatcatctaaagtacacgaattccggaactgagtagtgagaagttcactcttttcacaaaggtattgagtattgacaaattcatagttttgacaagggggtggcaaggatgaattgtagttaacaaagaagtttccgaagggggaaagagaaagggaaaggaggggatgagtaggaatttttggtttaaagaagaaagagtcgattgggttgacaacaagtgaggcagtagaagaacagtatggagttgttctgttaagggtagtcccgaaaaacctgcgagaccatgggttgtacatttgtttcctgcgctaaaacaatttcaatggaagttgaaataatagaataatgaagcttttccattcatattcttacgtacacctcaaatacacacaaacctatcatcaataatgggataaaaacctgtgatactcaagatttcagattgagaatatagatagatatatataacttaaatcttcataaacatttcatgtaatctcagaatctgataattgaaaaacatagtttttgaagaagaaaacgttgaattcatacttacttggtcagagaagttgagattatagcatgagtgagtggtagttgagcggttgtgttgtgcccaaggaaatgaagatagtgatgatgaaactcagctacagctaaggctattattgggctttccgctgaaatggtataaatgagattgaggaaattacactctatacnnnnnnnnnattgtcctcttttatttttactctcttttttaaagtctatcatt

SEQ ID NO: 113470 - DNA, 9181 bp, Cannabis sativa
  modified_base (9118)..(9122): a, c, t, g, unknown or other
gagagagagagagagatgaagtgaattatcagacaaagagctttacgacttaaatgagatttaatgacttaggatttttagggttgagttaaggctctttatataggagagcttaaaccctaattagcaaataaaataaatagatatttacatattaaattggtaaaatacaaaagactaaaatgccccttaaacataagtattttccatctactttattgggttgttaaggccaaattcacagtctagcgtacagtccacgtgtaaggctatgcaccaaagttctatcaggcccaatcctggctggccatgcacatgtagggtgtaggctggcaaaccttgtgatgtccaaaagctagctatctagaggtggtcgactagcccccttgaggtggctactttgtcgctcgtcctcccttttgagtgtcgtgacccccattggataaggtgctgaattgaactccttgttggtgagttgtacttccatgtggcattgatattgtctacataagcatgccacttaaagttggtaaaaattgggataacagttattatcgagatgattaggagatcatcatcaactcttaaagttaccaatccgaatgttattcaggatcaaggtcagctagcaactatgaccaaggaaacgaaagacgtcgcgaccctgatctttgtgagcattaaaatcgcagacaacctgacttgttcgagcatttgaagggagatgatctagatattcgtaatcaattaaatgagaatgcagacaggcaatcacattttgaacaatagcccatggatcccatccagctgggagtaatacaattggagtataagtttaggcgatacaaggatggagagtatgggaaattatcaagatacgattaagactaagaaatagaacattttcatcctgatatattaaattcccaatttcctcaaggattcaaaaacccgcatgtcgcacaatatgacaggacaacttatcttgtggctcacctgaataattttaacaccataatgcgagcaagcaatgtctcaaacaacttgccatgcatttcggtaccaacttctttaactggagaagtgagcagttggttcaataaattcaccaaccattccattacttcctgggaacaactatctacggatttcaagaagcaattccaagctgcaagggacaggaggccagaggcatccacgctgactaatatcaagcaccaaccaagatagtccctaaaagttcacttaagtcattttagtacaaaagcagtcaaattcagaattctaaatgataatattcaattgacagctattcaagctagaataacaacggacttatcaaccgtaagaggtgacctatgggatgatttgcaaggacgcgctgttagaaacattaatgaattcaatgaaagtgtgcaaatttttgttcaaaaagaataggcacaaaatgaaatgaagttgcttaaatctagctcaggagacaaacccagaagaagtactgttacaaccagcactgtgacaaccaaagtgggaaatttgaaccccactgcctcgaatgttaaaagaatagatgagtcaagagattcgtcaaaagaaaagaaaaaacaaaagaagcacgagaaatatattcctatatactcaatgtatatgaaattaaatgaaactcgtgaaaatatctatcttgtaaatgaaaattaggtcgcgtttcgagacccgatctaataagacatgtaaaaaataagcaagatcctaataagtattgtcatttgcctcgagatatcaggcataccactgaggaatgtcgtcaactgaaagacgagattgaaaatctcatctcacgaggatacctaaggcaatatgtaaggattgaaggaaatgagcataatctgcccaacaaccagaagaaccaaggattgcaacctcccttagatgaaggagaggacaacttagttatttttggagggccacacgtcacaagaagcaacaataatgctaaagaaagatatataaatgaagtgaaaaatgaaaagtcagcttttaccccaaaacctcttaagcgagccaagcctgaagaactacccatcatctttattggagaagatgcatcccatgtacaatttccgcatatggatcccctggttatacaggttcagctcgctaacaagagaataaaaagagttctcattgataacgggatttttgtaaatattccctacaaagaacaattaaagaagatgggcctaggagaggcaaggctaaaactgtgtatggtcaacctatgcgggttcacaggtgatagtgttgcaagcttgggcacaattgaactccaactcactatgggagaaccacaactatcaaagaccttgatgcaagagtttttagttattgacatcccttcagtatacaacatactcttgggttgcccgacattgatagcaatgggggcaataagctcgatcaaatatttgtccttaaagttccccactcattcaagggtagcgactatgaaaggtgaccaactattagctcgacaatgctatagcgtggagtggaaaaataaaagggaaacccatcaattgatggtgatgttgacagaagaaaataaggaagatattgaagatgtggatgcaagaatccatgatgaatataaccaactcaaacctattgaagaattagaagagtttaatttatacccaaacaatcctaccaagtttatcaacattggaaagggtttggggaagaacttaaataacaattaatcactttcttgaaggtaaactaagataagtttgctcggagccatttacatatggtctggattaactcgaatgtgatattcagtcacctcaatattgatccttcttatccctcaaaacgttaaagaagagaacctttacatcccaagagacaaaatgccctaaatgaagaggtcgacaaactgttagccaataaaagggaggctttttctatccctcgtggatatctaatccatttcatgtcctaaaaccaaatgggacacggagaacctacatagacatctccaatttaaataatgcttgttcaaaagactgcttcccattaataaggattgaccaattggtagatgagacaggagggcacgaactaatgacctttttggatgcatactcttgatataagcagattaaaatacatgtcccgatcaggagcatacaagctttatcaccaatatagggctttactgctacatggtcatgccatttcgactaaacaacgcttgaccaacataccaatgcctcgtgaatggtatgttcgaaaactagatagggaaaatatggaagtctatgtggatgatatgttggcgaagtctgttaaaagtgagaaccacacagaggacctcatagatttcttcgccatattgaaaaaatatgatatgatattgaaccctaagagatgttcatttggggtatcctcgtggaaatttcttggctttattgtaaatgtgaaaggaattgaagccaaccttgacaaaataaaagcactgctcgagatgccttcaccaaccaaaccaaaagaagtataatcttttacttgaaggatggtggcactaaacagattcattttcaaatcaattgataagttcctcccatttttcaacatcttacaaggcaacaagaaattctaatggaaagaagagtatgagcaggcttttcaagaaataaaaaagcatctctccacataaacagtactggctaaaccaatcattggagagacattgttcatttgtttggccatctcataagtgttgcactagtgcgagaagagagcaggaacaagcaacctgtttattatataaacaaaaggttattgggggtagaatagaggtaccctccactcaaagaacttgcactttgcctggtgcatgcatccaaagagctgcaaccatattttcaggctcaccccattaattttttttatagatcagccattgcaaaaagtattctccaagcccgatgcatctgggagattaataaaatggtcgatcgaactgggacaatttgaaataacctaccgtttgaggatctccatcaaaggtcaggctttagccgacttcttggttgaagtaataaactcaatagaagattctagaataagaaatgatggtaaaatatagaaatttttcgttgatggagcttcaaacgagaatggattaggggcaggagtaataatggtgtcgcctaaaaacttcaagtttcattatgaactaatatttcaatttaaggcttcaaataacgaaacagagtatgaagcttttttagctagactaaggattgtagaaactttaaaagtaaaatttgtacaatgttttagcaattaccagctgattgtaaaccaagtttgtggagaataccaagcaagaggcacaagaatggccaaatatctagagaaagttcggaagattttggagaagtttgattattttaaaattgaaaatgttccaagagaacaaatatctaatacggatgccttccctaattggcatcacactttgatatggataaattaaacttagtttcagtggaggtgttgagcgacccaagtatatgcaaaaatgaaatgcaagagatagagatgatagatgcgagccctacatggataacccgtattgtaaaatacttggtagatggagaacttcaagcgaacaaaactgaggcacaaatactcctatacatattcccgaggtacacaatagttgatgcaaaatcgtaaagaagaggacattgtatgcatctactacgatgtctgctccctacaaaggctaatgaaattatcagagaaattcatgaacgcttctgcggataccatgcaggatggcaaagtttatctaagaaagtactatgtcagggatattattggccaaccatcaacaaggacacacgtgaatttgttaaaaagtgtgacaagtgccaacgattctcgtatatactaaggataccccctaccgaactaagaatgatgacctcgccatacccatttatgatatgggcaattaatctgattagatccttatagatagggagaggcggtgcaaaatatgcagtagttgcaatcgacttccttacaaagtggacagaatttgaacctttagtgtccatcatatgccaaaatagtccttgattttgcaattaagaacattacttttaggtttggcattcccattaaaatagtgtccaataacggtactcagtttgatggagatttattcactgagttttgtggaaggaataaaatcattaaaagcttctcatcagtgtcaagaccacaggccaatggacaagttgaggctattaataaaagcttaaaggacactataaaaaataagttagacatatctaaatgaagatgggttaacgagctaccacaggttctctaggcccatagaacaatagaaataacattgacgggatgtactccattattattggtatttggctcagaggcaatgttcctagtggaagtgaacattgcgactcacatgtgtgaattctatgatcaagcataaaatcaagaacttctcaatatgcccttggatccactcgaagaaaagcacaattagttgcaaattacaaatgttacttatcaacattgcatcacaagatattgtaataaaagagttcaaaaaagactattcaaggttggtgatttggtgttaagatgtgtgttttccaatacgcgagatctagcagcaagagtatttaactggaactgggaaggctcatatatcattgaagctattgttggaacatgagtttataagtaagcatggctcaatggctcgctaataaaaaactattggaacaacgaacatctaacgccatattaccagtagtgtattctgttgtattaagtttatttttgtaaaaaaaatctttattttcatatacaataacttggttttatcaagtaatcataaagtctttgtctctttaaaattacttgaggttatataaatacacaataactgagttttaccgagaggtatatgttaataaaactaggcttactaaattttaatgcctagaaaataaattaaaaatttgcaaaaagaaagtgtttgattataagatggtccaaaatagcataaagtcaaatactttggagcctttcttaaagcaaaaatgaaagtagtagttgtcagcaagactcctaagtcttgtaaacaacataaagctaagtgtgatctgaataaattaaagctcgcatattttatcatgtattataaacgagataccctagtgtgccttgataaacagtacgcaagctaaagtgagaatagaggattaactgttcatacaaacaatcaaggaatatttagagcagtttttaatactgttcaaaatatttaatgtttgctcttaaaaagtgttgtgacagaaaaataactgctcgcagataacttatatggcagaatactaactgctcacgcataaataaagtagcagaatgcaaactgcccatacataggcgatcaaaaagtgtttaaaaacatttaattatgtaaggacatttatgttcgtaatacgccctaactcaagttgagaaaagtgttttatttacttgtgagcaaaaatgcaattcaaaatattcgtaactcaaacaaagcagggtaaaatggcatcatgaaatgtaattaaagcaatactggccatcaaacaaagcaaataaaaaaattaaattacataataaatgccacaaggggtaaaacattgtctctgtcaaatggccattgtttagaagttataaataataataactaagtctacatcgttggagactaagagggatcctcttcttctttttctttgaccacgccttcctcagcgttgccaacttcatcctaataagcccacatctcatcggctacagtacctaaaaagctcaaaaccatcttgggatttgttatccaatccttgtagatagaacgattggccattaaattgactttctatttggtgtataacttggcctcttcaaccttcttgttggcttctgtaaggttctcctaggccagtcgattagcttcgtcaacctctcattctttgtttttaaggctttattttcaactttcaatgccttcttagatttctccaagttttcaacatttgttttctaccgagagatctctaatttggcatcattctattgcttagtcgaaagctcgagttggtcgctagacttgcgaagatctgtgctaagttggttgatactttgtatacctctttgttgagccataaggataagaaggatgtctgcatagaacgaggtcagaggaagatattagaatgtaaataaaaaagaaaaaaaatattatggaggaagttggaactaaccgcttgcatgtggtcaacgatccttgtcataaggctttaataatcacctttgttgattggatcctatttctcatgttggaaagtcttaaactgatgccaactttgtgtagcatataacaagcatgcttgagaaccctcgacacctaaatatgtaggtaggggaaggaaggctcaaagagggccatctcgagttgagacccagagaatttaacctgatggacatacccttatagttgtccactagtgctcaaacatgctgacacattagaagttactgaaatggttgttcctgggttgatggttattccaatcaaagtatacttcttatttgctgcctttttggttttcttcaaaacttttgggtttgactctgaagtgacttcgacaagagcagacctcttcttacctctcttaacagggcaagatggaatgcagaagagatcttttaaactgtacgtatttgcgagacagaaaataagaaattaaagtcgatgtaaaataagaatacaaaggtggcgaggctaaaactcccactcagatcattaccataagtttcaaacgaggaagaactgctataataactactaaactccctagagctagtgatcatgaataggtcaaaggggttaagttgagatagatcccaatctaaactagcagccctattgaagttagttccataatttttagtgatcacgtagtacgagctattataacttaattggacatgatgtctaggataccaactatcacaattattggcaattaagtcaatgcagttctagatgaagaaattatattggttatctttaaattgaactaaagttgttctatcagccatacggacggtaggagacaatcgataaacgcaggaattattacctcagggagccccatcatcagtttgggtggcctcctgagtggttacatttttaaaataatggatgagagcgatgtagtcacgatcctcttcatcctcaggcattggaacctattgccatgttaaaaacatgggagatttaaagtcatttatactttggcccttgcctagaagggctcatgccttcaagttaatgtcatgcattaagaagttagcagctcgtaaactataggaaaagtttaccaagatctcatgcctctctttgatttctggagctgggatgggtctcttagtgattgctaaacatataacaaaaaacagagtcaattaagtgtcaaaattaataactcaaaacaaatattttgagagaaactagtacttccttaaaattttgaatctggtagtgttgattgtgtatattctagtggtccaaaagaagtcatctttgaattttttttttgttggacagcctcacaatgatcctgcaatcattaatatgggtcccaaggtaataaaagcctcctacaccataggacagaccttcacaaagtagatctataaaatataaaggggtgttcaacactcccacatcaaaatgtgataaaggggtttcaaacaggcgagaatcttgtaagaatttgtagcaagttaaaagggtgtaataccgaggtagttgcaaaactctttgaaataatctttgagggggacacctactcctaccattatgtgttcgatgctccaaaccacaatcttagaaggctaactagtgtctcagccctcgtcttttaatacatgttcaggtggcaaacagctaacttccccctaggcgactgagcggatgcaaaatctgttatagtgagatttctcnnnnntagaaactcgagaccagacccctgtttagaggacacgtatactcagatttccaatgaaa

SEQ ID NO: 113471 - DNA, 565 bp, Cannabis sativa
aatatctactaaagaaagaaaaactgaagttatctaattttcattcctatacatacattgattttatgtgtattttgagtatggaacacatgagtgtaaaataaaagtgtctagcatgcacaaatttttatcacatccattttttcacaatattcacaaaaattgcaggtgctttcttgccagaatagataaaacaattatagttgtgtaggggttattttcggtggagttgaactgcaagtgtgaagaaggcttaagtaggtcttcagaatttggggtccgaataattgggcaactaagagaatttatttagtattcatggaggaaactaaaaatctttatgtgtttgatgtaaatagatcgattgggttactccaaaaatattttggatcaaagcaagttgagcaggcttgtaaggatagtgagtttcaaggtagtatgtaaggcttaaccaaaataagtttttgggtaggtactattttacatcttgtgttttgcaaaaattactaattggactttctgttttgttaaagggttattttcaaaaatatgggaaaaattatta

SEQ ID NO: 113472 - DNA, 1536 bp, Cannabis sativa
  modified_base (45)..(66): a, c, t, g, unknown or other
  modified_base (1502)..(1505): a, c, t, g, unknown or other
aaaagaggtaaaaatgatatattttaaaaaagaaggtaaaaatannnnnnnnnnnnnnnnnnnnnntatagagtgtaatttcctcatgaatttgcaaggtggaaatgacccattattagttttccaaattagaaaaagactaacaccagcctcatttatcatatgaattgaaaaacccattatttttgggcaattattcaacataatttttcaatttattgttcatttagatgtacctattattaaatatatttggcaataaatggttaagtttcaataaaaaccttctttatttctggctaaatgggccagatctgggtcaaataatagcccagttacaagatttagttgactcaactaccaaaataaggtcccctaaaaaaataactaccaaattaagggtataatttatagaaatgattatttcttgggacacatctcaaaaaagaaatgtcctttatctttaattattataatgtctatttcacatataaataataaaatcaatattctacaacaactttttttcaccttaaaagtaaatgagtatttcccatcattaaaacaaacaccaattatttatttatttgtttataaatttaattatttgagttttataaaatttcctagatttactccttgttcaagatcaatatagaaatatttatttaattaattgagtggttttcaaatcttgtgatagatttaggggcttatctgttttttattatttattattatttgataagatagaattagtatttgggtccctcttgtttaatcttctattatcatgattaagttataatggagactcttaaaataaaatcatagctcaaaatctacactagatttttcatctataattatgtttttaaattaagtgttatccaaatttaataattacaaaatataaataaatatatgtacatatagaaattggtggctatatgttacaattacttttttggttgtcacccatgattgagctttgtaaaaaagcacaaatatttatgcctatgagtgatgccaattgcaagtttgtaatcatagggataccatttgtcccctagtttggacccacatgacccattttcaaaattaagcaagcttttctttctttttatattatataatattttcatatttatatatgtacatatacatatttaatttattggtagtagactcttgcaagttgatcagttccttttatttaggcacataaacaagattaagacaagaattatttggagtggggtcatatacttatgttaaggtataacgttattcttcattgaaaaatatagtttagttaacttgaaagtgaaaatatttaggcaaattattttatatgcaattttttaatttttatttttacggtgtagattgattcagtattttatgtgagtagttatctggatttaggttacaatttaagttgctccgctagttggcatgtggattgttatgtggatttccgaaaaaaaaaaaaaaaaaannnnaaaaaaaaaaaaatgttttaaagggtaaaaa

SEQ ID NO: 113473 - DNA, 1482 bp, Cannabis sativa
actaatacttttagccacggattttttagtcacaacacaacacaataatgataattataattagtcacaatttttttatctttaagattttttatagtgacacttggctagtttgcacttcttggctctttcagctccatggttggctggtttggattggttctctgaagcattctctctaatgtttgttttgttgttgtgcttatttacaatttatgaataaatagaaatgtttagtatatatgaaaataagtttttgattgtgaatgttattactcttaagggtagaattttaaacatagccaaaatgaagatgcataggagagatttgactatatatcattgattgtataaacaatatgtaagctgcatgtgtctttgtgatctgtgcttgatttatatgatttctcttctttttttaaaaaaaaaaatgatgtataataatgcaatatgttataaatggagtaaattaaaaataataaagtttcggtgaggtatattatattatatctctactcatgtattgttagtgttctcaatataatatagcccttcaaaccctagtttatttttcttaaatgattcatatgattatactaattaaattcatgataagggcgtatatttaagttgtccttattaattataagcctattttttccttacaattttaatttagatgatccaaaattcaaatattcattctcatttatatattttttttggtaaatcttgacttgcttaaatattatatatcaatactagtctactaatctcactatatttatttgaactttgatttaagattaagttccctaacaaagatatttagttagaatgatgataatataggaatgagaataacaataggaagaaaataaatcaaaattaaaatacataaaaaaaaaaaatgattaaaaacatattaattttttctcattttgaattggaatgatttttttcttttatttcaaaaatagaatagtaaatttattaaaataattgaaaaattatttcattagaatcatattccaatactttgaaatgtaaccaaacaaaaattaaataaaaattatttccttctccaatcaaacgttaacttagggtagcctttaatttttaatactaacaaataatttcaaatcataggactatgttagtaaatgtcctcatttcaaaacttgtaaagaaataatcattttagactatttattatttatattatcttttgccacattaaaaaataataatcaataattttttttttttcatattttttagaactagaagcaaaatacttaaagattatggtatatctatattagttttatcaaaatcatttttatttgaaagttaaatcaattgttttaatttttgatgagttgtcgtggattgttggtatataattttgttagcataatacaaatattttaatatatgtataattttattagcatgatacatatatttaattattatttt

SEQ ID NO: 113474 - DNA, 2312 bp, Cannabis sativa
  modified_base (2009)..(2012): a, c, t, g, unknown or other
aaaaaaaaaaaaaaaaaaggagagttttgaagagatgatgtggcattctcttcttctaatgttctatttttctaatttttaatttttttttttttttttgaatttaacatttataatcattatataatcaacatttatttttatattaattgaaatgaaaataataatatgtcttttcattttataacacccatatcaaattaaacatctattattatgattattattatcacattctcttcatattcttatatttaatatgtaaccactatctatgttatgatgatgtggcatgctttatgactttctctaaatgttctttgtttggacattgtaataaaacctattaattattatcaaaattatactcctaataataatactttgagctttcaatcttcccatcttgtgagtcgtaagaccaacagccacttcacatttatattaataagtatctacggtttataatctcatcttcttcattataaaatgaaaaaccatctttacaattaatcatcttttttttgtcttacattttgtttgactaaaatctctgttcacttttttcttcttattggacttctagactaagtcaacaacgtctgatattgcaagaagacgagccacaacaatggtagccttccattttttaagcatttgtgagaaatagattttgttttttctctctattattaactcaacaattttttttattgtccatgcagctaaataatgatagataattttggtgggcatgatcatggcttttgctggatttttatttaatccatttgcagagatcggtccgtgctgccttctttccctttaaaattgttattatttaatattattctatgtagttgtatattgggtaatttttttgaaagtggtaaatttgtatctacaatgataatgtaaatcttgatttttacattatcgagtatatacactaacatttttatttttccattattatttttaaattaatttaattttatctatttatttttttgttattttatttcagttactatgttatttataaattaatacaacaatgataataataatgaaaataaattaaaatatactaacagttcatttgtaaaagaaaaaaaacaaattagttcgcaacataaagtaattatgctaaatataagttaaaaattatcatgtaatattgactaattatataaatatatatgggtgcactcttaatgggtaatatcttaagaagtgttttatatataatattttataatcaatctatctataatcatgttgtttagagagatgatatggcaacttatcaaattgagaatctaatttttctttgttgtgggttttccaaatttttaaacattttcttattaaaacctaatcacacaatttattacttattactctttactgattgagttgacatcctatatgatgagttttctcaactcttatcgttttgtttaattttaattaatcttttcacttaataattcatttattaatggcttttcaattcacttaagaatttttatattttttgtatggattaattatgtttaacttttcaaataagttggatattttatatttaaggcttttatttaatctaatatatagtttctttttaatattatttttcttttgtagtagtcaaaatgaaaggcaaccatcaagaatttaagaaaaataaataaatataattacttttacaattaatatttgttagtagtctattaaaaaatagatatataaatattgttagtatttatatgttacatctttttactttttcaaaagaaaaaaaattaataacaacaacaaaaagaaaataataataaaattaaaattgtgattagaatatacatttgatactattataataacgaaaattgaaaaagaattaaaaaaaatcttgagtgtgtattgttaagaaaattacttctcgatacaactgcttaaaatatctaagtatatatttatctataaatataaagatatatatatannnntatatttatatttatatttatagataaatatatatatctttatatattaaaagtgcctatgtaacgagaattcttggtttaacagaatatgctttacaaataaaagaatattctgttaaatttaacccaaaaaagaatgtccacgttttctcactcacaattaatcgttttctcacgcataatgttttaactaggtaataattgccattcaaaggtttctctctcacgcagctggagtacaccattctcttatggaaaatctttcaaaggtttctcacgcataatgttcataatatgttt

SEQ ID NO: 113475 - DNA, 1866 bp, Cannabis sativa
ttgtaaaactgtaatttttctctaattttgtcagtacttactctgttattatcttgaacagggcacatataaagcctaaattctagatcattcggtctagatagaaatatgtagtattagttacttctaaatgttcttttaataaattcaaaacagagtttgtaccgacgaaactggaagaaaattaaagttttacaaacattaggtacttatgccggcaaaaataaacattaaatttatgccgcttacaaatttaaaacattgagtacttatgctgctatttgcccttaataataactattgaagttaaccattaaaatataagtatatgctaatactaatatttatattacactactaataataagcaactcatttgattcaatttcaaaaataaattaagcactcatttttatttttcatagattacaatcacacataacattaatttaattacatttaggttgaatttatacaaatatagtcttaatttctaagaagaatcagtttgttaatatgagtgacctaagacaaatttctcattgtaatgtgctatataaggtggtctctaaggtgttatccaaccgccttaagattattcttccgtgtattatgttggacattcaaagttcatttataaaaagatggactcatctcaaataatataatggtcatatttgaggttatgaattatttgaagaggaaaaggaaaggaaggaaagactatggttttggaaatggatatgagtaaaacttatgacgagatagagtggggttaccttcgagcggttcttgaacgaatgggttttgatggttgttggattaatttgttgatgcaatgtgtgaattcagtctcttataccattgttcattgtggtagggagatgggtcctagtattccagtgtggggcattcggcaaggcaatccagagtcttaagtatttatcttgtgcgcagaagggctattgatgattttaatgagatatgaagccagtggtagattaagaggttgaaaggtagcacctggagccccagtggtttcccatatgttctttgcaaacaatagttacatttattatcaagcctctgaggtggaagaagctaatgtgatgcatttgctacatatttatgaggtagccttaggtcaaaaaataaagctaaataagtcatacgtgttttatagctccaatacagggataatattgtgatagactttgtactcttttgggaatttctaaagtagatgacaattcaacatattcgggattgcccaatactatgtgtaggaagaagacaaccatattgggtctcttaaaagaaaagattaggaagcgtatacaaggatgggatggtagattgctttttgagtaagaaaatagatcttattgaagatagttgcttaatcaattcctaactatgcaatgagtgtcttcttaattctattagaacgtgtaaagagacaacaaaactcatgtcaaaattttggtagaaatttgattctttaaattagaaaggaattagttggatagggtggtctcgtatgtgccaacataaacatgtgggtggattagattttagaagtttacgggattataacttggctttacttggtaaacaagggtggaagctttgttctcaaccaaattctttggtaggacgcatttttcaggcttgatattatcctcaaagtaacttcctaaatacatctatgggcaatcatttaagttttgtaaggagcagtatcatggaagctcaatctttagtagctgcgggggctagaagaagtgtggggattgttaggttatttttaatcgtgtttggagtatttttacgcttgttatcttttatttttgcagatttaaaaga

SEQ ID NO: 113476 - DNA, 1582 bp, Cannabis sativa
tttttttgttattgtttctttctgcgctttaaactagtagatcgatacttgaaactaggaaaaaagcatgcaaagttgcttttttttttttttttttttttgttgttgtatgggacattagtgaaaagttaatagaagagaaaagttgttggacctaaaataagaatattttgaagaaaaatttatgagcacttaattaaatatatatttatatatataagtaaattgttttaagaaaaaaattgtgaaaagtttggatcccatggatggcaaaccatcatttgaaaaaaaaaacaaaaaaagtcatatatatttagcaccacaccaccataaacatggattgtatgatcaatttatgatattttacacacatatatttcaaaagggtctttggccaatgacatttccatgtggatcataattgcaagagatgaatatgtctccattccaacaagtgactttagcacaaccaaccttggtagtatgcctccaaaccatctgagtatagtgaaggcactcttggttatcaatacaggaattagagtgataatcataataccttctttcatcaccccaatctgccactgcatcacctggactccaatttttcccacttccccaaaataagttctcaccataatcacctcccgagtggaccaacgagcaatcgccacgtcgctggttggcccaccaataggcgtaattcgcaagcgttttgctccatctgagtggagggagtcctagcttggatctcaaaatgttgtgtggagtcaaaaattggtcaattgtagtataggtgtacgaggttgtggttagttgatgactaatagattcaatgttgtgagttgagagtgagaaagtgagagaaaatagcaaagaaaatgggagaaagattgttaacccaagtgaggataagaaggttttcttgatcatattgatgatgaagaagagagagagagagagaaagaaagaaagaaaaaatataacttaattgggagttgatatataatacccaagtgtttagtttgggtctttttatacatagtaagatgagagtgaagactagagtgtttagtgttgtggaatcgtttcacatgttgagggccatagcttttcataaagttgaggtgtagaacatgttatggaatgtgaagagtcggtccaaatagaagtgaactatataataataacaataaaaataaaagtgaaggtgtataagtttcatttattcaacttccacaactactttcaatcatttgcaccttagattatgacccaattttttgcaattattgtgtatagttagtgatgatataagcttctcaatattattatattggaatatttcagagtagctatatctataaaataaataaagtcatatttgttttaaaaggatatgagtggactcgttgaatttgattttatatagtctaataattttctgacacacaaaaaacaaaaaagtcttgtaattttaaaagcatatccaaagaaacaccaaatttgttgtgacattatcactaaatttggtatcaaaaagtatttctactccaatcataacaccaaaaattacactaaa

SEQ ID NO: 113477 - DNA, 527 bp, Cannabis sativa
agtgaaatatacttacacatattaattaattaataaattttctcctttaaaattttgatagttgatttttttctttatttgtgtttcagttataaatatgaattattagtaatgtgccaaaataaaaattatgtattttaacaaatgtgttctttctaaaattattattttccatcacaccatggatataagtctatataaaaaaagttaaataaaataaaaatttgtacatgcattctatttagtattgattcaaaaataataaaagcaattaaaaaaaaaaaacttaccttgaagcaatagaatcacaaaactatagaggatgaagaaaaggagaattgaagaatttatttgtaagaatcttgtagcttccatcaatcttgctactaattgcttatactgagaaacgatacatgatattaatttataaggttaagtcttgaatcactttatatatatactagtgaacaaagctgcacttcgtgcgatatgtataactttataaaaaaaacatcacaatacattta

SEQ ID NO: 113478 - DNA, 4854 bp, Cannabis sativa
  modified_base (968)..(992): a, c, t, g, unknown or other
ttatatatatgaaatttatagcaaacaaacacgatagcgatttgcttttacttgctaccactaatttttgtaaagggcaattcgttatatatattaattaataattgatagaattaatattttcttgcaacaatatataattttatacatgtcaacgacataagtcgaaaacatatattaacaagtgtcattttctcaaataatccaccgaaattaaattttacaagcagccttttgaatacataaaatattttattttattttcatgttaaaatatttatagacggcggatttttgaatctaatttgttgaatttggatttgtatatataatatgcttcattcttagtacttgaagtttccttgcactaagtaaatatatatattaatattatataaaatactgatatgtacatgagtagaagaataaaattatatgatatcacacaaacaataccaaaggtaattaattaagaaaaatataataatttgataaaatacaaattattataattaagcacatgttattatatgattcatttagtaacaccacatgcatgcatagaataactatattaatctactaagtgctcctggtcaacatttacaaaaaatgtggccattatatatataaataaacaatgtatgtggaaaaatattgaatcgagtatcaacacccacgtggccattatatatatagataatattgaatgagtgaattttagtggcaacttcgccgcattagcaattagctagagaaatcagctataatttaaaaaataattaattaaataaatagcatcaatagataatatttatatataataaccaaatttacacctcatatattgagatgacctagaggctaagtttatccgatggatatatataaacacaaaagtcaaataaatttctgagtactatcattaactattgtggggtgcgtttaataataataataattattannnnnnnnnnnnnnnnnnnnnnnnntattattattattattataagcttgccccctagtgaagtaaatatataattatagagtagtagtagtgatccaatatagaaatattgcatgtaactttaggtgaaccaaggacacgtaatatagccttttctgaacgatttgatagattcattttcatacacattgttacgctacacgtatatatatataaatgaccattaataattaattacttggttcatcgatcacaagttcacaaccaaagaattaattggttataataaaacaaaatgataataataaattaagtaaacacgtacgttttgttccttccaacatgtttccacataggtcgtacgttaagtatcttgtgtcgttttgagactaattctttatatatttactatttctttaacttgaagaattcatcaactgggttttgtgtttggtccaatcaaatcatatatcgatcatatcacgtaaatggttatcattttaatttaatacataaataatataaaaaattagtaacaataaaaataattacataaaatattatattttttacatttattttttttatatattttcacaatattttataaaaataataaaaaaaaattatatacaagtaacaacaaattaataaaattatacataaaaatacattaaaaataaataaaatcctaaagttattaaaattttatatatatatatatattttgtatttttataaatcttaattgtagtggcaaaatgtgaatgagacacgaaaaaaagaaaagaataataatgactaaattgtctttcgaattaattttattttattttttggttattggaaatcgccaaattagaattaatttgcctactttctttatagagttttggtattagaacatgatgattatatttgggtagactaattaactagaattatgatgatgaacactttggatatagttcatagtgtagtagtgctagggtttattcttggaatataccatattccattgatgtcacttttttccatgtggtttcctagttctcatcattcttgaattatttttttttttttaatttttcttgaaagacaaaaaatcttttgaaagtcataaattgtgtgggaccccattgttgaagtcaacttgggtgatcgtctctggaaattaatggttaaaaaagtaaaatcaataaacttggtcgatcttgtgtgtcatttatttcccaccattgaaatattgtcatagtggtcgaggcactaataaacagctatgtagctcaataaatatataagaatcagattcaaaccctatacgtacattattatgttacaggttttattgtacatcaggaaattattattacgtccaacactattaatgacatatatatttatatattttatataatatatattatgtattttttatttatttttataattattatgaaaatttcatgacacgaaaacaatttgcggacgtgaatggtttcgtatcttttattagatcgatatatgctgctgaatatgaaacaataaatcaattattgtaattagaatattatttttagaaagagtataaatatttaaatttataatacttaatttatactcttaaaacttctaagtacctgcatctgaagttaatggttatatgcatggtagtttttaattggttcaaattaataaatttttattttttatttaaatatattaataaaaaaatagcatattaactggacacctaataattcggtatctacgaaaatttcaacaatataacttcagtactaactgaaaattaaacttaactatttacgccagaacttatactttttgaaattcattattattattaatcgcccttttaaaatgaagatagcactcgttaattttatttttattgtaaaaagaaaatctttttttttttgactaaagattttttaaaaaaaaaaacaatttttgacaaaagatttgtttttgataattaaataagataaaagtgccaagtttttaaacggtggtaggacgatttagactataaaaaaaattataatcatagttatacattaatgcattaatatatttaattaaagagtatagcaaaggaaaagtgaaaaataaaaaatatatcttttgctataatttattaggaaagcaacaataatatctcctttaagcaaatggtgtttcttaattataatgattgccttaattttagtggatttttgaattttttaatctatttggtctgcacttttttcttcttcttttagtaaaataatttatatacatggatgaaatgaggttgcaaacaagtagtcctagtaaacaattattcttttttttttaatatatatatgtatatggttatttaaaaatcaatgggtgtatcattttgttcaaaaaagttattgtcccattataattagaatgaagcaaatctactggttttcaactattaagaactactccatttattaatatttcttgctcatgactcatgacactactaatggagcatattgttgtgtttgtgtttgtgtttgtgtttttgagttatatatcttttgaaattctgacaacgttagacatacaaacaaacttgaatacttgtacttacgcctatatatataaatttcattatatatatattgtatccattacttgaaaaaaaaaaacagacatttattgttcaacgcttccttttgtttcttttttttttttatagaacttcttttaaatgctctttgatattctcaaatattaataatttaagaaaaatttgacggtgcactcttttaaaagaaaaatgcattgatgcatctatgtttcaacatttgagatatttttttaattcaatttgttttttttataattatttataatattaggtaaaattttaaaaaatacaaaaaaaaaatattaacacactaaaaatagaattcaaataattataaatttttaattttatacacaagtgaaataaattgtttaaaattattttgaatttaatttttaaaattttaaaagatattttaaatgataattaataatatacatgatcatgaaaaaaaattaaataaaatttttcatgaatgccgatacagtaggagaattgtacttcggtgcactaaaattagtgggtcgataaaacactctaactgtttcgacttctatatgaattttttagtccaaattttttatataattgtgtacgttataattagttaagacattctactaaattttgaaaaattcaaaataatttactatatagaaatcaatgttcaaattcaaaccatctattttacgcgtataaaataaaaaaaaaaaatcgtttgcaataatactaaaagagataatgatttatcagtgcaatcatttgaaattgtaaataaaactctcctaatttaatatataggattaaatataagcagataaataaataaataaaaaatcatggttattactgtttgcattatttagttttaaatggaccgaaagagtaaacaacccaatggcctggccttgcctgcttacactaaaaacataaccccgtccccacgtgtttttattctctttaaaacatcacttatttctaaaaacgacatctgataggtgagacgacattattttataagtaaatattgaacgacaaaagttttagaaaacgacatgacttgaataatttgatgacatcagaaacgacaaagaattttttgttcaaacgacaaagacaacatcatcttgataaaacggcaatggtcataagtgatactctcagtaaacgacgaaaatataataaacgacattaccattgcaaaaggacaataataataatatcaaacatgatattatctcaaaaaaaaaaaaaa

SEQ ID NO: 113479 - DNA, 5697 bp, Cannabis sativa
  modified_base (5631)..(5636): a, c, t, g, unknown or other
tggaggcttgaagcggggacgttacatgcacgttccactttgaaactgcccacgtttttcctttatcttcttttttccttttataaactgttatatataatggccgtgacttggtcctcatcttcaccttcgccattgttgaagaaatctgtgaaaatgggtgttaaagctcgggccaacaaagctaaaggtaaacgctctattgacaacgatgatgattctgattttggccctgttacaaaatctgtttgtcgtcctccgcaaaagaaatcaaaatttgttgagactgagaatggtcttttcccggaggctaaaaagtaaaagaagcaacctgatcatattaataaggttttattttcgttgcatattcattttgccataacttttaaatattttatcttttatgggttgtgtttttccattcaattttagtataggttatacatattttttggttgtttaaatgttcattttttacgtttaggttaacttttgaggttttttttcctttcaattttgcaatattttaatgtttgttttattgttagtgatttgttttctttatcttttttttatgtgttttgtgattttttttttcatgttttaggaattttccctaaattagtgtatataatgttttttttttgacatggtgtagttattctattttttctcttcgttttttagttttattataatttcgttatagttttaaaactttttatgtgtgcatatgttaacttgtggaacacattccattccttgtgatttgtatattatctgatttttatgttttatggtatttagtatatttttagttttgtcctaattttgttaagtattgtatacactatttttttttgtttggtgtagttgttatatgcgaccagatttatttatagtttaattataatgttattttagttttaaaatggtttctctatttgtttgtaggattgggaatacaaattctatcaatctgattattacaggtctaagtgtgtgaatattttcacttatagtgtaattgagaacattaaaggctatttatggggatttgttgaagatgtttcgggaaagtcaacttggtcattttttagatgttcctgagtacaaatttcatccacaaattgttcacagtcttctgttgagggatgtacagaaaggaaatcctaaagaattttaggcaaaagtttctggtcagtgtattaggtttagtgccgaagaattttatttgataactagtttggattacatgggtgattgcagtcatatgaggcaggaatcaaataagcttattgatatatattttcctgtcaataaattaattgaccataagtccattgaagatgccaagaggtggggtgatgacatttttttgggcttgaagacgattgtgttgtactttattcactgttttcttttaagtaataccccaaagaaagaattagctaggttggtgggataaattttgttggggtagggcgcgtctgagttgaccctagagtcatttaagagaaaatttgctcacgggattaagataaaaaaggcatgagattaatggagaatgtagttatgatggctggtatagagtgttagggtgtccatggacttttattgtttggttttatgaatgttgtccagagatgttaatttttttttttctaaacgtgttgcatctaggatttttagaattttgaattggtcaaatgatgttacacccaaggcataaacaccaacttcaaaggatttgaggttgcagatatttgatttgcatctgaagacggtaatgtttagtttttataaagttttcttatagttgtttcatgggttctttaatgttatttgttttattttttgttatgttatgattgttattgtttatttttgtttgcagttaaaattgaagaatatgcgtcctactgatgaagaaaagaaaattcttcatttggatggattatttgatgatgatttgatatatgatcgtgcttcaattgaatcaacctttgattttggttctacttccaaagagtctgttgccgatgatattgatttgttgaagtttaaggtagaggaagttattaagaggcaaaattccttggcaaataactttgttgcgttaaggtcctttgtaaaagttgactttaagtatttattgtctgttattcaagatatatagacaaaagttaccgtcatttatgattgacatgttgttgaggtattattggttgcatttaaatcaaattttaatgtattatctattgcttcattgtatggtattttttacattatttttaagttgatttattatttttcaataggtgaattcatccaaagttagtcaaaattttgaatctaaggatgatgatgaagagacaagagatgagaaatctgaaaacattaaaagggattttgctgctgatgatgatgatgattctaatgctggtggatctggaaaagaccatagtgatgatagtgttgatgctaatgaggattttgatgaggatggtggtgaccttggtggttctggtgatgatgatgttagtgataggaaagatgttgatgttagtgagaaaaaagatgctagtgtgttagagattgaaaatgataagccgaaggatgatgaaaatgctaagagaaaaggtggcaatgtaaaagacgataattcttttaagcgcctatgccagcttgatattgaggatgacgaagttgtcatgactgtttgaaggctatttagaatattaaggttttatggttatttttttattttatttttaatttgttgtttgattattgttggttttaatatagttgcattgtatgaatattttgtggttgttttccaggaggttcccacttcccttattggtgatgaagtgtacaaatcagatgcgactgtgtttgaggaagaggaggatgatactcttccttgtactcctcttcttgacaagaggaagcgtgcccctatgttgaaatctcattttgtagattttggttcgtctgatttgaagagctctggaacggagttattgtcttcaagctttccttcagcaagagatgagcaggaattcaaaattgtcacctatgtcaatggcctttatgctcttgatgatgctatttctgatcccgtttcttctaaacttgaggtaaaatttgatgattggattaagaaaggaaggcttaaatatcctaggtgatgtttgtttaatctatttatgcatagtcttatattggcttttttaccatcaattatttaattaactttttttgatactcacgaatgatttagtaatattcttaacttcacatgttctttttatagttatttatggttgttcatttttgttttttagttgtgcaactattttgctgcaattaaaaattgttttcatctacttactgtttttttttcaccatataaataatatttaccaagattttgagaaactaaatatttgagaactaaacaaataataaaatacaaaaattaataaggtggggatttttacgtggttcaagtgttaattaaccttactctgcgagtcagtctattagcctttgatgacttatttgatgtgtttacaatatttggcaggaaaccctaactctgtactcttagttactttggaagaagaagaagacttagagcaatattggcagagctttggctatgtaaggttctgacccttcgtatggaaatagaagggtatatatagactaagtggcatatatggacatgcccataacccgcctagagtttatgctcaaagcccactaatggggtagcttgggtcccttggaaataattgtgcccatgcgtactgtagttggacaattggggaccatttatactctatggacacgtgtcgctcaaaggtttaacctttaaaagtagaggggacgtgtcatccaaaggttttacctttaaaagtagaagcctgtaatatctgtctggtgaaaaggtggatgaggtgtgcgtactaccatgcctgaacataggggacaagatctgatcctatgtcagaaaaagcataattgtcattgggcaatctgagttgtaccaaaggtagatgtctgcgacattcttgggcagttgacatttacaataggcccttacccatctaggtatgagctgggcatccttccatgtttggaccactccgggtttaggagagacattatgtcttccgcgtctatgaagcttggacaaggcagggtagactcccacttatccattagtcttggcttgttcttggttccgtgaggcttcttcgtgataggattgtaataggggatattggttagcgagattatgaggttaatccattccttcatatgccacgtgtcatatgctcagaaacatgaataatatttatcccccaagattttgggactcttcgaggtctgggagcttgcagtcttcatccatctcttggagataaatactttacacgtggtgattgctaggatcgtagatgtattctgtgagctttcatcaaggaaagggccattaattataggtaccattggtgtggtatgcatgtggcgtctttaatgcagttgtttgacaacacgtgcatactgggggcacattccttgggagaagttacaatgatggtaggatgatttaaatgacccctcctttaatgcgtacgagactcgaggtgtgtaatgatgaataataaatgccaggggtgagtttaaaattccatcttttcaacttctcatccatcagatcaaagtgtgcttttgggtcaatcaattcaaatcgcaaggatcttggtcgaagtataaatggatttaccaaacccatttcttattttttcatcacctcagactcttgatataccttttttcgaatttcagaccaaaactttgtcttttcttgaaaaacctccacttcatcgccgtatttgatagtgaatgcaaaaggtctttgactagttgattcaaatttttctaaacctctatttagcccattttgcagaagtaaagtcgttggacgatgaaattttccatccctagagcgacaaaatctttgatgttcaggccagctacgatcaggtaatcaactgggttcagtattcctaggcagttttccacaacaacctttcttttccaactcttacaacaagtaagtatcccaatgctctcttaactattttctatttcgtatctaagatagaaatacttattttaagctaggtctggatgtcttgtatgtttgagtggtaaagtgttgcctgtagagtttcattcctagggtaggattatgtggaatttttttatgtcgtggaagtgctgattttgtgtggatagttagggtcaaccgcctgtatttcgtagatttttgcatgtcactagaattttagaattagggttgaactaggcattatgagtttttgaatgaacactaagccaatgtattatctacacacttatttggagttgttaggactccgaatggctttaacttctggattcttgctttaggctttgttctagaaatttccccgggttcccaatctattgctctgggctgtctggcaaaggcaggcttctgggaatgataggttcggtgggaacctctccaaaaaattttaggggaggcctgttgggttttgtgccctnnnnnnaacccatttcaatataatcaattttacttattaataaagatcaaaaataacattttatgtt

SEQ ID NO: 113480 - DNA, 4653 bp, Cannabis sativa
  modified_base (973)..(981): a, c, t, g, unknown or other
gggcacgatttactacatgtcaaagttcatggggaaaaattactaattagccttttagtaattattttgaatttcagtatgtatgctgatgtgacataacggtaattatgtataaatttttttaatggaattttataaataaaatcaattttgggtaaaatattgaaaataccctttttcatatctatggaagggctggttttgaaattttatgcccgtagaaaaaatttaaatcattgagttcttatttaaaagatatattatacgtatatatttttgaaaattactaaaaacgatgtatatttttaaagaataattagtatttttgtctcttgaatttttagcactatctaatttgaaatttctcttaaaatataataattgcataattatactccttctgttaggttctatttcttttatcgttaaaaattaatatttttacccccgaaactttgatcaacacaaaattttacctcttttaataaaagaattaattttaaaaattataatgttatattacttatgaaaagaattaataaaaattattaaaaagtctgatgaaatattaaatttacttaaaaaatttaaattattcttcaaatttttttaaaaattttattttatttaacaccaggtacgttaaaaaatcaaaccgaaattatttaaaattcaataaataatttaatcaaactaagatttttttaagaaaaaatcaagtttatttatatttataaactcgtattttaaaaaataaaaaaaataattaaaaattcagtaaaaatataaaattattttgaaaaataaaataaaaattaagctaaaaaaaagtattatgtttacttaaataaatttatattttcttagaaaaaaatatactcaaacttgttccaataaaatttaattttcacaaatattgtgaattttaatatattaatttaataaaaataaataattttttaaatcgcttaannnnnnnnnaaattttaatttcttttttaattattttaatcattcaaaataattgtttttaagatttaaattaatctattaaaatttaccaaaaaaatgttgaatttttcttatttctattttaagagggtacgatttgatagtactaaaagttcaatagaaatttttaacaagccatatattttagaagacaaaatcagtattgtcgaaaattcaagaacaaaatttctaattatttatttttaaaacagaaaaaaattggagccctagactgagtggccgtaggcgtcggcctaggccgaccggccctccccagtctatggttaataaagcctattgtgtagaactctatttagttttcgttagtgcttattatttggatttctaaatttcatatgtgctttgctgataaggcagactgatgaattctcaacagaggtttaactttttaattaaatgaaattgggcattggattgtgtaggcactgtgtggacggcatgtgcacacattataacggcggctataggggcgggagttctgtcgctggcatgggcgatgtcacagctgggatgggtgttgggtgtcggcattctcctgcttttctcggccatttcactctatactgccactctcttggctgattgctatagaagtcctcatccagtcaccggcagaagaaattactcctacatcgaagctgtcaacgccaatttaggtaccaaattagatagttaactataccatatatatatatatatatagttatataatataatcattgtatatgcgtatcatgttctagctagtcatgtaagtcttatgtataccgtatagaccatagttagttttcctatatttatatttatcacatttttttctcctaataataaagcccggcttccttatgcatgcatatgcttagctaataattgaagattttaatgatgggtgaattaatcaggtgaaacaatgtgcaagatatgtggatggatcctgtacggaaatcttaccacttttgtaatcggctataccataaccactgcaaaaagtctagtgtaagcaccactactacttttctatttttcaaaagtaaattgataaattaattgatgatatgctaatttaattgaactaacgatgtacactgatcgatcgatcagggctatacaaaaatcaaactgtcaccgcaaaaaggggtcaaatatgccatgcagattctctaacaacccacatatgattggattagggataattgaaattttgttatcccaaattccaaacttcagcaaattgtcttggctctctgccttggctgctgccatgtcatttgcatattctttgatcggaataggaatgtctattcaaaagattgtaaaaggtacctctatttcatatgtaaataaatacacaaataatccaactaattctacaaatgaaagtgaataattaacatatttatattgtaatattatgaacaggggctgaggggagaacatcaattaaaggggtggcagcgggatatgaggtggggatgtctgcagctgataaagtttggagaatgtttgcggctgctggtgatattgcttttgcttgctcttatgctcaagtttttattgatattcaagtaagtttcattcccattaataattaaattattattattgtttctctaagtcaaaaaaaaaattattatttttttttgaaagaaaatgaagaaaattaaacctctcggtcattacaaaataagtctgatggcaagtaagcaacatgcaaacaaccaaactgattgtgggtaaacgcccacttagccacatcatgggcagcaaaattactgtttctgagaatacaagtaaaaatacaaccaccaaaacatctagagagatccaagcaagaagaagtgtatttctcaatctcccaacacgaagtcacgtggttgagagagttgatcactacgctagagtcactctctatgatgtacttgtgaccattaagctttgcagaatccagggctaaacaagaagcagatgcgtcgccacacagcgcattcgcaaaggtcgtagaaacccagaccaccttgccaaaatagtctctagcgaccattgcaatgtacgaactgtccaaaccaactctgacatcacaatttagcttgagccaatcctggggaggagggctccagccatccctctagatcggggtcgcagcgggtaaaaaagcgactttcaaatctacataggaacaatggatagtgtcaatacatttattcattttaagcatgtaattattgtggaccttttcattcatgacccgccaaatagtatccaccacaactaaagtatagataaaaacttcaccaatatttatgccttagtattgagagcccaaataaatttaatccattcccaaacacagattttcgaaccaaaaacaagatagataccccacaggaaaaatctctaaaggtggaaagctaagttacatgtaaggaatagatgctccatagattcctctaccattacacaaatagggcatttcacatcatcaacatgaaatctcttcttaagaatgaccctaaggggaagagcattagagagaatgctccgccaaaggactttgtgcctctccatgattttactattccagagcttgttccaaaacgaaggtgccacctcataatgaggagctctctgtaaagcttgaataagtaggccaatttacatgaaaaccggtcattacactctttggcccagatctacttgtcagttcctataccagacagatttcccctttcaaaatagcagtaactgtttctttatcaacatgtcagccaccttatcaaaaccacatgcaggccacccattagatttggggaagaaggagtttccatgagtcacccacaaatcatcctaaatttttgtgtccttaccatcagtgaccactttacaagctcctttacgaagaacgaacaagagagatagagtttgaacttttttttagatataaagtttgaaaaattttatcgtttaggattttcagtatggagagagagagagagagagagtttcaaaatgtgacgtttattatcctttcttaattttgtttttgagttggaaaacaccttttaccttttttttttttgcttaatataagaaacatattttaattatacgcgtgaatcagagcattaaatttggtcgacagagaatgcttcacgcgtgctcattaatttttattttttaaatgaggttcacgtccaactttactagacacaagctgtacattataaatgtgtcctattcaacaaagctggacgtgaaaaagacataaaaaataataaaataaaataaaaatataacattttacgtccccaaaactttcatgttgagcattgctagatatgataaataatctttcatgttcattaattaatgctggacatgaaaacttcccaaaatattttcatgtcccgcacttatttttttggacattgaaggggttttctgtaatagtgttagaaactattataaaaaaaagagcattgctcttggacaccagtgctgcttagtaccttttagagtggcgtcctgcaattggttagcgatatttcctaaaagattatattaaattatataggacccgatacttttttttttttttttgacaaagtgattaaaatcactcat

SEQ ID NO: 113481 - DNA, 9583 bp, Cannabis sativa
  modified_base (433)..(433): a, c, t, g, unknown or other
  modified_base (7642)..(7662): a, c, t, g, unknown or other
tatctataaccactttttaaattagatattacctaattgaattaattaaataattaattaacccaaaaagacaaactccatagggacaggacaatacccttatcttttaggacaaggatggtgtcttttgtcctgacagcttttgtcttgacaaatcttgtctcgacaaattttgtcttaatagtttttatctttttcctatataactaattcaaaacaattatttatttattacaaaaataaataattactatttttttaattcaaaataattttttcgaacatcgttatacaactctttatcccacccttgacagtattttaaggtggtgatttggggaccatggacctataattctaagctccaataaactaaattatttattgagtctcatcaactaaataatcccttatttattaattccatgattantccactataaatatagaattgaactcttagtaattataaaattttatttactaagtttaactgcagtgtccattgatataattaattccagtgattagccctccatatgtgttggttcataataagttttggtcaagttaccgttttacccttctaattacttctttatcttttagtaccattaattcactagtagaagtataataagatcccatctgaatttgtgcacaacattctagttccagaattaacacttaaaggaaaccagcattcgatccattagaaagttaggatttcataattgtacatcatgtttctagcaatccatattattagattcccaaaataaaagttgtaagaattatcttctctgagaaactttaacaagtgaatcaaaaaaactaataacataaatagcagttcatgataactcaagatttaagtcgatctactattgaccatcgttatgatatgaattagatatttatgataaatagcatgttaataaagacaacttaattcatatcggtccttgtcatatataatctctattatatattgttgacctcacttctagtcaacgacaatgagttaagataaaaagattagataaagtaaataataaaaagtaaaaataataattaaagagaacaccataatttctagaggttcagccccgtgagaatgataatagtatactccccttttggttgtattaacttgagagacaaagaatgaagtattctctctctaaagctcttacaatggatctttgagtaactctctcttagattgctcttttcttttcaggtgttctttctgaatcaaatttttgtcccctgaatagtgagattgaaccactatttataggagcttattacatgaagaatggtctcctttaatctataatatataatatataaaataggaaactaaattaattccataattacaatgtaaagaatggaaaactgaggctcattacctttattctctgatctaatcctacaaatatagggattatcttcgtgtcttggaagcaatgatgcctatctctaaaattatcaactcacacatcatgttcagtgcatgtaagttgatcacacgatcgactttgtcggatgtctcttggtgactctattcggacatcctgctatgcaccgacaacatagacatttctaccaatatttggggactgttaggataacattttcccccaagtctgcgtaggaccttcttggtcgcacgtggacttcattcgatcaggaaccttgcccgaatgggtgatgcgtgtcttcgacggttgaggttgatctgacgtgacttcgactaagggtctttttagtgtctgagcattaaatacctcttgaaatttgtacctcaaagcacacattgacagttgagtgacagtgcatgcgtgatggttgtactccttataatgagtactaacattcgcttttggggaaaacccaaatatttgaattttaaaatgatatattctcctttgattttcttgtacatgattttaagcgtgcagactttaattttatctcattgtacagctcaatctgaagatggcatatacatacccccatgccaagtctacagccttaaaaaccacgaccaccaccaacaacttgaagaaggagatggaggaggctaaaaaggaggtcgagttgaagtgcactcaactaggtgaggttaacaaacaagtcttggctgctaacaagctcgttgaagacttcaggaaggagatcaatgatatgtcgttcactactcagctcgaagtggacaatgaggccttgctaaggatgtcaactcccttaaggatgagagggaaaaccttcccactcttctttccagtttggagaccaaggtcaaggatctaattgaagagaaaaggagtttgtaggagaccttgactttaagcggtcagattttggtgttgaacaggaggtgcttcaaaaggaggtggaaagcttggagacggctgctctggatgtcttcgataaattttggagggccaacacaggggccaactttgattacctcaatcaaaacaaagaggattatcttagtttctgtgaatcccaaaaagtcaaggaagatgccaaggtagccaacaccaattctctgaccgaccaagacaatgaaaccgtagccgctgatgacgcatatgatccatacaaagaaccagggactccagctgcatgaattgacttctttttctgtatcagtttagcctacaagcctacttttaagtataatatagccgaccaagcatcttttaaacttggagaatatttcattttattttaagacaactggctagccgcgcagcttttaatccaagatatatcaagctttgttatcttttaaaatgaatattttctcttaaatataaatgattgcacatgtaaatatttttatttttcgagattgttacttacctatgctttatatgggtatagttgccccccaaatgactgagcagacttatgaatcttggtcacttgtattgcacaagttcaattttgtctgtatggctactaggtttaggcaaactatttgtacgcattttcaatggtaattacataacttgctatgaaaaagagataaaagggacacaattagaatgataattaatatatttattcatttattggtctagatgtgttgttactgtagtaacgtacatgtattaaattataaaagcaattatatgttttaactaatctttagctaattgaaacataaaacaattgaacggtatagttcgtccaagagacattactcaagagtaacgatttctgaacatattgtactttaagggttgtcatccgacctaagtaccagttatttttccaagcctttgagcgaggttcactcaaaaggatacctacttaagagtgagtgttcgagcattgtatactttaggggggtcatcagaccttgtacacttagtggtagtattttctcaaatgttcaccattctaatatcttggtactagaaccagttccatgttttcatcataccaaccaagtttgtatgatccataatctgtaaatttagttacttgatatggcccttctcaatttgggtctgagcatgccagttgcattgtcttttgtgtttaagaacactcttttaagtaccatatctcccacaaagaattttcttgccctcacttgcttgttgaagtaccgagttaccttttgctgatgaaccactagctttaggtttgttgaagctcttttttcttcgatttcatcaagtgattctgccaggagggcatgattagtttcatcaagtgattctgtgggatgagagttctaattccactagtagcatttccttataaccataagccatggtaaaaggtgtctgccctgttgctgttcttttagttattctgtatgaccacaatacttctagtaattcctccatccatttccttttagcttcttcgagctattttttcatggtgtctttgagtgtcttgttgactgctttgacttgcccatttttttgagggtgttctactacggagaaatttttaatgattccatgtgtcttacaaaaatctgtaaacatctagctatcgaactgtttgccattgtcttagacaatcttgtgtggaagtccatatcgtctatgatgttttttactacaaaatctaataccttcttagatgttattattgccagaggctcggcttctgtccactcggtgaagtaatccattgcgaccactgcatattatactccacctttgcctttgggcaactgtccggtcaggtttattccccatatggcaaagggccatggactttgcatatgtattagctcatttgagggcgctcgaggaatctttgaaaatcgctagcatttgtcacactttttcacatgggcctttgaatcttcgatcatagtagcccagagatatccttgcctcagtattttctttgataaacattgccctccggcatgattaccataaaatccttcatgtacttcggacaagagtcgtgtagcttcttctgttgtcacacatcttaacaatggcatggagaagccccttctttacattataccttccactatgatgcaactttctcatcatttttgagcctcgtttctgttgcttggaagttttccagtgttgagataagctgttatgggagtcatccagtttggtgtagtatctatcatttcgatttcttcgacataggtgatactgggttcttccaaaaattgaattggaataaggttggccttatctgttaccgtgttgctcgcaagtcgtgccaaggcatcagtagttgtattttcttcccttggaatttgcttgagggtataacccttgaattatgcaagcaggtcttggatcttactaggataagccatcattttttctgcacgagccatgtattcccctaagacttgatttaccaccaactatgaatcactgtagactttaatatattcagcatgtacctcatgaacaagctttagtcaagctatgagtgcttcatattctgcttcgttgttggagactttgaaccccaattaattgcttcgtgcagaggttgccctcaattgtgatgaggacaattcctacaccagaaagctgatcggtggctgatccgtctatatgtaacttccagatgggtttgtcttcattctctttttgtagggacttctgttgtagtccttcatctggctcgggattatcttttagattatctgcttctttgcccgtgcattctgccacaaagcctgccaaagcctgccctttcactgctgtacagggttagaaaattatctcctagtgacccaagtagccgtccagaagcatcaagcttttgcaaaacttggcgtaaaggttggtcggtatacacttgaataggatgagcttagaaataaggccttaactttcttgtggctaagatcagataagttagcttttcaattaaaggatactgaccttctgcctcaactagtcttttattaatatagtagactggatgctggacattgttctcttctcttatcagcacaatgcttatggtgtattcagtgactgctaggtatatccctaattcttctccgtccaaaggttttgagagtatgagaggttttgcgagttgattttttaattcttggaaagcattttcacattcctctatccattcaaatttcttattagctcggaggatgttgaagaaagaaacacacttattttttaattttgaaaggaatgtactgagtgcagctatctgaccagttaggccttacacctcctttacttttgttggtgacttcatatccaggagggcttgtattttctctaggttggcttctattccttgagcattaacaataaatccaagaaacttacccgagctgacctcgaaagaatactttaatggattgagtttcatgttgtattttttgaggattttgaagcattcatccagatcctctattcgcccccaaccttcctggatttaatgagcatgtcatccacatatacttccatgtttcttctgatctggtatttgaacattttgtttactaacctttggtatgtagctctagaatttttaagaccaaacaacattactttatagttgtataaacccatgtctgtttagaagcttctgtgttcttggttaggtggatgcattctgatctgattgtaccccgaataggcatccataaagcttaggatttcatgtccaactgttgcatgcactagttgatcaattcttgggagtggaaaacagtctttgggacacgccttaatgaggtcggtgatgtcaatacatactcgctattttttgtttggcttgggtactagtatggggttagccacctaatccgggtagaaagcttcaataataaacttgtttgtggtgagccttactacctcttcttttagtgcctgcgcacgttctttgttcagcaaccttctcttctgctagatgagacggaagtttggatcaatatttagggcatgagacatgacagcagggtcaatgttgaccatatcctcatgtgaccaggcaaaaatatcaaggtttgctcttagaaattttattaagggtaattttacttccaacaacaaaccttcactgattttgagcttcctgatcgggatggttggatcgatctccacttcttctaactcttctactggcccaacatttgcatttcattccctaagttggggatctatgtcttcgtccccaccttgggtgaatttctattgggcaatgcctttccctttctctgaactctggctgaaagtattttcctttttgaccttagatagagtaaggttgtagcattcttgtgcaatcctttgatttccctttagacaatccactccacttttagttggaaacttaacgcataggtggaatattgatgtgataactttcaagtcatataaggctgatcggcctaacatgacgttaaaagctaaagggacatcaatcacaaagaactgtgctattaccattatgctcttcagagcttgttctactgtaagtggtaagaaaatctatctaagtggcgctacactctagctggagaacccgtagactagttgggtgcaaagaatcaagtctttaagttgtagccccattttttcatatgttgtcttaaatagaatatttgagaaagcttgttgtctaccattgtaacgccctgatacttaggtgcgctacagtaatttttcaattacagtgccacctttgttaatcaaaggattttttcttaaaaatcgtgtaaaattaaaaatttagatttaattgctaaactttataaacttttaaacatttatttacaaaagtcaggatctcgtatttaaacttttacaacattatccaaaatatatatttagtctggttgcacagtgactacaaaataaaaaccctaggtgtcccgagactgaacactccaggtcgcactgccatgacatgtacaaacaccatcctagcttgaagctcactcctgttcagcctttgcctttccattacctacacatggaaatatcaactgtgagtcgacggacttagtaagtgttaacgcaaatatttgtttgccaaaatttgagcctcacagtgataatttcacacaaaaaaaatgaaagaagtaaagtaagagaaatgaacacgaaggattttttacgtggttttgcannnnnnnnnnnnnnnnnnnnncgagtcaatcttattagatttctcatgttcatgtatcaagcaggttcaaagcagattagggaatctatttatcccggtatttaagttgtgtttactggcgcatttcacatgtgcaccggtaaaaactcttttaccaacaaagattcactgacatcttttgctggcgcgtagcattgccgtgccggcaaaagtaccttttcttgtagtgatttgtgcacaaatttcagttctagaactaacacttagagggaaccaatattcgatccattaggaaagataggattttatattataaattaagttctcaactatccatattattagcttcccaaaacagaagttgtaagaatcatcttctctgaaaaactttaaatagtgaatcaaattgaaactaataacatgaacatgagttcatgatttctcaagatttaggtcgatctactaattgatcattattgtgatatacattaggtctttatagttaaacgattagtttgataaagataacttaattagatttcggtcctgtcatatataatctctattatatacaacaaagatgtccctctacatcagcgatttgaatcaagattgcttgaaccaaataacgggcatcggtgagccatactagcaactgttgataaatttttttataattttaatatgttactgactattttattcataactcgtgatcttaattctctgtacaatacaagtcacagtctcatatatgaatacaaaaaattcaatacttatatctaaattattaataaataattaaatattcaaagatatatcacattgttcaacttatatttataatcaaaatatctttacatgcttttcaggacataaaccctaacaatctctcacttatcttataaaaaattggcatttatcttaatctcatattagttacatgtgccataaaagactttgcatgtagcgtctttagtgtctttgtaaacggatcatctaggttatgttctggcgcaatcctcaagaccatcacatcacgtctttttactatatctctgaatagatgatattttctttcaatgtgcttgcttttcttgtggctccttctttccttggagttggtcaccgctccactgttgtcacagtaaagcacaagtggtttttctaacttccaggtcagtgtagaacttcttcaaccaaactacatctttatctgcctcacaaactgctataaatttgtcttcgatggtcgaatctgcaatactaatttgattaatatttcttcagactacagctccaccaccaagagtgtatactaacctaaatgtcgatttacgactatttctgtctgattaaaattcaaaatcagtatatttaatagaatttaactctcctttgaaatacacaagcatgatatcttattctctaaatataagttattatatatttagtagtatatatattatgaggacttattttaatttttatacattgaaaaaataaaatattgatatgaatagatataaatacttttattttaataatatttttaaatgagtattctttgttatagttttagtgaaaatatttagaatatgaaataagaaaataagatatagtattcttttgtaaattcttgaaatattgtttttcaaaatagtttcaaaagagtgagagtaacttattttattaattttaaagtgtgtttaaatatatatgtatagacttatttaaataataataataataataataacctatagtgattttggaaatgaagttaaaatatataatattttagatctaaattttgtgtacatgtaaagtatactaggttgatgttacgtgcaatgcacatataattattattttttaattaagttcaattaagtgatgttaagtgcaatacatgtaagtttattttttttaattaggtaat

SEQ ID NO: 113482 - DNA, 1747 bp, Cannabis sativa
  modified_base (31)..(31): a, c, t, g, unknown or other
taggatgttaataaaacatacatggtagtanatctagatcctggtaaaatattttgaacatatactactatagaaagacttattcctgtaagtcctcaaataagtttttttaaggacaatcgctaataaaattacgcgactttttaaaactatcgataataatggagtattcttaacggttttaaatagttgtttagaattcttgattgtttaaagtagtcacgatttcaaaattaaaaaaagagtgtaacaggtatccttgacggtttaaaaccattgggaaaacctgttattatataaaagccaaaattttcatttcagaaccccaatcacacgaactctctctctatctcgaaacccgacaattttaaatcgttaaagatactattttaaatataaaaacccaataatgttcattccaaatctctctcggtcctccactttctctcctcgactacaagccatcaccaccaccatccctctcctccactctctgtctcgctccatccctctcctccgccaccactaccactcgtctctctctctccctctctccctctccctctctcattcagagaaaattgcatgaccacaagccaccacgaacaccaccgtgactccgtccctctcctccacgagcaccacaagttcaaatttgttcatcatttcttttctatttctatttttttgtttattaattttcttattttagtatattgttttgttttttttatggatttgagattatttttgcattttatttttgttttgtggatctagacctgatatgattttgtttttattggttttgtggtagattggaatttaataaatggaatggcgatagtggtattgtagtggtgtgcttgcggtggtagtgggtagtggtgtttgcatggtggtgtttggcggtggtggtggtatgcagtgatagtggtgtttgcatggtgctcatatccctaatgattttgcatagtcgggaaaaagttttctcgacgattttctactgtcgcctattttatcaaattttcccgatagtcgaataggcgtcggtcttagagaccaacgagaatactttaccccattatttaaaacagtcgaaaaaccccaattttatagtagtggtaattgatttctttgtgttagattttaattagctgacaaacataattcgtttttataatttaattttataagtcatttgttaagaatttatatgtggtatgttttatttattttaagtaacttattttatgcttcaattatcttttatctattttagttgtgttactatgtctttgtttcaatttttaattggttgtatttagaaataattttagataaatgcaattggttttgttacgttcgcctctttctcgcccgaagttgtcggaattattcgtatgactcgaacgtctaactccggtgactttctggtgatgatgactataactttttcagtgtcaaataaaaccctaacgactttatagtgaagtggaaaatgcaaaaactttccaatgatttttcaatgaattatctggtggagatgccaacttcatccattttttaatgggataattatcataagacacaattttttgtaaaaaaaaaaacatttttacatttaaataattttttatttttatatgtttacgattttttatagaaataacatgaaaactacataaaagtaacatgaaaataacatctaaataacaacaaaaaataacatatagataacaaaaaa

SEQ ID NO: 113483 - DNA, 2523 bp, Cannabis sativa
  modified_base (698)..(710): a, c, t, g, unknown or other
tgtttttgcactaaaaaaaagtattagaaatttgagaggggtatttttgagttttagataaagtgttcatatattttcaatgttaatatgtattaggtatatgtaagtatagaaaatcaacccaaactatattaaggctacgtatgtttggtataaaaaataataattgcacacataaaataaatacgatatatatatatgaaaaaaatatgcatatataatatatccaaaataaaaactaacaaaacatataactataatttttttacaaaagataaatcgttaatgtttgatataaaaaaatatagtataaataatgatagaaaatcacctgagagaaaaagaaaaggatagaaaatcaatataaacaaatttataggttaattactataaaatagtgaagaaatagaatttcttcctacatacatttacaatagaaattttgtgtttttaaattacatatcgctcctaatttgtaaaatttgacaaattactattcacactacaaaaaatcttactattcactcttatcacagactatgtcatttgctcgcttatttttattcggatctcaagcatttttgcaccatctggataggtgtggatcgaaaacatgctagggatatgactctgataccatgatgagaatcatgaggttccatctcaaaaccagttggtgatgagtggagtagcccatnnnnnnnnnnnnngctcaatacttttacatttaatcacaataaaatttatgactaaaaataaaaaagttatgactaatcttaattatcatttctacattgtgactaaaaagtttatggctaaaagtattagtcacaaaaatcacaatttgttgtgaccaaatgtcattagtcacaatacgtgttctaactaaaactaaattagcaacaacttgtatctagctaaataaaataaaataaagagaaaaaaaaaatctatgcaagttaaattctgaataactcaattgtatatataggaaggtaaactacgaaacacaatacttattaattttaaatatcataaattctataaaattaaatattaaaaatgaaattgatataaaatgatttttcatttatttatacatagagtaaatttgtgattatttttggtatgcatagaaaaattataaattatttatatatataatatgtaataatgtacattataattataaaaaatatcttctttatttttgagaaattctaaatatattacgatgtggaaaataggatttaagtagcaatacataataaccacacttacatacaagtatattattattataaagcatacatttttttttcttgaaagcattataaagaatacatagtttagcccaactaacacaaattctctatttatatgagaatttagctttataaaacttatttttaacgtgtgcgattagcacaatattgtagggtaacatttataagtattaaatatatatttaaatgtatggagaaagtttgcagcgcacctcatttgaacctgtttggtacgtacatatgtttccactgaattggtaggtcgttttattaattaatattgtataaatgaatgagtacgtactactttttgaacaaaatatgtcaaattttcaacaaataatttgttcaagcttgtctttcaaattccataaagccatttcttttgttttgagagttatcatcatattatcaacaacttcaaaaaggcacttcaatccattctaaggtttcacacttcaaatctcttatgacataatattatatataattaaatcagaatgtacaaaaataaaaaaaatctttttcatttataattttatgtgatttatttatttataaaaatgaaaaataatatatctcaaaatgaaaacaacataatattaaaatgaaaataacttttataaaataaaaataacataatcttaaaatagaaacaacataattaacctcaaaatgaaaataatttttataaaaataaaaaaatctaaaaaaacgtaaaaatagaaaaaaataaaataaaaaatacagtatacatgacaattctattttttaaaaaataagatccaattaaagatgttgtttttggttgaacataataaacatgattctacacattattagatatctatagaactatgcgttttgaagtgtatataattagctctaatcactttcaataatacaatatatgtcaagttatttttaatttttctaattattaaaatattataaataagaaaataagagataaactgataaagtaagagagtagatcgattaattaaacacatattttatttttgtaaggactaggagacaaaaaagaaaaaggaaaaaaatattctaaacttgctagctagagatgtaaaataaagattgtgtttacatagtggtaatgctcagtttgaataatataatatagggattttttcatatataaccttattagagtcaaattttacatttttattactataagaaaaaataaaccaaattagaaaaactaaagtttttt

SEQ ID NO: 113484 - DNA, 1459 bp, Cannabis sativa
tggaggcttgaagcggggacgttacatttgtgacacaggatcaaatgttagatcactaaatggaaagagtcttattccgttgtactacacctttgtaagtattccatactaaatttatgatattgatgttataagaaattaatatttatgttaaatattaatttatgtgaattacaaatcgatctcattacgcatatttttctaacagttatatgtatgattttcttaatgagttcgtcgactcacaaatatgttgttatgtgtaagtaaaggaaaagccaaaattgaacagtagtgtgttgtgagcttggatgaagattgtttatatttagtctaaacttagagggctacgtttctcgagacaaactgctaacactcttttgtaaatgttgttagacaatagttttatactttatgatgtaaaatattttgtaactagagtttaggattccggattgtaaatacttattaacagtgtttgtttttaataaggttttaattattaagaaaattttgttaaatacatttttaatttcaaaacccattgattagcaaaggttagcacaataattaaaaaaaaaaatgtaatatgccttagatattagggtgttacactagatatgaaaaatatccatttcatggcactggatatcatgtcatgcagaaaagtgacatcaaagagttttcatgtccaacttttatggacatggaatggggttttttgaagtagtgttttcaaatatatataaataggtaggattggacatgtagatcggtatctaatccgcacaaatgcagattttaaattttccaatccaatccaatctgcacaaatacggatattatcacttggtggattagattgatttgaattgagtattttatgaacaccctatgctatcacattttggagtctttagaaagagagctaacttaggagaatgagcaacaaattagccttatagtacaatgcacaaatgaaacattagtgaaagagatttttacactaagtatcatttttggtacaattttaacatttataccggcaaaataagttcttttacattactatcatgaaatctttttttgttcttttacattactatgaattttttttttctttcaattttatgatttttttaattactagtttaggaagtcctataaaaacaatgtgaaaaacaataaaaaaaaataacaaaaaataatatgaaaacacaacaaagtgagttaatatatagtcggtatttttgtgaaaaaaaattataattagaaaataaaatttaaaatttggtacaaccttaattttgtatttttgttccttcataagttttttaattgattatgaaaaaaattctttagtaaaatgcttgcacaaataacttatgtatatatatatatttatatcttccaaaactactctgaaaaaccgtgtttttgcaaatgtcagttgtatata

SEQ ID NO: 113485 - DNA, 2386 bp, Cannabis sativa
  modified_base (232)..(240): a, c, t, g, unknown or other
  modified_base (575)..(591): a, c, t, g, unknown or other
ttttgacaactttctttttaatattgccaacttgaaaaaaattcttaacacagacagatacagaaaatgtaacactacaaaaaaatcttacttttagttataaattatcattattgtggtgtgactaaatgtgtttttagtcataatatttgttgtgactaaaactaaatttagtgacaacttataactaaatactatgttttagtcacaagtaactttttgttgtgactannnnnnnnntttagtcacaaaaatttatattgtaactaaaaggttatcactaaaagtaacagttttctatagtgtaaacagatttgtcataacacatttagatcggatttttattaaattttatttttgacaaaaaatcagtccaggatcctatttgtactattttgaaaaatacaaactttattttgtcatttaacaaattaataatttttacaaaatacaaaatccaaaatggtatatagcttattgtaaatgtgttaaacaagcagcgcacaataacaaaatatatccgtaataagatgcatttgtgtctataaagtcatgataataataataataataannnnnnnnnnnnnnnnnataataataataataatatctcaactttttataaaagaaaaagaaaatatatcaaattgtattaagggtaatcatcagtcttggattagacttagatatatgcagttttgtgggtgcatgattggtggacaatagaaagattaggttattggagtttgatagctagattttgcacaagtcagatgaatgaaagaatattataatatttgaatgatacatatgtataatatttcatatataaattaattacggacacaatattctatgtgcagatttgcttttagacaaaaaaacaaatttaaaaaaattacacactatttatagaaaaaatttaatatttttaccgttaaataatttttatattatatatttttataaaattattttttcaattttcaatttttttattttttaattaaaattttacatatgtcttataaaaataacattaaaataaaagaaaaaacagcaataagacataaaaataacaatatgaagtaattaaattattttgaaaaaattaatatgaaaataacatatataaaacattaataatccgtaatcttacaagaaaataaaagaaaaaaaaaaacttctaaattataaaattacttaaaattccgtacaatcaaattttatttaagttttttattttttaactattttaagtagttatgaaaatatcacaataagaaaactaattactagtgagctagagggaatacatatagtttaaaagttagtttagatgcatttatcaagatcaagacttctttaatcagttttatcttttttagttagaaaagtgaaaatataatatattctataaaatctttttcattgatccattttttaattgagagtcaaaattttaaaaatattgaacaaaaaaatcacttttataattttttaaataatttttttttcttaatcaatattttatttagactccgacaccttgggaactgcactccgaccccggccctagttctagactcagaccacggccctgaccctgaatctagacctggacccaacttaaataaaaataaataaaaaatagaaaagaaaattatagacacatttttattttttgtttttaaaattaaaaaacaaaaatgtttataggatacatttttatttttcaaaaataaagtattaaaaacataaattttacttttattttaataattaaaaaataaaaatattaccaaatgcacctatataaaaggtctatcgattatatattacatcaattatatttattttctttttgttggaggcatgcatttggcaatttgggtctaaacaagttggcatatttcagtatgtcaaaaaaaaagttggcatatttcagtattttgtacaaagaattatataaacctttaatacagactagaaaacaaggaataaaatttttatttatttatttatttatttaattttttctttaaaaaaatatggcctcattaaaacaattatatatatatgtatagaatatttgtcaagttaactattaactttaaaaatattaaactatttaatttttttaaaaaaatcacaataatatatctttttatattatatgaaaagtttgtttatattcaaaatatttagatcaaattcaattttttttatatagttgatgaaacaacttcaatctatacaatttttgaaatgagatattttttggtttatcataattaggctaaatcattatgcaaccgaaaatcatattatctttcactttattgtttagtataagttttcactaattatacaaaaaaaaaaaaaa

SEQ ID NO: 113486 - DNA, 614 bp, Cannabis sativa
  modified_base (27)..(40): a, c, t, g, unknown or other
  modified_base (574)..(589): a, c, t, g, unknown or other
aggatgttaatgaaacatacatggtannnnnnnnnnnnnntggtaaaatatttccaacagaatcctcccctaatattgcttggagaggtccccgccggaccctatatccaaaagcaaaattccaaaagaaaattgttccaagatgatcagaacgggaacactaaaatgaaataaaaagctacaaaatgtctcatctagaaccataaggatgttagacagagaaattaagttttgcagagcttagtgctaaatttttgttatttcaattcactggtaaagacagaagatcgcataaatgttcaaagtttctcccacagactaaatttcaatattgccaagaatttcaatatacattgaaagtacttacttgatgaagaatttgtgcaagatggaggatgtggagaaggattcaaacgttatgcctcagtcttaaagaaatctctatcaaagaaggttagtcaaggagcacaagtcttgtccaaagggagcaatctttgttgatgagcgctttcatgtccgcctgaagatctagttgtcctgatggtgtagaagaatctgttggaatttattttannnnnnnnnnnnnnnnactcacaagtatgttatttaacacc

SEQ ID NO: 113487 - DNA, 6838 bp, Cannabis sativa
  modified_base (1712)..(1745): a, c, t, g, unknown or other
  modified_base (2707)..(2710): a, c, t, g, unknown or other
  modified_base (4032)..(4032): a, c, t, g, unknown or other
  modified_base (6796)..(6809): a, c, t, g, unknown or other
attataggataaaataaatgatttttttttttggttttttttattgttatgactaaatatatttaaaaaattcattgtgagaggtgagaggtgacaaatagtgaatggaatgaagaaatatgtttttttttgtcctctatcttctaacaattttgtaattgttccatacaaaaaaacaatattgtaattgtaaatttattgtattattgtatttttgatttcatttatgcaacctcttaaaaggggtgcaacgtacttatgttttggtgtttaagaaaatactttagtttaatatttttgttgttatgatcgtgtatatttatttattttattaattttttttttttgaggaaagagataaattttaaaaaatttaaacaaaaaattaatatgctcacaatagaactcaaataatttattctacaggtgacttatttattttatactaatttaatataaattatttgaacattactttttatattaaaaattattttaaatttcttaaaattttacaaaatattttaaataactataataattataaaaaaaataaatcaaaaaattatatgaataccaaaatatataaaagatgcatcactaaatttcttttatggtttgcagagtatacatatatatgtaagtttgagtaaaatgaatgcattactacttcaaattataaaaatcattaggaagtttcctaaaaaaagaaatcttattagggaagtttacattttaacttaaaaaactataactactactactactagtaagtgtcatgtatgtatattagtaaaatattgatactttcaattatcaatgcaatacaatgatgatttctttttggacaaaatgaaatacattaacttttccaaatgggaataaaacaagttcaactatattatagtttgtattttgtttttacactcctcttgtctcttgacctttattattattattattattattattcataataattagtattgctattataaaatacaaaaacttttatgaaacaatacaatttattcaaataattaagctcttttactttggaagttaaattctaatgaaaaaagaaaaataaaaaaatatagaaaaataatgtaaaaaaaagaaagaaaaaaatctcatatttgtcccttatgttttttctaagaagaaaatgtaattttcatcaaacaaaggtcatttaacaataaagatattacattagcatggatattattatccttactaatagtacaactggctttgaaaaaggagatcctaacaagaatgaactaccttatttgcttgttttacaaattcaacaaacatgtttaatatatgagacaataaaaatttggactcataaattaaaatatcatacattaatttttgcttaaaatagttttatttccttaaaaaaacataaagagattttctttaaaatttacatgaaattagacggaccaccctaatttcatttataatgttagataaggatgtgcagaaaatcatccgatttaattacagtcgactgatctaatagaatttgattttagttataactggatcggatcggatgtaaattttaaagattcaatcggatcagatttgttgttgaatgagacatctgatctgatagataactgaaccgaatgtctaattatcatccaatgaacatcgaattatgttaatatatttttaaaatatatttataattnnnnnnnnnnnnnnnnnnnnnnnnnnnnnnnnnnattaattaatttaatatatatttaacacaaaagattaaaaaaaaaaccttagatctaaattattaattctcatattcctaaatgctaataaaattgtcaatgcatattgaataaaatttattttttggcaaatttattatgggattatgagaattaggttgcaggtcatttaacatcttagcttgagcattcaactattgtgcaaggtacgtaaccgcactactatagcaatcccttcagccacagagaacttattacaaagataaaataaaacaaaattatattacatagacaagactaattatcgcagtaattaatttaaacaaatgatactcaaaactatgtcacagaaataacactaatcacagtagcaaaactacagacccgactaagctacgcctaaactcagggaggatcagcaggccatacaaaaaaaaaaataacctcaagtgaagcagacaatatataaaataataatttatattaagcaaataataatataattataatttttttttgttggttactacaaagaaaaagaggaaaagaaaagaaaaaaatagtgaattgttaatactcacttttttttttctaagttaaataattatattaaaaataattattttgtttttggtaaaaaaatatattttgtttgattaaaactttaaaagggaaagtgtgattgtggatagaatttgcgtaacgttgaagttaattagccaaataaataaataaataaataaataataaaaaggggtttgagagcacatgggattaaaatctatgattcgttggacaaatctttgtattcagacaactacttcttcttatttaatatcatatattatataattatacattctttcttaattttaatcttcttaattatttatttatttttgactttctaaaatgttctctctatgtatatattcaccatttttaattattattattattannnntttttttttaaaaaaaaagtctttataaatttatcattttgtttgttgacatttaaatccggcttgtttgtagataggtaaacaacatttaattaattgctttattaattagattatatttttattatataaatacaatgtggaagacatgtttgatttattccccatttatctaattacctttactcttatttatttatttatctgtgtgcttgttactagaaaacacgtgaaacaagagtaattatataaaaataagtacaaatttagtggtaacatttctgttaaaaaaaataaataaaaaataaattctatcttctagtaaatgtaattgtttgaaaattttgtatattgttgtttagataatattgtagtacatatttgtgtggacataaaaattattactttatcactttgtcaaacagttatgacatgcgagagctgagtgactattaattatacataatgtatagtaataaattttagggaattatttcatatactatttttttaattttttttttaatttagggtttgggtttctaaagtggttgcagataggaatttctaagtagaattctgtaaaaatgcaaaaaaaaaatcgtcataaagtgtaaaaataaaaaagaccctaaattttattaattattttttttattaagaaaaaatatttgtatcaaggaaaattattttatatatatattttttaaattttcgatgtgtgttgctatctgaattttagttacgatttagattgttccgtttattcttatgtggattgctatataaatttttataaaaatacataaaatcaactacaataaaacataaaaatgaaaaaatcccttttattaatcatcaatagcttgagaggcagaagaacaaactccaattacaaattaattctcaaaaactaaatccatcgtgagtgaactttattctccagtgttttgtacatctatctttcatgatagtgtgttacaatgtcattaaatatgatattttttaacaaaacaaactaaaagtatgaatataaccttaaaaaatattaaaaaacacaattaatctttttaaattagaatcacacacaattttttctctctcttgacgtttggttggaagtaatgaaatggaaagaaaataatttttattccattattttgtttagttgcattttaaagtattggaatgacattcgaatggaatgttctttccactattttagtggaatgactattccattttaaaaaggaaggagagatcatttcaatgtaacaaaagaaaaaatttaatgatttttttatcaattttttatgcatttnaaattttattccattcctattcttatattttcattcttcccaaccaaacgacacctaaattcattcgatgtcctgcgatttccttaattgatctctttttatctctctcatgaaattccattggattgttatctttctctctcatactatgattatgatttctctccttttcttgcgatatagatttcttcaaccactgtaaacttcggcaagtccgatcctctacctccgacaacctttacttggggatgaattttggacttgaaatcatcaaaattgcaatataaatgttagacatgacttgaaagatctttgaaatagatttaaaaatcaagttgaattgcgtaaatcagataaatattgagggagaaatgactgttttactgaacactgttcagctctgggcgctcaggttgacacacggcgcctaggttgacatactgactttaatatggacgttgtgtgagtgaaaaacgttccaggcttgtattttttgatgcctaagtgatatgttgacattacttagtcaattttttagttttggtgaagttgttcactagttctcggagatgtcacttttctgtaaaattggatagacttgaaactttcaatttgcagctaatttactgatattctactttgccaaaaaggtgaaatatcaaagtgtgaatttgaattgtcacaagttttaactctcgttgactatgataaagtagtcaaatgctcgagacggactcagaatcagataaacagaaccgagcacaccaagctatatgtcaacctgggcgctaagtgctctttggggaacttcccggggctcatttcaatacttctaaggcatttgagattgtgaatgaggtctcctatcctgtttttgaccaaaataagaagaatatccaaagcaaaattaacgtttgaggagcaaaaacatgtgaaccaagttgtacgtcaatcgggcgcagtgcccagcacccatgtcaacatgggcactggggccctattttggctctccaagaatctcgttttctccctaagattacttgtattactatgaatatgtacatatactaacttaatagaattaatatagttattaagttcaatctaataagaatgggattatgttagcatgttattatacgaaaatttagagggttaacaaatattttaaataatgaattattgtttaaaataatttgagataaatatttattttatcttaaatttttagttagacaacataatttacatatgtatatatttatattttataattttgtgataattattatgttcaaacaattttctttcatcgtacgtagagtttatgtttattaattattaccactaattccaagttgagatttaaatatttatgattatatattccaatatgaaataagggaaattttacttgaaataaaaataccttaaaacaccaagcactaccttaataaaattatataacatttattaatgtataattcacaattagctcattcattttttattaatgggtaatttaataattaataagtagcataattgtaatggagtaaaagtcaaaattgaaagagactaaaatgataaacgatagaaacgtgccaaaataggaaagcaaggaatcatcatgtattccaaattcacctttggttttacccaatggagagaattatttcgtagtaaccaaacaaatgttattatctatataatataactaccaaacaaattaaaaaaaataaataaaattcgattttaaaggaacggtcctaaatctccaattttagttgcaagttgtttacgtagtaaatattattttggaatctgtgttttgtaaaaattgtatactataaaataaacttatattttttaaaatggtaaaaatatgatccgagctcaatttttaacaattttatttttttttaatataactaactttaagacaatttctaccacgaatagatacaaaaaaaatataactaattttatcacaatatctctaaattagattattattaagttttatttttacaaaaaatcagtttagagtcttatttgtacaattttaaaaaataaaggatctattttatcatttaataaaatagagggtctacttggtaattttcacaaaacacagagtccaaaatagtatttacccttctttgtaccttagcaaaaaaaaaaatctcaaagcttgtagagaataaaaataaacatcaatattgtgaaaagtattattaaagaagaaggaaaaaaaagctagagcatatgcaatgacattggtcttaattttcttagtctttgcattaatattaatatattattaatttgtattatcggttctaattatatagtttgaagggggattatgacttggataaatacaaatattaattcattaattaatttttttcttctcttgtgttttgatcatatatattttgttgggaactctaatggatagatgattggataacaagtatataaatattgtgattgggtgattggggttggggtccttggggatagtggggtcaatggagttttgtattttagctgagcaatgattagtgggtattgaaccaaatagaaatttaggggaatgcatgtggttgttttcatatattatataacactttccatcatatgtgcctttattttgttttctttatcactttgccttggactcactcaccctcctcctttgtgaaatgtggccaagtttcatccacattgccctatgattctctctctctctctctcnnnnnnnnnnnnnntctctctatatatatatattattattatt

SEQ ID NO: 113488 - DNA, 2711 bp, Cannabis sativa
agaggtaaaaatgatagactttaaaaaagagggtaaaaataatagaggacaatatagaaaaggtatagagtgtaatttcctcttattaattttcgtttctctctcttgtttgtttgttgttttttttttaataaaatcaactttattaaacaatctggaaaataacaagagactctagctcagcaatgagtcaacttattagtaaaaaaatttaaattgtttataaaaagaattgaaaagtaaattatttagatcttttctatgtatttcagtagatatttttatacataaagtgtggctatttaacagtttttgttagtttaacggaatattttaaaaatataaaaatattatgttaaatttaatggtattagtataattagttttataaatatataaatattattattatttattttaaattaatttaatatatatttattaatattatttgttttaatttaattatattaattttaaaataatttaattatataaaaatattaatatattatttataacattattatttttttattgttattttaatattaggagtatgttaattctaatattctttaactttatatttatttttcttaaatttttaaaactttaaatatttaaaaaaataaataaaaaattaatttgtttcccctagtttataaaattttaaaaatacataataaaaataaaaactaaaaaataaaactaagtataagaaacaataatctagtatacataaatataaatatacatatataatggtgggagtgtatcgttcgttgttataacatatttttctcttcctattcttttttgtgatatcagttctcaaaattaacttatcgttaagtaaatatatatattttgaggtgaagggtaacaatattgtaccaaaacacacttgctctagttttaaacctcgaacttgttacaagattatacatgtgacaaaattatactaataattaattaaatttcattaatttgtgtagatgcaaatttacaaattaaagtgatatttataatttggcaagttcaaatacgtgttctaaaataatttataataaattttaaaattttgtgtagatatataacagaaagtggaaactgaaattattaaaaaaaaaaaccaataacaaaaatgatcaatacaaagactccattttgttttgtattagatgcaaagtaactacctctagtttgtactattagatatatattggctttttgtttatttaaaaaatattttttaaagtgtttggatatcattaaaaaataaattatgagtaaagtaaaaattatgtaaatttttttaattttaaaaataatttttcaaaaaaaaaattagaatagttttttacaaacacactttgacagatttttattaattctagaagttaagtcaaaccggtaattataacactttgagttagcttgactagtttcaccggtaacatttgcatctttacttaatgagatggtaattttaacactttaagttaccttgactagtttcactttcaccggtaacatttaagtgactattagctaaaattaggtaagttttaccgaactagtagctattagctaacaattcccaacaagaaagttactatagatttctagctataagtttttcaagttgtttgtctttttttatttttctttaatggaacaaatgtttttattcaagttgtttgtttcatgagagaaaatatatacaccacactacttttttgttgtagtaagagtatgagatggagtgttcaattcgactaaggatattatcttccctaaccaaataaagatgggtgtgttcttctttctattttactcttactttgcttttatttgaattttcatacttttgagatttgaaggttataattaaactaatcctcataaatcttttcttaatatataaacacaggcacacacgtatgataatgatgaatttttcacatgttaaactctcttttttcctcttcctttctaaaaagaaaaaagtggctaaaatgattagttccatcataatctcaatgtcttgaccattattcaaacacacacaaacaaaaaagaaagagaaaatcagagaaaagtctaaagaaacaagaatataaattatacaagtaacagaaagctataaagggtgtagttatatataaatatatatattgttaatttattggatggatgagcaaaattggtcatttgtaaggccattaatggagttgaatgaagagctgaaatgtgtgattgagagagcatgggctatacatggtaagctcaacagtgaaatcgaacagagtattaagctctgtaaggtttgttcagagcatggtcgcttatgcgatgtagcagatcagatcccagttgaggaaagggagagcttgattggcataagagattcattgaagcaagttgagaacacccttttgtttcaacacgtaagtaccattcattcacaaaagattcctttttaatatatatctattctatataaagtttgtctatataattgaattattgtgtttatgagaaatttatgaataatatttttttaaaataattttttattcaaaaatagtatattttttttttattacaatgtattttaatattaatttttaaataaattaatattacttttaaattttaatcgggtttatgagaaatttatgggtaattttttttttaaaataatt

SEQ ID NO: 113489 - DNA, 4032 bp, Cannabis sativa
caaagagagtaaaaaaagaaaaaaatcaagaaaagaaaatatgggtgaaaaagaacaattgttttgctagctttactagtgaatatgataggtttgctttttcatacttttggtattttgatagtagttgttcaagacatatgacaggtgacaggtctattcttacaaatattaaactaatgcattgtggatctgttacttttgggaatggaattgaaggtaatgttcttcgaatgggtaatcttaactgtgaagggttacctaaaattaaaagagtcttacttgtggaaggacttaatcctaacttgcttagtattattcaaatctatgatcaaggttatgatgttcactttgataaaaaataggtgttttttcttgaacaagaatggtgagaatattcttgaaggttttagatcaaataccaattgctatacacttttaccttcacttatgtgttaatctgatgtgcgtaataatactgatgtgcgacattttgaacttgctcagttaaatgtcaaaactttgaaaaaattatctcatgcaaagattgttcatggtttacctaagttaggtaaagagtctgatggtaagtttgttggtaagaatgatgagggtgtttctcttggttgcttcattgacaatagggcatattgtgtttataacataagaacccaaaatttaatgaagtccggtaatgttgttattgatgatgctaaggattgttataaattatctattgaggtagaaatttataggtttatcgatgatccaactgaaattcacaaaggagttgctgtcagtgatgatattgatgcaacctctgttccatctgttccaacagagcacaaatttactgaaacaggttctggacagacaaaagagaaacttccagatattatgtaaaagccttctgtgatcttgtttgttgcaccttgacgtggcaattgaattggatgacacgtgtcccatatttctgatatctgggtggaggagaatatccctagaagctaataaatgagtaatcaacattcataatagtcaggtatttgagcaagattgtggagaatgtctgaccaggtacgagcatgtttatgccaagtgacatacaagagttcagaggctagtctcgattgtccagatgcaaagacaatctctataattgtgggattgagttagaggaaaatggcaacctgttctagtttcctatttcatgcattgtaattatagaatcattgtaatttcctattttgtgcattataagcaaaagggaaaccatccctcatgcatttagtctctataaatagtgacctagactcactatgaaagggatcgagagaattactgcagaaatatactcagagatcaattgtaagagctttcaaggggaagaacactttgttccttctcttaagttaatacaatacaaggggagtaggccattaccatacttacagggtcgaacctctttaaaatctggtgttcactttaccttactatttttgctttcttttaattacattacttaatcgctttattatttgactcactgtcgttggctagaagcgaggtcaacattctggtgctttcattgggagtaaaaatacaagtcttttatcttaagttttgataggtaaacaggatggttgtacaaacttgtagaggagacctcactgatgagggcgacccaatggtgatagatcccaaagtgcaaactcctggaaacacaagcggaccaccagggacaaaccccaagcaggttactacacaacctcttactgtaggccatggagtgacttcccctttggctgggatcacaccaggcttacaagaaactggaaacaccgatgcagcagttgatcattacactcccatcattgaggttccatccacaactaatactcacagaccagttagggacgacaccaaactccagaatctgcgagaggcactaaggctcatgcaaggtcataataacactttaaatcatgatcaggaagacctctgagcagccataaatcttgcattcaacaaataaaggcgtcaatttatagaaaggaggaatcgggagatggagattatgaaggctcaacaggcagccattgatgatagtactaggcaggccgctgtactaataagaagggcctaccaagtcactaatcaacaagtggctactgcatccactattcccttaggcaggtcagaagggtatgtagttgggcataccgcataaactcacagcaatcagccgtccaatcgaaggccacatgtccaaactgtgggccagacggtagacggctagatcctgccagaccgtcctttgggaggagttatacatactaacagcttcaccactactcaagtttcaggctaacctattggccaaacaattcaaacaccaaggccacctgatacctcagtgtttgataggttgggtttcgcacatgacctctggacaaccctaaatcacagaaggggcctagacgaacgatacattccaccgattgtccaatcaggtatccgcacctaagatccatttttaagagatcccaatgtaacataggccgctcaacaggccgaacaagttcatccacttgtgcaagcacaaatcgatcaacttaaaaatatagtacaaggcttgactggcccaaaactcactgatctcaaactcgaccgggcatgaggatcatctttcacccctaaaattgaagttcttgagctaccccctaagttcaaaatgccaacctggaagatgtatacaggaaaagaagatcctttaccacacttaaagtattttgagatgcaaatggacttgcaggggtatgaggtgatgtacggtgcaaaatttttcctgccacactcatagaggccgctcaacaatggtatttcaaactgcctccaggaaggtttaactcatggaatgccttctcatcaaagttccacacacagttttcctcctctcgtcaacttccctcgcaccttgtagacctggtcgaagtacaacaaatgccaggggaacccctcagaacttatatcaccatgttcatgaccgaggctacaaaagttaaggggctgactgaagaagggagattggttgcaatactaggggcattgaacctcttggagagttgtggaaggatataaaaacgctaactgtatgatcaatggctgaattcctagattgggcaaatgggttcattaagctcaaagaagctattcggtgtatggatactgtcggacaaaagaaaaaccaaccacgtgccacttcaggagggatatccgtccagaatccacagtatcctagcagttcaaattcaaatgggaagaggtctaacaaaaacaacaggtagggtgatggaaagaaaggtaaattcagttgcaatgccgaccaacatcctagggaaaatacctctaaatttagtgccttctcactcctaacagacgacatagagacaatctatgcaagaactcagtccatggtgtcttataaaaaaccttctcccaggaaaaaggatgtaagtaagagagacacatccaatttttttcgctttaatgtgggccgcccaagcagacaacaatcaaaaccaattgattcctccactagtggacggtcatttacaggttattattgggggttcacatcttgttggagactcaggcaaagctcgagaaaagtatgcccgagccttgcagtatgaaaaaaatgaggcgatctttgctgtggaagagaggaaacctaaaataccacgtgtagggagcccaccataacatttagtgaagtagacgccagccacgtcatcttcccacataacgactccctggttgtagaggtacaaattgcaaacaaaatggtggcacagactatgatagataatggagcttcctcaaacattcttttcaagacaacttatgagaagatgagactccaactgaaagacttgatcccgtgcacccagctcatatatggtttctctggctagagcattacacctctaggacaaatttgcctacccctcactattggacaagctctga

SEQ ID NO: 113490 - DNA, 6918 bp, Cannabis sativa
  modified_base (57)..(57): a, c, t, g, unknown or other
ttaaatagctataaataatttccataattaatcataaacaactgctaatttccaaantaactaagcgggctttacaccatcatttcgtaagtttatttaaaaaatgttggaggaggcttcattatccaccatgcacctagaaatttaatgttccttatttatgcagttataaccagagggtcattgtgagagaacctaacctggttagcatctccatctgtaaaggagatggtaggctctccaagcatgagttgcttagagtctctttcttcgatggctaggatgtcgcttttggactcatgacgaagagtttgagcatagcgctccctacccttacttttttccactggtggtggcatcagttctccattctaggaagcttgtgtcttagcttggttattctacacgtaacggtgcaagtggggattgtttttccttatcaagaacttaatctcccttttcaaaagtagacactcttttgtgtcatggtcgaagtcattcagaaattggcagaacgtgtacatgtccctcttactgatgtccttcttgataggaggaggcttcttgtatgggacaattgcttaagtggccatgtagatggtctcaggggtctcagttaggagggtcaagtaagtgtacttattctcctttcctttttgcttttatggtgtggggaaagtattgttcggcccttttttcccaccgttcttgccagaattgtcgttgttacgcttgcctccattatttttgatggtggaggcctggccgacattgcctgtactggtttgtaagttagacaggtctttgggtgtcatggcacctagagtctgcctgctattgacttgccctcctatatggtcttatcagataggttcctctagttttatgaagttgtcaacttattcaaagaactccttcatattgttggttgagatcctcctaatatctttcctgaattcactgaatggaacgatgccccccagtatggtcgtataacgaccttcttttgttaggccttagaccttagtggcctcagccataaacctttgaatgtaatccttcaaaggttcaccttgtctttgttttaccttgagaaggtcatctagttgtgattgtatctacctcgaggatgagaattgtgtttataagtctcgagagaattcattctaggaattgaacctccctagggccaacatgaaataccattgctgggctatctcagataaagttgccaggaagatatggcattgcacatccccaataaccttttagagatatatttccaactcaaagtactttatgtgctaggggatcttctctcctagtgtacatctttcattctagcatcttgaacttaaacaggggtaaggaattaatatatgtagagaatggagatcccctcaacctatctagttcagggtctgatggttttgggccagctacaccttttatcatatctctaattttatccaactgtgcttacacaaatggatctattatggtggacacttgttcgagtggcctttcttagccagtctgaagcccttgggcagccagaccttggtcagccataccctatcttagggtctatccatggacggccaacccatgactaggcaattggccttggctggccatccctagactaggtaactggccatggccggccagccccaaactgggtagtgtctggatgactgttcccctttgattgcccaaagcgacagcgtgttgataggaggttgatcctaccaatttctcgcatttgttggatccacctgtttgaagttattgttcagtggtggaacaaagtaacttcaattctcactcctcgagttgacattatctattgtgttttccacttatcttagggcatagtctaacaaagataggccttagaatgacttggtctcgaatatttttgggaggaaaatcatacttttaaacagagaaaggctggccgattggtgctgttaccgagccaagaatgcctggtcctcctctaacaccacttggtgccaaggattgcctattcctgccataagattggtttcgcagaaattttccatcttggggcaagggaaagtttgttctcattcccaagggacttggtttggctcttttcctgttttctacttggttgtagactctgcctgatctatcaatgagccttacttgtaaaggatatcttattagatcttggcctatccccatagttctttcattcaactgccttatcaggtcaccacattcctagttacgacagtttagctctgcctcatgggcccagaggatggcctcccagtcatccatccaccttaggaattcatatctctgtttggtgaaagcatcgcaaccaatagcgcgtggttcttttgattggtcgacctggtctacgacttctctaaacctagccagttcgatgtcctctcccaggtccacatgagactcaccaatagttggctctctaattcttgggcatgcttcgcccacataatattaaggaatagtccttcttttactccataaaggttgctccgtgttaacacatccttctattcgaggtgctaccgattgatatgttctgggtggtaaaggctattcactaggattagccaggttagcaggggcaattggattagatgtattggctaagtttcttgggcttgccaagttggcaggatttgctgcatcagtcaagttcatggaaactccagtggtggtgggaacacgcacattacgatcaatcgtcatggggtcttagggaagacctaaggaagtaaaagttttagttgttcttgttacaaccatgatgattcattaggttgataaataatgctctcaatgaaagaaccaaaatattgatctcagatttggtcaactaacaacagagctttatttatgttagacaatcaccacgtgttattgatgtagccgaataatgaaataggcacagtgatttatagaggttcaacccctgtgattgccaggtaatgacctactctcctttttcttgtattgattcaacagataataccacaccaattacaagcttttaccttgtaatttctagcgtggctctctgagaaaattacaatagtgggaacaatgtaaggcagatctcgaacaagtgagaaaaggagacagactttttgtcaatgctaaaggtacacgagtgagacagagagagagagagagagagctagggtttcgagattagaacttaggattttcatcttggcctaatgcactttctatagtttagagcttacaaaagatctacatttaaaatggactaatatctctcaaaaaggggagacatcatctgttatcatgtatttaaatatacaaaaatatagctgattaaatgctcccaaaaaataggtagatatttggggttaaattcctatttttgtgggttaatgaagtgtctttctagctggaaacgagctacgatccgtccagagtgaaaactgcagaaacaccaatcgaatgggcttctttttggtagtcattatgggttatggctagcctaccctttagggctagccgacacatgacatctattagtcggccagcggtgatccggccagacgcttcttgttggcaattttcctgtaaattcgttctgtttgagcatttggacccttggtcaattgataagttgtgcatggtgacttagctcattatggacaggttgtacaccacatggaatcaatcctgcctatgtagacatgctacgtcatgtggaaaaaaaattgggataaaaattttagttttacatttactaatagttttaattataaaattataaaacttcgtattatatttggattttgttatcattgtactgtatatataatttataaataaatattttattattattatcatcaaattatcagattgttatattcatgtttacatcgtgccttcaggtttattattttgtatcgtgattaatcccatatgtttcatctcatatatcattttaattgtagcattgtatcgtgtgcacaaatcccttttcttttatactaactcatgtattataaactcttgttataacacacatatatatatatttcttattttgttgctatgtcaaagagtatgaactttgtgcatgtcatagttttgttgtcgtgccaaataacatgactcatatttattgtttttgttatagcatgcacatatattacttttttaatttattttctttaaaaaagtaatttatagtatcaaaaacaagttcaaaatatttaactgtatatgcatccctatattttttttatacgtatacaataaattatttaaatgaatagatatcacaaattattagaatggattagatttttattatgactctaatatagacaatcatataaaaagattagagttttaatttctcttaatgccaaaaaatagacggccttacaaaaaaaaaaagacactctaactatatagttcttcctattcaatttctatatttgtaaaatatctaattgctcatctgctcaaataatatgttgaaacacaaaagtatatatataaagaaaaaagaattagtgagagttaatttggcgttgatataaacttaaattagactagctaaaaaataatagaacatgaggatataagtgttggataataagagaattttagagagaatatttaaatgaaataagttatattttaaatcccaatttgtataatttttgacttggtacaaactagtgggattatatctctatttataggactttatggactaatcgagaaatattactacatgactagcttctacatttttctacataattcccactactaacataagtgaaatataattctatcaaaattcaagagtactcaaataaataagaaaactctagacactttattagatataagaatagtctagaaattttagtaacatcaagaaaattttagaaattaactatattaaatcaagtataatattttaacacccctttaaacttaatttgtgactcgaataatactttgtagtttgattaatatttctctcttgagtggctttgtaaaaatattgttgcttcatcttgagatatgacatattctactcttacttcttttctactaatgcattctcttatgtaatgatagtgagtgtggatgtgtttatttctttcgtgaaagactggattccttgctagtacaattactaatttgctatcaacacaaatctcatttggctcctcttgtggcacgttcaaattcttcagcaactttcttagccaaatagcatgacaaacgcatgaagttgaagcaacgtattcggcttcacaagttagtgtaacgattagttgcttttttgacatccaagtatatgttgtgtttcccatgaagaacacaaatccagtggtgctctttctatattgtccaagtctgcactccaatcgctatcactatatccaactatctcataatagttagaggatgaacaaaatagcccataaatggtcttatctttgatgtaccgaagtaatttctttgtagttttcaaatgagttgttgttagagcttctataaagcaactaacgattacaatagcatagagaatatctggccttgtacaagttaggtagcgcaaacttccaagtacacttttgaaaagagttggatccaccattccttattcttcatgctttgacaatttttttctacattctactggtgtgctaactggattagaatcatctatcttgaacttcttaagtactttcttagcatagccttcttgagtgatgaaaatgtcttcatgttcttgctttacctcaataccgaggtaataagacatgagcccaatatctatcatctcaaactcttttgccatatctttctttaatttcttaatcatacttgagttacttccagtgaagatcaagttatccatatacaatcatacaatcaagataccttcattattaatttttatatagagtgcatgcttctatggacacttggtgaaattcttgtcttgaaagcactcgtcaattcgagtagtccaagctcttggtgattgttttatgccatataaagccttttttgacttcaaaacttttcttttatgcccttttacatcatagcccaatggttgcttgatgtagagttcttcctcaaggaaaccatttaagaaaataaactttacattcatttggtggatctttcatctatttttactgctaaagaaattattagtctaacagtttcaagacaaccaactgagtaaataccttattatagttgatgccttccgtttcactatagccttttgcaaccaaacttgctttatatctcttcaccttgccttttgcattcttcttttccttgtacacccactttactccaattagtttgtatccttattgaagagtaactagctcccatgtgtcatttttggtaattgaattgacttcttcatccatcacatctctccatctcttatttcttactgcttcttggtagcttagaggttcataatcaccaaatagacacataagagaaatgtcattttgattctcaattatctaataaggttctttaagttcttcttccatccttagtttctctactacatcttcctcttcaatgtatggaagaaaatcatgctcatcttcttctgtgttccaatcccaagaatcttcttcatcaaactttacgtcgcgattgatgatagttttgctagtaattaggttgtacaacttgtagcctttggatcttgagtcatagccgatgaagatgtacttctcacttttgtcatcaagctttgttctcttctgatcgggaacatgaacataagcaatacttttaaagactctgaggtgagaaattccaagttttcttccactccatgcttcttgaggtgtcttctca

SEQ ID NO: 113491 - DNA, 4967 bp, Cannabis sativa
aaaatgtaaacggaacagtactttggagggtttttccaccaaaatatgaggttggatggttttttgcaagtaaattgatagttgagggggttttgccgcaaattactctaaaacaaataaaaagtaaaagagggtgagggagtaactgtactttcaacttttgggccaagacaagagatttttgtttgtacacaatatacaatgaaagagaaaaaagaaaagaagccaaatatgcctaaacctttataatgaataatacagatgcttctttaccttataataatattggattcattgaattcatgtaacacctacatagtatcaactttgccttgttcaatagtatttgaaagagtaataatttggagacgcatattttttaaataatataattttagtcatagtctaaattctggaaaataatgagagataagtatttttaatttttacatttacaaaaaaacaagttaattcagaaacccataactttttgcattaaaaaaatattagtaaataaataaataaaaaaggcaagctggtaaaggataaaaaataaaccccgcaaataatggaagaggagtgtggagagccattggatgttgcagatgagagagagaagagcatggagaatcccaatgcttacagacagagcagagcttgtactgtacagtctctcttatgagttaaactgacctcaaacctcaagcccttcttcctcccttacctcatttaccccttattccccaatctgaactctcaacttcactctcatcatactgagtagaacccaaatcccatttgctcccaaaagccccataataactgtgatctgaagcacaagaggagagattccattcgattattagatcaaaacccagatcacagaatcttggatttagagagagaaagcgtatgatagaggacccatcaacccaaatgtccgaggatgacgatcgatctccaccgttggatcccggatgcccggagagcatgacggagtcctcgaccaagacccggaactgttctgggatatctgggtctgggtccgggtcgacttcggtggagatacaggcgccatacccggaccaggtactggagaacgttctggaaaacgtcttgtgtttccttacgtctcggcgggaccggagtgccgcctcattggtatgcaagtcgtggtaccgggcggaggcacttacccgatcggagctctacatcggaaactgctatgctgtctcgccacgacgcgccactgctcggttcactaagattcggtccgtggcgatcaagggaaaacctaggttcgccgactttaatctcatgccgcgcgattggggggcctacttctcgccctgggtcgcgttcatggccaaagcttacccctggctggagaaggtttatctcaagcgcatgaccatcactgaccaggatctcgcttaccttgctaagtccttccccggattcaaggagctcgttctcgtgtgctgcgagggttttgggacttgtggcctcggcgtggtcgccagttcttgcaggtacgtcatgtcattctggatcatatatttctctgtgaattttattttaataatatatattgttgcagagagcttttaattgaaatttcatgctacttttgtccatgtgagatgcttgtataatgttcatggtaatgtgtattagacttttattagttcattggtaaagagtttaacgctttttttgtgggtttttcttgatctggtgaatgtgcaagaagaaagtttagatctgttttgattttattattggtggagttctttgatagcttctgtgatctgtgcctttttacaaccctaaaacagtatctttttagttcagcactttagcttgaatatatctatctcaatgggatggtctaaaatggatggattgtgaaattacaatggagaaccaaatgacgagctgaatgtgacaagctgatacatatatttttgcagacaactgagagtgcttgatctgattgaatgtgagcttaacgacgatgaagaagattttatagattgttttccagagagccatacctgtctcgaatctctgattttcgactgtgtagattgcatggtaaattttgaggcgttggaggctctggtggttaggtctccacaattgaagaaacttaggctgaaccagtctctttctattgggcaactataccgcataatgatccgagctccacaactcacacatctagggacggggtcatttggcacatctgatggcatgatgcagggtgaacaggaaccagactatgtctctgcttttgcggcttgcaaatccttagtttgtctttcaggtttcagggaaatcatgccagagttcttacctgcaatctacccagtctgtgctaatctcacttctctgaatttcagctatgcaaatatcaatgccgagcaactaaaaccagttataagccgctgcatcaagcttcaaactttatgggtatgtgccagaagctctgtgatgttttagtgacattgtgaaaagatttggcttttaagaaactaacgtttcctcaatgcaggttcttgatacaatatgtgatgaagggctacaggcagttgccgcagcttgtaaagaacttcgagaactaagggttttcccttttgatgctaatgaggatattgagggacctgtttctgaggttggtttgcaagcaatttctgaaggttgtaggaaactgcaatctattttgtacttctgtcagcgcatgactaatgcagctgtggtggccatgtcaaagaactgtcctgatctgcttgtatttcgtctctgtataatgggaagactccgaccagatcatgtgacaggtcaaccaatggatgaagggtttggagctattgttatgaactgtaagaagctgactcgacttgctgtatctggattactgactgatcgagctttcagttatattggagaatatgggaaattagttcgaaccctctctgttgcttttgcgggggatagtgataatgggctgaaatatgtgctagagggctgtcctaaactgcaaaagcttgagatcagagatagcccatttggagatgcagcactgcgctctggcttgcatcattattacaacatgagatttctctggatgtcttcatgtaggctaacccgtcagggttgtagagagattgctcaagaaatgcctcggctggtagttgaagttatgagagatgaactaatgactgctgtcagcgatgatgaaccaggtgataatgttcaaattttatacatgtatcgatctcttgaaggaccaagggatgatactcctgagtttgttgatatcctctaagagtttggctacaagaagttggttcaagtttccctatggtgaattgcgaagaaattagggaacttttcctgtggtaaaggtcaaatgctgcaggtgacttttgtataagcctgctgcaagtggttcctgcaattacaaaaaatgagctaacaatttctgttcctgaacaggatttttgcagtgacattcacggggtaagtaaagtagcatggcatcgaaaagagcactttagaaatatcactttttcctcaatgtttttgttctcttcctgatgactcagagaaggggcaaatgttgagggtgtatggtattattggatcatccactgttgtattgtaagcttcttaatttttcacctttctattttgctttcatattcatttgatcataagcaacggctgctagaagagaagggagggtggttgttaccaccagcttagaaggttgataaagctgcaacaatttccgcagatcttgttgttcatcattaagttaagaaatggagagattgatcttggagtggaggtcgagaatggtctttagtcatagagttctcttctgcaccacaggtagagaagtgaaagctggtgtcaactctttaaaggaacatagttcgtctattttgattcaaatgatagtttaagttgtagccggtgagaactaaatgcgcagactgattaatcttcgtttctctctaagtgtttgttcttttcagatgtgttgttttggcacctgacttttaaatttattattattattattattgttagaacaatgtgatatgggtaataaatgccaaaatatgcatggaccatatattcccatatacttagtgggacattctctctctccctgatcaaaactgatagtgaggttcattaatgaagtattgtaagtgttcgaagaaagtacacacacctcacaggaacactcttaaacgtgtgagtttccaatctccctaacgcatgagaaattcttgccgcattctctctcgtatcatctcttatcagttgtgaacacgcgcagtgtactggattttagggttttgtttttttttttttaaacttggatgatgaacgctactactactattattattttctatttatctaaagctggactgtattattgagtgatctgattctgatttgtatttatatgtgtgtacttatgtattttcggagtaggtggggccttttcgtttggatgatttgtcacacccctgtgattgcgttttgaatcagccaagcccactggtctctctctcattattagtagagaaaaatccacatcacttgtttgttggtattcgatatggcaatggcaatgttaagggtgggggtgggggtggggcggtaagatcaaacgtatcatcaaagcgggatatgactttcttttgagtcagtgatgggattgggaggcaaggaaagcctttggctttactttctttttttgctcttatggagataatttctaagtaaagaagtaactcaacatcttgatgaccattggaaatttccctccttttcctaaccctcccgtctttatactctcatgcagtggcggaaccagacaaagaaccgaggaggggccaaataggaaggtcaagcgaattttatttttacttatttttttt

SEQ ID NO: 113492 - DNA, 5887 bp, Cannabis sativa
  modified_base (4673)..(4673): a, c, t, g, unknown or other
tttttttttattaaaagaaatttgctcacataagcaactctttcaattaattaccatgttaatgttataatgctccacattagtgtagtttgattgaatagggtcccaccaaataaagcattacttcaaatataaatgcctaggatgtgtcacagtaccatttatatccatttataatttttgttagcaagaaagtatactcctttttacaccaaatattcaatttatgctaagtgtcagttttctgaatgctcgttttttttattgtaaaaggaatcgaactttatatgcatatttatatatatttacatatatagtgtcgctactttagtggagttcagtaggttaaaaagaaaaagagagagtacataatcaatctagtacataatctttaattttgaatgctttattatcagattttgtgtagtttttatctatatatttgaagggtatatactatcagtgtgtataatattctcatagcattagaagccaaaggaggttggctgggcaatcaaaatttatatatttacaaattaacaattttcttttagcaatgtctatataagatgttctccactaattctttaatttccaaaagttctgtcagtgtaaatatatatatttataaagttaaattaaattctaactagtatcatcaaaatttaaaaattcttctaaaaggacaagtcaaaatacaagctaaaataatagtttatgtgcgaaaagagccatttgtcatcgaggcatgcaagattggtgaataaaaaaaattagtcattatcttgaaaagaatgttaaagaatcacacattcataatatctagaaattaaatatcatatataaaatgaatgaactactcctcttattgtgaattaattttaaaataaacttttatgcatcttacaattctcacatatatatatatatatatatatatattcaatttgagtaaggtatcactttctctcaataattaggagttcaatcaattaatcactatttaaaagaacaattctattactctagtgtagtgatacaatttttggggggtttttataaatattagattttaaggtaagttttacatttatatagtcacatgacaaactttacaaaaatactgtcctggccttttttttttttttctttttatattgtacacatcgtaaatcacatatgacacctccatcttctacacccacggacagaaccaccacagcaacataagaatacttaaaaaacaatcattaattccggcaagatagaacaaaaacaataaaatcgacgtcaaataaacacccaaaaacttcatcaagatcagaattcaatgaataaaaaaggctagacacttaaacccacataattcttttaaataaaaaattaaaaataattgcccaaacatagatcttgaattcaataataaaaataatttgtatcttctgaaattgtatttatatacgtgcgtgattgaagtaaatgcagattaatatacatcattctcgagaaaaaaaagtcgattagtaaattgcgttgaattttaaaatttctaacgttgttctagagtcattcttgattaattacctacattatattagaaattagggatatagataaaaattaggcacccaaatgatagctggaccaccgaaacaaaaagaataaacgtcgatggttttcttactgttgttttactattgttgtctctgtgttaaaatattgaattgttgaaatactatcaaaatattgcagattatggaatctataccagttctcttgaatagcaatgggcgataagaaaaaggaaaaaattatgtcaattatgaggctagtggagaattgataccaaaagattgcaagtatgaacagcaggttcaaattctactctcttcactggcgtgcgaccccacaattacaaccctgcaaatttagtaccaagtaaaagatggaaaccaccgattaaaatattcaatgatccgagccttttcttttacttgcaactgaagatcaaagaaactgattttaccatatgtccattatgcgtcaacacaaagaacaacaacacaacaatcgttgcaataccaatgttcatatcaaaaacaacacaagatcaacaaaatgtgggaatgcttgagaacaacgcgccaataacctaatcatatacattggaagaaggagaaactaaaacatttgaaggtaacaaaaaccaattcgacatagttgactatgaaaatctcattgatgaagaaatgatagaaaaactggaaaataacaataaaaaaatagattcagaggttgacatcaacaacacaaagttcataacagataaattccaccctgaaattgaaaaaggacatgcatacaaagataaaaaaacactcaagagggtactgagctactatgcaatcaaaaataacttccaattcatggtatggagctcgtgctctcaagaatacggtctgaagtgtgtttttgaaagctgtaattggtctctacaagcatcaataaatgggccaacaaatactttcataatcaagagtttctaaaaaatccatacctgcctaataaatgttagatatgaagactaaaggcaagcaacaacaaaattcataggcgaatgcatcaaacccatgtttctgaacataaagacaataaaaaacaccactagatataaaaggagaattgaaacacaggtacagaatcaagatgaactacatgaaagcttagagaagtagagtgcatgctacaaatgacctaggaggaaatgctaaggaatcatacagcctgatactaagtttcttgcacatggtgcaaaaaagcaaccctagatcaattgtggatttgaaaatagtagaagataacattgtgctgtttgtttttattgctttggaagcttcgataaaaatgtggaaaacatgcaggccaacaatagtggtcgacggtacattcctgaaagcaacttacagaggaacattgttgtcttcatgcacacaagatgcattaggtcacatatttctacttatattctatgttgtcaattccgaaaatgattgggaatggtttttcaaaaattaaaaagaagcatatggtgtgagagaaaaatagtgtctaatttcatatagaaacgagagcgtgatcaaagtagcaagagaaatattcacaaaaatcacacgcgcatacagtggatatcacctagtaaacaaccttaaaaaaactttaaaacacatgctgctaagtacaacctaccattctttggagcagtgaaagcatacacaaaaagacaatttgagtaccacatgacagaactagatggcttggacaaacgcataagaccgtacttgaaaaaagtcggttatgagaaatggtcaaggattcatagtaaaaattagagatattccaccatgacctcaaacatagtagaatcactaaacttggaaaatttaatagtaagggagcttccaattacaacactaatggaatgcttgagagcattagtgcaacaatggacatatagtaataggacaaaagcacaaaacacatttactacattggcaccacctagagaacagatgatactggaaagctaaacatactcattgaacctggaggtgagatctagattatgcagtttaaattgttaaaccaaaatcatttgggggctattaaggtttttctagcatttttgtaggggtgtcccactattgttctctatgtataataaatgttggtttcaaataacacaggtaaaatcaaccactcattatttgtttcaggtaatcataatgaaaaaattatggacaatagacctcaaagagcgaacatgcacgtgcaacagtttctaaatcgataaaatgccatgtggacatgttgtggctgtgttgaaggagataaacatggacccatacaagtattgttcagattactacacaaagaaaaattggctagcaatttatgaaggaacaatgtacccaataggaaaccaaagtgagtgggatgtaccacaaaatgtgaaaaacgtaatagtcttccctctagttgaaaaggtgaaatctagaagacaagaaaaaagaaggatggaagctggctgggaatagaaacaacataacaagagcagcaaatgtgagaagctagggcacaacaagagaacatgcagtagaagacatcaaaaataaagagaacaaaaacaacttaagaacaacagtggaaaaattgaacatacatttaggcataagatactaaagaaagaattttcatacaagttttattatttttctattactattataagggatgtcaatgtaacaccctactagattagatgtgttattgtgattcaaatactaaatgtgcaattcgttgctaatcaacagatttattaaaaattgtgtttaattaaaattttcataattaacctttaactttaattaaataaactttacattattcgaaattttgtcttttaaaagttacaactgtactataaaatatttatttacagaagctgtcgtttagagactaacaaaatatagcctgctgccttgaagatcgaatactccaggtctaactgccctgatatttacaatcttcattagctcgaactcactattgttcagccttagccttgcccttacctacacatgtaaacaataacagtgagtcgacagactcagtangaaaagtataatcataacataacataaaccagattataactaggcgcccatacacccaaatataacaatatcccgcatcccatacttactgagtctagaacgttcgtacgacaatactattaaccataatatcagcatatactcgatactctattcgtaccgatgtgatagcgtcaatcagtactcatgccaaacatacattcgttggtatccagtgtagctctatgtgcactgatatcgctatatcaatatgttatctaataggcattcataaacatgcacgctaaatatataatcataaatgcatataattatactaatcttacattgattctaaatttaagtgtgccggtcaacttgagtgaaaactgctgcttgacgatttataggcccctaagtcacaacattcataaaaattgataagtgatatgccaaatcactttttgggaacttaaaatcaaaactagaagtattcctatcaatggatagcgtgacaataccctaaatatcgtcaaaacacaaaaaactagggttccaatactgttagtaggtaaactggattgccaaaatggaaaactggttcttagggttctgcctggggaaacggttaactagttttacagggctacctaaatcaattaactggttccttgtttaaaaccctaaaattaacaccatgaactcaaatttatcccaaatccaaccaaactctccagaccacctaattaaacaatatcaaacatacttcaagcaacaaaataagtataaacctctgaatccaaatctgccattaaagaacaaagtttgaggttaaaagctcaaactttgatctttctccaaattaacaacaaaaccagctcagaatcaacttaaataatcataaaaaatcatcaaaaaaaacaccttaaaaaaagccaccttgtacaaaaataaatcctatgtgaccatgcaagctacagttttctgttgcctgtggactcggtggatgccctgaccctatgcacacatgggcgtctaaagaccatacaaacgattttttttgaccaagtttggctttgttttgttttcttttcttgttttcttgagtttaaatttttgttttcatcaaaacaaatcctatgtggccatgcaagccacggttttctgtttcctgtggactcggtgttgggttttatgccctaaataaaactctgtttcaatgtaatccagattat

SEQ ID NO: 113493 - DNA, 3652 bp, Cannabis sativa
  modified_base (43)..(44): a, c, t, g, unknown or other
aattgattaagtgaacccaaacatacacaagtgaatgaaaaannacttctgttactttattgatattgaataatctagattacattgaaacagagttttatttagggcataaaacccaacagtaggaactaccggagatgctagaatttgaagatgaacatggaatgaatactcatgtgggggtgcactatgaatggaagccaaccatttgtaaacattgtgatggtattggtcacttgatagaggagtgtaagaagataatgaaggcaaaacaagaatgggtgattaagatagataaaaggcttgaggttcccaagattaagatggatgagcatggctttcaagctgtcacgaaggggaaaagagttcaagatcagaaggtggctgctataacaaaaatagataatatattcagcattcttgctgaaagcaatagtgatcaagtggaggatcaacaagacttattggacacaatcattgacaatagaagagaggggggaggaccctctcttagaaatggataagtttctttgctggaatgtctgaggagcagataacattcagaaacagaggtcaattacgcaattttttcaggcttagaatgttggtttggtggggctcctagagataagggtcaaggttcacaagatgggaaccttgtacctcaatgtgtttgatggttggtgtttctcaacaaatattacttggcatcagggtgggagaattgtaattgcatggaatctggtgaggtacaaggtcgatatcattagatgcacaagtcaattgatgcatctaaaggtttctactttggacaacacctattgtagctttgttactataatatatgcctttaatgacaaaaatggaagacaaagattatggaaagatctgagggagttggccactaaagctaattggcttttgatgggagacttcaatgaaatattggccaaagaagagagattggggcagaaagttaaatactaccctgacacagactttgctgactgtgtgaactattgccagattgaagatatcaaggcctcgagaaatttcttcacttggtcaaataagtaacaggggaatgacagaatttcttccaaaatagacaggagcatggctaatcaagaatggttagatcactatcagaatgctgaggcaaacttcctaaataaggatctgtttgacccctcttctggcatactctctctgtatcctaggtggacaagtaggaaaaagcctgttagatattttagaatgtggaagagctatgctgattatgaacaaaaaatatctaaagtttggaggaagaagattgctggaacaaagatgtaccaggtggttactaagctaaaggccataaaacttgtctttaaggaaattaaccaggttggtgtttctaatattcacacagtagtaatacaagctaaaaatgagttagagagagctcagactgagctgcaatagtgtcctcttaatgataatttaattgttgaggagttgtaggccagaactaaactgattcaagtgtagaaagattatgcatctttactgcaacaaaaggctaaagcttactggatacagaatggagacaataacacatctctattttatgcaagcataaagcaaagaataaggcaaaataaggtttcttcgattgagcagcaaattggcactagagtaactgaatgaagtcaggttttagaggcatttgttgagtattacaaggagcttttaggcactcaaatggaagacaggaagagagtaaagcataaaattattgcaagagggcctgtagtgaattctcagcaagctgaaatgttgactcaaaagttcaggaaagaagaagtgaagcaagctctatttgatatacctagcaacaaggcacctggttttcatggcttctcaagtgtctatgatcaagacaattgggatttggttggagaggacctatatgaggttgtgacatcattcctagaaataggttaactgctcaaggaaataaatggtactgttctgacattagtgcccaaattacagtgtcctaatactgttaatgattttagacaaatagcttgttgcaatgttctttacgaaatttcaaccaagcttttatgctctagaatcaaaaacattcttcctaatttagtctctcaaaaccaaggggactttattaggggaaggtttacaggacataacattatgatttgtctggacataattaggcattatgagaggaatagcaataagcctagttgcattatcaagttggatttgcaaaaagcctatgacactatagaatgggatttcattgaagaaatgttctagggtttgtatttccccccaagtttcattaacattgtgatgacccgtgttagaacaccaaggttttcactaatgtttgatggaactttgcatggctttgttgagtctaagagaggacttagataaggagaaccaatgtctcccttattatttgtgttaggtatggaatacttatcacgaataatggggaaagttggggaaaaacttgacttttattttcatcacagatgtgcagaattaaagcttaaccaccttgcttttgctgatgacgtattattgttttgcaatggtgattttagaagtgttctctacttattacaggggcttaagttgttttcaatgacattaggattgtatccaaatgccacaaaatcagaaatatactcaagcaacatgcctgaagataacttaaggaaacagctgtaaattttgggttttacaaacctgtctctgccctttacttacctaggagttccaattggtgcaaagaagattttagggaaagattgtgaagtattggcagagaaaatgacaggtagaattaagatatggagttcaaggaacctttcatttgcttgaagggtggtgctaataaattctgtgttgatggccatacatggctattggtgtcaagtaatgattttaccaaagaaagtggtgaatgctattgatgcaatatgcaggaattatttgtggaatgggaaagcagtatatcaaaggcatggtgctatctcatgggaatccatttgtcaacctaaatcagctagtgaaatcaattttaagaatgtggctgcatggaataaagctattatgggaaaatatgtgtgggcgattgcaaacaaagaagatacattatggctgaaatgaattaatagtgtattcctacatgatgtagaatggtgggcctactaacctttaagtcaaagtagctggtactagaagtgtttggttaggctcgtaaaccagttcaaggaggcaatgggaggaacaatgttgtagcaaaaatactcagtttcatagagatatagtttgctaaaacaagcaagaacaaacatacactggtgtaaacaggtgtggagcaggttgaactcatccaaacacgactttgtgttgtggttagcaatgcaccagaaattgaaaaccagagacaggttattcaatatgggaataatagaggatcaaacctgtttgttgtgttgtgataactaggaaactacagagcactttttctttgcgtgttgttaggctatttctagcctatattttggatcacttttatgttcgcttttcgatgttttaggacaaaattacgcttgttttctatgtt

SEQ ID NO: 113494 - DNA, 1225 bp, Cannabis sativa
ggccggcccatagtatttttgtaattttttttccttttttatctttttgtgttttttttcctaaactaaattggataacaaattaaagatgaccatcaataagaatattttaatccattaattgatttgatttacaaatcaaatattatcaattaattgattttatgtttataattttgtatgtatatatatagaaataatttaacgcaaatcacaaataaatttgatatatattaatgtgataaataatttcaactaattatttttattttaaaattagtcgtaattattaaaaataacttaatatatatgtatgtaatttaagtgtgcacatatcattattctatattttattatgaaaagggaaaaaattgaaagcctcattagtcattcataagtaaataaaactacaaacaaaattgaatattttaattttaacatattattattagtgtaattaatcaatatcacattctacaatatccataataaaattatatcaaattctacatatttttattacccattattaaactgtattaataaaagtagtgttggcaccattaattggatgcccacgatagatattaatgttcaactaaactattagcttcaagttatattgaatgcaaagagaacaaaatgaatgcgattcatgcataattaacaatgtaatcaatgtaattatgtttttttttttcttttgagcaagtaatcgatgtaattgtttgtttaaattaaatgagagtatatatatgcctgtttttgcttgttttgtaatcttagatatgacacttaaatgtgcgtagaggtaaaacagtaacataacacaagtacagaatattgaagaaaatttcgatgaccagtataataaataaaggggagcactatattagatgcatgcacatgcattcaaattttaatcattataaactttaaataccaatattagttaaattctgaaattcttcactagtgtgaagaaacaaaaattgacatgctcattttcttccacaatttccaaatgagaataagaactgcacaattcaggaccgttagatgcaatatattaaagtttctttcttttattatattaactaataagttgcaaacatggttttttaaagtatgtcatcatacattcactatacaatttaattacttctttttttttttttttttgaaaatggagaaagagaccacttgtcttagactggcctccccc

SEQ ID NO: 113495 - DNA, 7734 bp, Cannabis sativa
  modified_base (7103)..(7110): a, c, t, g, unknown or other
  modified_base (7630)..(7645): a, c, t, g, unknown or other
gccgaatctgaccgtcgcggctcgcggtaacggtcactcgatcaacggtcaggcgatggccgatcgtggaatcgtactcgatatgcgttctctcgccaccggctctatccacgtcggctcggcttacgccgacgtttcgggaggggcattatgggaagaagttttgaaacggtgtttggagtttggtttggctccaaggtcttggaccgattatctaagtttaacggtcggtgggacgttatctaacggtggagttagtggtcaagcttttcgttacggaccgcaaacgtcaaacgtaacggaattggaagtcgttaatggtaaaggcgagactctaatttgctccgaatccgaaaacccggatctatttttcgggtcattgggtgggttgggtcagttcgggattattactcgggctaggattttgctacagccagctcctgatatggtacttaactaaactaactaatttctttaattaaatctaattaatgcaagaaaattacgtttaattattaattaattatgattattttaggtgagatggataagattagtgtatactgagttcgaagatttcactcgtgacgctgagtttcttgtgactcggtcggaaaacgattcgtttgattacgtggaaggtttcgttttctcaaacaatgataacccattaacgggtcgacccacggttccattacacccgacccaagaatttgacccgaatcttcttccacggtgtaccggatcggttctctactgtcttgaattagctcttcactacaacaacactgaccacccttcaacggttgatacggtaactaattctatctctctctatattcctgtacattcgtgccagaaattgtaatttgcaccctaacttggtagccgttggattcggcgacccgggatttgacctagacgattacgaaattttgacagtaaagaagtgggtcccactgcacggtgaaaaagtcaaaatcaaacttgaacttaataacacgtgtttaaacctcgttgatggaggacccgactaatactttgcttaattattattattatttgaaacatgaaactgactattttttttaattattattttaaataataataataattaaatttgaaactgactatacggtataatgtatcttcgattggattttctgacaagtacggctatttaaaagcccaaaatatagttcttaattacgaaagtggcactgtacttcgctcccattgttcccgtaaggtcactttcgtaattttaattcgagagaagggtaaaatggtaattataccggcacaatagctggatcattgtgattttgctgacgcaatggtccccgcaagttcctacaaattggctgaaaaagccatcattttctggaatctgtaattgtgattgaattgactaaaatagccttggttgcaggctgtgactcgacagctagcgaggctgggattcgtggaacggttggagttccaggtggacctcagctacatggaattcttgttacgtgtgaagcgtgcggaggaagacgctaaggcgaacggtatgtgggacgcgccacacccgtggttgaacttgttcgtgtcgaaatctgacgtggcagaatttgatcgcgtggtgttcaaaaacttattgaaggaaggcgttggtgggcccatgttgatctaccctttacttcgcagcaagtaagttttaataattaattattaattatgtttactgtttttgttttatttaatttgtgaaaattaagaatttgattagttgaatattaaatacatgggacttagtgattaaggataataataaaagtagaagaatgattcgatatgaataaaatgcaataaagttataatcactgttttacacagtgattttatataaattttctttaacttaattacatttctcatagtaattagcaaataaaaattgctattaatattagtagcattcactacaactataatgtggtgttttgtgaataagtaaggggttttataatagttattaaattgataaataacgatataaatattcaaagttttgagtttataagtgaaataagtatttaatatttataaaactttaatttttcttcagtttcatcagtaagactccattttaaatttatgaaaagaagatctgaaagtaactgatgttacatgttttcgtacaaatcttgtaatttggaatctggttcttatatgtataatgtttaagataattaccgagtgtttactgataaaattgaagagaaattacatttttcacaaacattctatattagcgctaaagaaaatattgagtttataatgtttacaaactcaaacatttaaatatttatatcactaattactcttattaaatactttcaaaaaaaattactcttattaaattaaaatatataaaaataatattctatacttaattaatctaatataaacttttttaactttgagaaatattaaaaaaacacttgtataatactctttcatatattatataactataatatattttagtatggagtatgatataatttaatactatgcttaactaattgtactgggccaaatatgaatgctgtattaacttttgtcatgccaaataattatagtgccacatctgatatgagtgagcaataatactaagagcctataaaatcgacacgtgttaagcatgtggggcaggggtccacaggtacattgagtcactcactcacctgactttcactatctgaatcctggttgttaagatcctcctcatattaggtcaaatattttctactttgagtgggacccaccttagttagagtaaaaaaataaataaaagttgtaccatattattttggaccctaccgtagtggaccaaactcactagaaaattgccaaagcttattagtttagtacaagaagtagttaaattatgctagatttttgtttagtaatttgtctagtaattatgtttaattaaaatattatatcatcattagtaaaattaatttaaaattaaattttaaatcaattcgagttcatttacacttttttattgtatagtattatataaaaaaatattgttataaggtaccagtagtgcccaacaattaattagtaatatttttaaaaaattattttcttaaattatatgaaattcgatattaatagtgttttttaataaatctttgcgtaccaaattagtcttaattacttttataataggtgattggaggctaatattaagctcactataatagctaattgtgcaatgttattttatgggacaaagatacagtggggcccgcaggtgtgattaaataaaatatataaatttactaattaagaaaggtttaaggaaaagggtaaattggtcaattcagtagctgtcctctactccggatgatgtgagattatgccggttatgttatgggtgttagagttgaatgagctggtgaggggtattttcgtcatttggacttgggaataaaacgacaagagtatttattcgccaacgggattatagtgacattatattttgtcttggcttccataccaaatcactcttctctattgtcctattattaatttttatttttatttttttacaaaaatatatatatttatatgaagatgtgaaaataaataaaataaaataatactaaaccaaaaaaagaattggaaaaatcaaatcatagaatactaagaaaaaagaagagctttgatcagaatggtgacatgtcatcttatccttttttcttgcattgtttaataaggacttgtaaagaaatgagaaccttatcttttcattttctaataataattaatatgatttttttttaattattgtttagatgggataatcggacatctaccgtgttaccggatggtgaaatattttacttggtggcgttattacgatttagccctgcgtacccaaaaggtccttcagttgataaattaattgatcagaataaagacattgttaattattgctttgcaaaaggttttgatttcaagttgtatttacctcattatcgaacggagaaagagtggaaaagacattttggaaatcagtggtcgagatttgttcagaggaaacttaatttcgacccgaaggcgatccttgctcccggtcagaaaattttttcaaggaggattaataatattcctcaatagtcttattatttttgttattaattagtcttgatcatgatcaattatggttctttattaattaattatgtgtaatagtgtactattaatttaatgtaacatggtaaatgtaatcaagtgttggtgggtcaaaatgttatatcgatcaattgacaataagaagaaaaatcatgttataaaaaagaaagaaaaaaaataattgttggacttaaagcaaaaaatatagatctcgattccacaatattgaagtaactcaactcacaatattgaaataactcaatttataaatattgccattcttgttagaacaaatcaaatatgaaataattatgtaatccgaacttattatttattattttgaaagtgaatatcacaaagaattattaaagaacagtgcttttgaaaagtaaatgttaattatttgtgtgaatgaaaaacaaggtttatatatttttatattgaggtatattttctatgagacttaaaaaatatataaataattataatttaaatgttatttttgaataagttaggtataatgtgtttttaataatgttcatttagtactttgtattttaaattgaaaactgtctaaaattttatggtttttaatttaaataaaattatttaattacgtataattgagatttgtttgattatattaataaaattatattttaaaaaactaaatatatacaatttaaaaatataaaataccgattaaatattattaaaaacacataatagtgccaaatataatttttatgaaaactgagaatatttcttacaatgttttatgattaatctctaagtaattaggtcacaattgtcctagctagatatccatgatgttctagatgggaatttttcattggttgaaatataatccttataatcatgcttatattcacacattatatatattgatatatttatgtatatttatatatagtactatagctatatatacggcttagtgctcattatccaatacatcctcttttgcttttgatttacatatatggacctttttctttttcccttttttacaaacttaaattataaataaaagaaaaaatagattaatttagagccgtccaaatccaaagactctctaaactaaaaaagcatatgtacattgatatgtctaatccaaaaaaacctttattatattaacaatcttaacttatttattgtaattgacctttaattatttgatgtttcagttcaagattatatatatacataacatgactctactttcaacttgataatatagtcacttctatatttatataaatcaatctctttttcaaacataaaaagttgagaaaaaaaagtaatcaattatatataagctcaaaattagacttgcatggaagagagttaggtatcagattctatatctctttacatatatacatttatatattagggtaagcctatatttaagatgtgtttctgtttcggtatttagataaatttttttatgcttcgaatattttgttagatgtgtgattaattttgtttatacacatggtaaataattatttgaattttatttttagtattgtaaattattcgaaaattttaaacaaatttataaggctaattaggaattttgtcccctaaactttgacatgtactaaattatgcctcctgaacttttaaggtcgttaaaaatacctcctggactattgagattgttagatttaaggacttttgtcaaattttagtaaaaaaaagtctaatatggatgaaagttcaaagggcataatttagtatatttcaaagttcgagaggtatgattttggtatatatcaaagtttggaaagcatggtttagtacataaacaatcacagctgaaatagtaaaattgaatcaaattagaaaaaaaatctttaaatccaataatcttaatagttcatgagtttttttaacgaccttaaaatttcaagggacatgatttagaatatgtcaaaattcaatgggtaaaaatcataattaaccaatttataaataatcttaaataattataacgaacacaattaaacaaaaaaaaaatcccgaataccaaaacaaacggagatctaccatattaccccgtaaaattaaaagggtatatttaagaaattttctatatttatatatttaaaattttatataatcaatatgtgaagaaaaagaaaagtaagtctatctttctattctatctttttctttctttctttctttctcttttttcttttttccactttgattttgatatgattttcacctcgggtttcgtttgatttttgttttggttcctaaagccaaacaaaagactaaatcaaatctacttgggttcttcataaatatttatattatatctatatatattattcttcttcttttttatatacatattttttttaatctaatcttataaaaagaagtgaaaagtttttaaaagggggtccccaattattcaactagagttaatttattaaggaataaggcaattataagatcatgatttcttgtaagttgcaccaagaagactcaatagatagtttattttttattttattttttatttttgtttttttattcccatgcagaataataatcacactttatatacgttaataattttgataaatgtgtcatgcatgaacgtctttttaaccccttaattacttctttttattatcatatcttcttatactttttttttttttttttttatgaaaaagtaaaaatctctttagctttttaattagttaacctttaatatatcatattctatctcccatgcatgcacacactacttgttatcttattatattcatacaatttattacactacaaaatcgtttacatttagtcacaacaaaattatgaataaaactaaaaaagttgtgactaattataannnnnnnntcctatgttgtgactaaaaaatttgtggctaaaaatattagtcacaaaaattacaatttactgtgactaaatgtatttttagtcacaatatattaaaactaaattgtagctaaatactatattttaatcagaagtaactttttgttgtgactaaaaatcacatttgatcataaaaaaattatgttttgattaaaaaattatcactaagaataactattttttgtagtgttaaagttgatactatttttgatttaaaagttataaatcaattttgttccatgccatattaaatcttatattttctcaaaatcgtactataaatttaatttttaatattttttttaatataactaatttaattggaacaatttctaacatgaataaatgcaaaataaataatcattcttgtcattatattttttttattattatggttaaagtatgtgttagttctattggttggcacgtgccatgacatgtgttcatgtgttcaaagttactataaatatatatatatatnnnnnnnnnnnnnnnntgtctatctaacggcaattcttggtttaacggattctttttttttatttagccttacacgattaacttaacagactattaacgttaaac

SEQ ID NO: 113496 - DNA, 4417 bp, Cannabis sativa
  modified_base (1483)..(1486): a, c, t, g, unknown or other
ttaatactatggatttaatatattaatatttttatataactttttacaacaaattattagatttctatgtaatttaattaaatatttttatgtattactaaatacagttgtaagtttctgcccaataattatattctctattttattattctaattattaattgaatacttcatactaaacatttcaacagtttctcaagtaaattataaggaaaataccatgtaataaaaatggataaaccaatatatatattttaattaatgacctaatatccacatgttgtccttttaaacactatatatgtactacatataatagattagattattttttaactgtttctttttccttttgaataagaaaccactaattaaatatgtggtcatctctctcaaaataattataaaaaaactatacatggtcaaaccacactatttgatttgtatatacgtaacaaaattttgataaaaaaaaattaattggcaaatttatatatacatgtatatatatgtacatatatagtgtgtggctagctatagttacttcttgctgaaaaacaagtcatgaattttatataattagtcttaatcaataacttataaattttaaaaaataaaataaaatacagaaacatgatgttatattataagttcaatttaattaattcgattaaagtctcagaaagcaaaatcttatattaattagttttattattttagcctgaacacaataaaacaaagtttgacccttaattttatgaagaatcttttatttttaatttatgtatctatcatatatacaatataatatatatatatgactatttgaagaggtgagcttctagaagatgtttaagtataaaaccctaagatacacaggaagagtacgtccaagtcaatttgctcaccaactcctaaatcacaatcaatctcttatatataagaatagttgtagttaatcttcccacattataaaaaaaaatatttaatttaactattaatcttctattataattttttagttgatttttattttaaaaatatatggtggaatatttattgttataattgtattcgttagttataacatatccttgtaagtttttaaatattttacagtgtcgaaaataaatttaaaatttttcaaatacgcattataaattgaaatattagaaattctatttttggtattgtaaactatttaaaattttttaaaaatttaaatgacaatattgtaactataacgaatatcactataaaaaaaatatatcgatatgtgatttcaaacgtaaaaactgacttagagattgtaatttgcaattctcttaattttatcgtaaaacaattaatgcgatggatagtagttgatcaatcaataaacttgaatatattataatatgatggaatgatcacatcactacataaaaaaaaaattacttgataattttttagtcataacatatattttttgtgactaaatgtnnnntttagtcacaataaaaagttatttgtactaaaatatagtatttagaattaaattgtcgctaatttaattttagttatagcaaatattgtgactaaaaatacatttagttacaataaattgtaatttttgtgattaatacatctacctatacggatcttttagtcacaatataaaaaaatgacgattcataattagtcataatttttacttttagtcaaaaaatttattgcaactaaaaataaaaatttttgtagtgtgttactgtaaaagttatatttcaatatctattatttacaagccatctaagagtaaaaatattaattatttaatttaatattattattctattatattaattcttctaattaaaccatgaatatgtattatttcatgtgcttcttttaattaatttctccatctatttattcaatatgattgtttgtttatgactttattatttataaattaaaatttcgactggttagtttggcattccattagaccaattattttttctttaataataatcattgttttcccatatacattaactaccttgtcgtttactctcttattatttcttttttttaaaaaaaaaatatatatattaattattataaattaattaagctttttgaattgtatggcttagctttatgataagatatatagtttattctagtaaagtctataatggaactcttttttaatattgctttcctcttaagatattactagttattagttctagaatttttgtatatattataaatacacttttaattattgatttattaaaatcttcatcatgaaaagtactaggtagctaatcaaagttaagtgcatatactctcctttggcttttctaccctaatgtgaagattaatttagagactttaaatgtataattacattaattattttgattctctcatctaatgaaaaatagacatatattatagtgaatcagtccaattttatttgcggttgttaatggagcactatacttatatttatatatttatatatatgagttcatatatatatacaaatttctctttcattaataagtactttcacacacttaagcatccaaaagtatctttgttatattctttgagaatatataataaaaaatgtccaaattttcatagacttgtgcactagtacaaattttcaagtgactttcctcaattctctgccatatattagtattgatatatcttatcagttgatttttccatctatataatgagtacaatcttagagatgattaacactaggactcatacttataaagggtaaaagaatgaagttttaagggtatgaaccccgatgaaattaatatcctcgcatgatataaacttgtgagaaggctagcgatagacaaagtctaatcgcgtgttatgcattgcataacaataagataaaagcaggacaaagaaagaatcaagcacgtcgcgcgtgatatctataaaatatacatgattacggtactcatatgtgtttcatactttaatgagaatggttgaattgtttctgattcattaattttccaatgatttcttatttaatttgatgcatttattatgtaaaacggtctcgttttattattagaaatacggtgtacattttttatttttacagtacaaaataaataatctgaagagaaaagtaaggagatcaaaaaaattacggacctatatcttcagttatttcaaaataattgaaaacatgggtttccactatcctagcacgatattagatacacgtggaggcttatgtcttcgattaattcaaaataatagaagacacaagtctccactacctaacacgatattagatacacgtggaagcttatgttttcagttatttcaattattttgaaataaccaaaaatataggtgtataaaaccctaatgtcaaatctaaaactctcattttcttttcttttttttctctatgtttctctcaacgaaaaaatgccaccacattcatccttcaagctccatttctacaccatcattttccctcaatttttttttttaaacttttagttttctcacctaaaataaatgtacactataaaaattaatttattttaggatatgaaggtaaatgtaagagtttaggctgacaattttgtaggctttttggaaaacagcaatcggctataatgacaacgatcttgagggaatctgttatacccatatttcgaacaaataatatggttatgacacgggtatgaagaagctaaaaaataaaccagttcaaattatgaagaaattataaatatgttcaaataacttaccttgaaaaatatatttagtagaaatattcaaattcatcatttcaaagataagggtgagtcgtgaataacaactactattttgtaagaccatcgaggtgaacaatcaacgtaaacggtccatcttaggatacacagaatataatacaaaacaatagtcagttggaaagggtggataatgagttcttttagaacttataacttattaacacacatactcgtaagtatattgaaagactaagggatcgatatacacacattgtaattcatctcaaaattatcacattgtgatagtatcttgcgtttgcctctctcaacattagagaaggatgcgagaagtactacccaatattatacttagacgcaaaaagttatcttcaaagaaaagcatcctaagatgatcatttatgttgcgaggtgaagaagcgtagtcagcataccacttataggtaaatacaagaacagttatagcggtttacttacttttatctcatgtgttgtaaatatgaaacgtatggatcactactacaaaccaagcttttagaggcactttttttcagcaaatattaaagaaccgacgtcatagggttggaattttttggaagggattttgacaccaccta

SEQ ID NO: 113497 - DNA, 2628 bp, Cannabis sativa
  modified_base (99)..(109): a, c, t, g, unknown or other
  modified_base (888)..(899): a, c, t, g, unknown or other
  modified_base (1191)..(1194): a, c, t, g, unknown or other
actaaaagtaaaaaaaaattgtgaataattataaatcatcattcctatgttgtgattaaaaggttcatggctacaggtattagttacaaaaattacaannnnnnnnnnntaaatgtatttttagtcataatacgcattgtgattaaaactaaatttgtaactaaatattacgttttagtcacaaataatattttgttgtgactaaaaattacaattagttacaaaaaattatattataatataacaagttataactaacaataaccgttttttgtagtgtaaattaacagcaaaaattaaatagagtaataacctacgcgtcaccagtaacttttcttgagtgaatttacaacattgacgaaaaaagaacaaaattgtacataaaactgaataatatggagaaagtaaaaaattatgacatatttattcactttttaacgtgaagtggctataattaatagctttgcttattagatttataggtatcatgcaaattcaaaatggagtaatgtgagtccacccatacatatatacatgatataattatacaataatgaacactacactacacataatttaacaaaattcaacaagataaggtactatttctttttgtaaaaaaaaatatatttttagggttacagttttttttatatatatttttatgattttttataaaaacaacacgagaacaacaagaaaattatataaaaataacatgaaaataacatcaaaacaacagcaaaaaataacatactgataacaaaaaatcaacaataaattaacaagaatacaatataaaaagactatattttttgtaaataaaattaaaaaaaaatcgtaaaaatatttaaaattccgtgacattgtatttttgtaatttttttnnnnnnnnnnnngtatttgtgaaataatctcatttaacaatacacgtttttaaaaggaatacatcggtactcttatctgttttgatattcgaaataagagtttttagtaaaaaaaaaattatggtcatgtacgctatagttatttaagacatttaataaagttttaaaaaattcaaaaaaaaattaacacgtcaaaaatagggttcatatagtgtgttacatgcgctactattttattttatatgcatgtaaaataaattgtttaaacactgattttttttattgtaaattattctaaattttnnnnaattttgtaagatatcttaaataactaacgtaaaaaatataattagaaaattcttctaaatgctaaaatagataaaagattttgaaataaatacattgtaaaagcaccccataattaatcatgtaaaacaattgtgcatataatgtgatagtactccccgattgttgtacttgtacataatagaaagaaaaaataaataaataaataaacaagagggacatgcatgcattgaaatgttaaaaggaagtagttaggtggtatttggttagagataataaaataaaattagggatattaatataatctacaagcacaagtatatatggttattcgatccaaatagttagggaaataactgttcaaatggataaaaagtctaataataatttttgtttttggtaaattagtaatttagtaagataaaaagaacaattacaaccaatacaagagttcaagctattaactcaactccccaaattaattactatctatcttacttgtttttatctcttttttcaaaagagaaatcctaatactaatatttttcttgatgctttttataattttttatacggtataaatttgagagttccataatgaattatttttaaacttccaaataatagatgaaagcatttacaacctctatatacacctcacgtctgaaattagatcactctgatcagttttttttattctattttccaaaatacatcactaaaattttatttattctattttatctcaaatttttatattaaactatacatcaattcttctttaaaataaatcactaaaattctattttttttttcaaattttaatatattgtattcatttcaaatatataatatcaatatttacacatatcctcatataaaaagtaaaattaaaatctataacaattaatcaaatatatttagaacaatgaataatattctataaatgtagagcagaaatagtaaattttaaaaaaggtttaaaataaagaaagagtttaaagtatctgatgtaatatgtttttaatttaatttttctaaatattttattaattatttattttaaaatatctaatgtgagtgctctgtgaaaacacatcttgattcgtctcaaatatttctctaattcattccaagaattaggtaaacctacccaatcaaggatagatctagctatctcattgttgtacctataattaattcttttttctttcttttttttttttctttttttcttttttattagtgagtatttcttttcttcttttttttttttccaatgagtatttggtattgtgtgattctacacaatgcacccccttaaaatagatatattgatgcactttctacttgtttcggcatctagaaaaattttttagtctaattttttttatattcatgtacgttatagctatttatgatatcctacaaaatt

SEQ ID NO: 113498 - DNA, 3785 bp, Cannabis sativa
  modified_base (907)..(919): a, c, t, g, unknown or other
aacggttttaggaaccgttgggaaataatataaaagacagttataaactgttgggaatacccctttttgtagtagtgtgtattcttcacagggtttgttaaatttcgtgggtgtgttttctttgttgttttgggttaaaagtttgtagatttctgggtttgtaggtgtatgattaatctgtatattgattcaaattattaaaatttgtattttagttttttcatagcttatacccattttgatgtactattttttttaggtacaattaaatataagaaaacaaatacacaaaaaatttgttcctactatttaattgttaatatacacattattttgctttgttgttttaaatttaatattttttattaaaaatgaaaataaaaataaaataaatttgatatattatgcaatttttttttaaaaaaaaatatgatatagtgacactctgtggttttattggggaaattaattttttaaaaaataattaaaaataaatatagtgacacattgtgagtgtggctgttgtgtttagagtctcacaacttgagattctaaaagtctacagtgacacgctttgagagagtctgaaaggtttaagtaacgaagagtcactatatttttcaggacacccacattagtgacgtggagtgaagtgtcactaaagcattttggagtctcttaacaagtgtcattgtcgcccatttttgtagtagggtgcataatatattttgtgcatctttttattctagttttttatataatatatataatcagtgacagacccaaaaattttactttgagagggcttatttatcattaagaaaatatttatacttacattataatcactcttaatagatttatttaattttgtgaggattttttttactattttaatctataattnnnnnnnnnnnnnaattacatttaattttttaaaataaaatatttttgtttgtgtggatccgtcgctgtatataatatatatgtactctaatatttatttaatctttttattagttattatattatatcacatgcagatagagttgtaatatattataattttttttgtattatgataaaatcactaacaggaaacatcaaaatgaatgagagttgatgggtgggaaactaagttagaagaaagggagaattttcaaatgagaggggtgttttgtgaacacaatgaaacattacaataatttttgtcatgaaatttaatagtaggtcaattttgttcttagttgcataaaaactcaaattttctagctaatttatttaaaatgtatggtccccagttccacatgcaataataatgcaaaaatttaaaggtacatagcgaaatttaaatagaatggaccaaagtatgtatgtgcagaataggtacgtagcactagcccattttcaaaaatgttgtcaacctttacatagtgttagaaggtaatacatatgcatttatgtatatatgtatggttataaatggaaagtagagataaaggtgggtgtggtgcacataaatatgtacatatggaagtagtagctccacctgtagtagtagtgtatagtattgggcagaaaaacaaagatgagaacatataaaatagaagtagaggataaaacgagaggagccctttggaggagcgcagggcagatcatataggaccaaccaaagagaccatcccttttttttatggtaatttttttcagcttttaaaatgggaaacgacagaagaatgtgaatggtattcaaacataaaagaagaaacaaacagggttatttattgaaaataggggtaaaaaagaaagggagtctagcttcatgaccactgctttggatgccagaagtctgcgtgtttgtgactttacacgaaaaacaatgggatttatgtgctcgttctttaatatctatctttgctttttttggctttcgctttcatcattacatgcagtgtagtctaaatataaaaggcagtataatcttatttcttcaatgcaattttcttatcattatgttcgcactactttataattacaattttaattagttgccctctcatcttactaattattattatgttagggaaactctcatcttcattaataatatgggattttaacgatatataatagcattattatatgcaaattattgctcatcatataattgaaacccttaattccaaagtaatagagagattataataacatgtttgagtagcagttgctaatcgctctttcactcctttccttatgtcctaataagctggtataataacttataccctggttgtttttttttttatttctttttattttttatattctgtataattttatttttattttttatgtataaaaaaaatcataatttaccagagagactatactatatattaagctatatatgactccatctagagcataatttacttattttaaattaataaggaactattatgtactaatttattgttcttgttttcaagaatagaagaatgaatattatttcattaattagttctgtttttcatagtgtcaaatatgaaaattacaactgaagatgcacaattaagtactgaatccctcaataaaaataatgacgagaaaaagaaaattaaaaaaacgattaacaagatcattatagttcgtaatattcaacacttcatttctatctattttggacaatatttaaccctttattaattagtataaattgtagttcttacggaaattaaaaaaaaaatatatgcggaacagaaaattgataatcaaattagacgagaacacaaaacgtgccatataataatgactacccaaataacattgacaaaaattaccaaactcatccttattaattattactacaatcatcgtatatataataatatattcattgctaaataattttttcaaaagattctgtgacgtatcaaaataaaataataatataaatgaactgtagagggacattacatgttaatataaattaactcataatcaaactgtatacaaaacccagaataagaagaaatccagatatatttgaattgagaaaacatattcatattgatatacatagtaataataatatgaaattaataattcctttcatcacaaatacattcatagtgatctcacctatttgaaatggggtttgggccacttggaacttcatgtgcactggcactaaaagcacgtttctgccatgttggaaatggtcctgatcttcttcgttgatcaacggccatggtcgcctttgaaacaccttgccttgttgagaataagggttttgaatttccaatgccatattgtcttctcgtagcaaagtccttcacattgtttggtcttttctgcatgatctcgtcattgatgagtgggctactactactactaccactagcattgtttttgaaagccacaaccggatggaataaaataactaaaattactgaaaataaaatagaaatacaagatagagttgaagaagatgagattgtttgatcacttgccatatatatatgcatgaaaatatgtttataaagtaattacataagatgctaatttagatcaaaatcagtaatcaaagataaggcctatagctacggtttttgtgataaacaaatgaagataggtttgtctttgctatatttaatctcaagaatctaagaatgacaattgggatgagaattaaggagtgactggatttttattagatgtttatagcatgatagggtttataggcgtacctttaactaaagaagtatagagagagagagagagag

SEQ ID NO: 113499 - DNA, 6958 bp, Cannabis sativa
aagttatcagttatgaactctaaggtgactaagtttgtaaggttagtttactcaaatcttacatattatcagctaaatttcctcaaatattatattatattgggctgcattttagttttccactaaattttcattatacaaaactaaccattgtgattgtaaatttccttgtacagatttgtggagtataaatctgataggtctcaaagttctgagaataatttctccacaacaagagtatctgtaagagatgttttgggacaagttgggagaggtgtccaaaaggggtatgagaggattagaagccttggaaaaatcccaacttcccatcccattgttaagaagcaagaaaagaatccagaacttagaaagaacatttttaatcctcaaggacctttcgttcaaaaatggaacaagatatttgttctggcttgttttgtggctgtgtccttggaccctttattcttctacattgttggaattgatcataacaaacaatgcataactttggatgagcctttggaaatcattgcttgtgtccttcgaacatttatagatatcttttatgtactcagaattatctttcagtttcaaactgggtttatacccccttcttctcggggattcggaagaggcgagttagttaaagatcctctttccattgctaaaagatacttgaaaacctacttctttgttgatgttctctctattcttccactgcctcaggtctgcatatacattatacatacatacatacacatatgtttgtaatctattttcactattgatcacatgaaagaataatgttgtttcagcttgtagttcttgttgtcatcccaaatatggaaagtcctgttccaatgatcacaaaggagtcgttgaaattcatcgttatctgtcagttaattccaaggctggtgcgaattgtaccactgttcaaagaagtaacaaaaacttctggcatactaacagagacagcatcagctggagctatttttaacctttatctgtatatgcttgcaagccatgtaagttattggaccttgttttccatccctactaagcattaatattaaaaccatcctttgtcatattcttataactcaaatcaaatggtttcatggcagacattaggagctttgtggtacttgttctcccttgagagactagatacatgctggcgaaacgtgcttaagaaacacgattgggatactaaatatctctactgtagtcaaaatcgtgatcaagatttcaaatctgctaaagatctcttcaatgcttcttgccctttcatcgatcctgacaatgtttctaatacgtttaactttggaatattcactgacgctctcaagtctggtgtggttgaaagcacagatttctcttccaaatttttctactgtttttggtggggactgcgaaatcttaggttggtcattacttacactctaatttcaaatgaatccgctttgtttaagtagttgattgccataaaaactcattttacttgttctctttggcagttctctaggccaaaatctaaagacaagcacttttgttggagagataatctttgcagtttgcatatctatctttggattgattttattcgcattacttattggcaatatgcaggtaaccaaaagttcaatgagattgattggtaaaaaaaacacatacatggctagctttgatttgatttgctcttgttttttttctatagaaatttttgcagtcaacaactgtgagaattgaagaaatgagagttaaaaggcaagacgcggagcaatggatgtcccaccggatgctccccgagcctttgagggaacggattagaagatatgaacaatataaatggcaagaaacaaggggtgttgaagaagagactctggtcagaactcttcctaaagaccttaggagagacataaaaaaccacctttgcttggatcttcttaaaaaagtgagtcctttccttaaaaaagaaaagcagcattttccatgtcctttgtttttagctactcttctcactaaacttggttttgaactttgtaaaggtgccactgtttgagaaaatggatgagcaacttctggatgcgctatgtgatcgtttaaagccagttctgtacacagataagagttcaattgttcgggagggtgatccggttgatgaaatgctcttcatcatgagaggaaaccttgcaaccatgaccactaatggtggaaagactggatttttcaacactgctgatctcaaggctggtgatttctgtggagaagaacttctcacatgggctttggatcccacctctgcctccaatctccccacatcaaccaggacagtggaagccaaaacggaggtagaggcatttgctctcatggctgatgatttgaagtttgtcgcttctcagtttcgccgcctccacagcaaacaactccagcacactttcaggcaagacatttaaacaatgaatcttctataaagtgtccttagaccaggccaccaatattttttcttttctttttattattatggtgaaatcaagatactaatgtggtggtttttttgtctactattcagataccattcgttacaatggaaaacatggggggcttgttttatacaagcagcttggcgaaggcattgcaagagaaagcttgagaagtctttaagggaggcagaggataggctgcaagatgccctggtgaatgagattggaagcacaccaagccttggcgccaccatttatgcctccaggtttgctgcaaatttgatcagaggcttaagacgaagccgtgtacgcaactctagacccacacagagattgctgccattgctacctcagaaaccggctgagcctgatttcacttctgagcatcactagctacttagcaaatactactactggtgtctgtctctcattgtcttaaatgtgaaatttagctacttcggtattgtaaaatttctctctgtgcataatatgtataataggcctagatttctaatgtaagtagaaatgttactttgagatatatataccgggtaatttaattgtacaagtgtgcccctttgattctgatctttgagaataatgtctgctaccaaattcaagttttctagaaaattctgcctttgatgatagcaaaaataagaataagaaacatttcagtaactattcaacaaatcaaaaagtaattatatcacatttaagttatgaatatttaaaagaaaaatatattgtcaatcaaatataaggatgatgaaaccactattacagtagaataacgaccaagaacaaccatgaaacaatagtcagcagaagaatccatgcagtcgcacaactaatacatctcctgtcctacttatctagaatgaattaggaaatgttaaacaatgaatacaaacgatacagaattcaaacattaacacaaaggagcaattagcaccgttataacgcttgtgatgcctcaatcattattccataactaatagaaatataatggccactcgaagattatgaaaaaaaaaaaatagttggaaattctaaatcaatcataattcaacaagatatcttacaaaaccaaaaagaaattacaaaacaatcagtaatgaccaaaaaataaaaaaaaaaaaataacatattgcactaaagacaaattataattcatatgaaaccacaacagtcaaggattaagttagacagcagataattatgtattcacacaagcaaaatctatgcaatcacatcattactaataatactacttctatttgcacaataataataataataataataataataataataatacggggttggtttatttctagatttcaaattaattttttttatttatacagtaaaattggtataaattacaaatatacaaatatacggtactttactgtaaaagttctaatcactgtaacccaaaacaatatattggtgagtgtgttgcttgttgacatgtatttggtcccgttttcatgcattgtccaagaacgcaatttggtcaatgtaataaaatggtacacgtcggcagtcaaactgattcacctattcgctgtttttctttgatggatgtttgtcattatttttcatttatgaatgtgtggaagtttgtggctcttgaaggaattttatctcccttaggcttcttacgtcttagatcgcgaaaagtgttcttttgaaaaggtctgcacaaaacagacgttcaagttcaacactctcccaacaatataataataataataataattgcttttgattgcttgggttctccatgctcgtagaagaggtcaatgtcagtcttcggaattgcatttgaagagtaatagctgctcaaaccaagtgaactataaacatatgtataataaaaacccacccagagatgatttggagcaagttcagagaggtgtccaaaatggcaattttccatcccactgttaaaaagcaagagaggaacaaagagcctagaaagaacattcttgaccctcaagggtcattccttaaaaaatggaacaacatatttattctgtcctgtttagtggcagtgtccttggaccctttatttttctacgttgctggaatagatcataaggagaaatgcataactttggacgagtctttggaaatcattttttgtctccttcgaacaattatcgatatattttacgtactcaggattatctttcagttccaaactgggtttattgccccttcttctagagtattaggtgaattagttgatgatccttttgctattgctaaaagatacttgttaacctacttcattgtcgatattctctctgttcttccactgcctcaggtatgaatctgcttaattctaactcttcttcttcttcgttaatccattttactttcactaccttacacatgtatgaatgttgtttcatcagcttatagttcttgctttcatgaaacgctcaattttaactatggagatgttgaaaatcgtaattttatgtcagtatgttccgaggttcgtgcgaattgtgccactattcagagaagtaacaagtaattctggagtattaactgctactgcttcggctggagttgttattaacattttcctatacatatttgcaagtcatgtaagttatataaccgtttttgaattcttacaacactcaaaatgccatgaaatgaggacttctgaccaccaaccacacttgaatgttttgtactagttactaggagctttatggtacttattctcttttgagagactctatacatgctggcgaatcgtatttatgatccagaactgggatcctagatatatgtattgtactcaaaagtctggtgacaatcatgatcatgtaaaagccctcctgaacgtctcttgctcttccatcggttctgataaggatgtctttgactttggaatgtacactgatgctatcaagtctggtgtggttgaaagcacacattttcactccaaaattttatactgcttttggtggggactacggaatttcaggttggtcttatacaccttctctttatcatatgaataatgtactttgttttaagttgtttatttacctcaattaaaaactctttctttgttgtttgcttttggcagttctcttggccaaagtctcaagacgagcatatttattggagagatattttttgcagtcttcggattgatattcttctcattactcattggcaatatacaggtaaccaaaacaaaagcacatttggtcaaacaaatacattattaacttttagtttagtactgagttgagatatctaattcactcttgtttttctttacagaaatatttgcagtccacaactgtgagagtcgaaaaaatgagaatgaaaaggcaagaagtagagatttggatgtcccaccggatgattcaggagcccttgagggaacgtattagaaaatatgaacaatataaatggcaagaaacaagaggtgttgaagaagacactctgctccaaacccttcctaaagacctcaggagagacataaagcgccacctttgtttggaacttctgaggagagtgagtgctttccttagacatattatttcatcattttttctgatctggtttttgctactcttcccaccaacttagttttcaactttgaaaaggtgccaatgtttgagaaaatggatcaacaccttttggacacactatgtgatcgtttaaagtcagcactctacacaaataagagtttaattgttcaagagggtgatccagttgatgaaatgctcttcatcttgagaggaagccttgcaaccatgaccaagaatggtttcttcaacactgctgatctcaaggctggtgacttctgtggggaagagctcctcacatgggctttggatcccaactctgcctcaaaactccccacctcaacaaggacggtggaagctaaaacagaggtagaggcatttgttctcatggctgacgatttgaagttggttgcctcccagttttccaggctccataggaaacaactccagcacattttcaggcaaggcttttaaacgatgaatctccctttaatcctaataacatgcttgttactttagcaagagtttagagaaattaaattagtttagaacagactaaccagctaactatgagatacagctgtaataagctacttgtaacagaaaataaattgtcaactaactcttttatagaaagaaaatactaaaactgaaatagggtgatttttgccgttttggtatacttttcaggttctactcttctcaatggagaatatgggcggcttgttacatacaagcgttgtggcggagacattggaagagaaagtttgacgagtgtttaagacaaagcggtgtgtgcagctctagacccccgcagagattggctcctttgctaccttggaaaccagctcagcctgatttcacttctgagcattcctagctactctctgaatttta

SEQ ID NO: 113500 - DNA, 1356 bp, Cannabis sativa
ccagggccgccctgaaatgtagtgggctatagacaaaaaaaattatttttgggctcttatttagaaaaaaaaaatgatatttttcaaaatcagcacaaaaagttgtgtataaaaggagaatttttttttttggtccctaggcacaggtctagcctgcctatgcccaagtccaaccctggttattgctattcatttttagaatcccgagtagttagtgttgaatccacgtgacggatgcagattagtcagcatccgtcacgtgaattaagctactcagctccttaaattataacgttttatgatcatatatacatatgaaaatatatttattttttcttatatttgtatgtatatatacatttccttctggtatatgtttatttgatacttttaatatggaataattaaattaagagattgaataatgtaattattaatttttgaaaaaaaaaacagaaaaaagtgggggtcacataagaatacttgattggtttggtgttttcaaaaactaaatttgaatatgattttgagttttaaactaaaaaatgaaaacaacaattttatgttttctatgttttcaaatcattaaatttaaaaactcttcaaatactctcttactttttttattttaagatttccaactaattacaaattcaattttttaaaactcaaaaactttcaaaattacattacaaccaatcacatttttaaaataatttttacatacaaaatttaaatttgtgtttccaaaatactcttttagaaaacacaatttttaaatctcaaaccaatcgaaatatcttcgaaaaaaaaatgtgtatatactgaaaatttgatacatattgctttcattgtctatacttttataaatgtaaatatataattatgtgtacacgtacatacatacgcacgtaataccaaatctattagtatattgttgataaatgaattattaatattatttttattttgttttttaattttaattttttttaaaaaaataagtaagatgaactagcttgttttatatttaaaatatatttgaataatgttagacataatcattgtctaattattatgtacaatatattatttctatttaaagagattcgaggatggaaccataattgatctgtcttactatattatatattattatgcagtttagaataatatcacgttaatgtgacttttgacttttgaatataaataataaaaatataatcttataaattaagatgtcatttaataatacttttaattttttaattttttaatcaaaaaataaaagtaaattattgtttttaaaaattttagaaatgtgttatgtcgtaaccactttcattttttaatttt

SEQ ID NO: 113501 - DNA, 1730 bp, Cannabis sativa
  modified_base (1682)..(1685): a, c, t, g, unknown or other
tttactatagagagtactattaatatttaatttcagataaaattttataatcaaaatctatacacattaatacataatcgtataaaacaaaatattatttcacaatcaccatttcagctgaagtgaaagtaaagcttgggccttaaaatgctgagaattttttagggaataaaaaaaggagaagagattttagttgttcaaaactcacttagctcataaagagattatgaaattctataatacagttaggtaattggtagagagtttgggagagtatgatatgacatcaccaccaaatcaactttgtcattatgccattaatacatatcacactgccattggccagcttgtcaacttgagcaaatcctctgtcctatttttttcctaatacttctgctgacgcccaactccattttaggaattctcttggtctcaccaatgatggtttcatttagtaagtatttgggggtgcctcactttgttggtcgtgtatgaaattctgtttttcattatctcatccaaaatgtctcctctaaaatgaatgtttggaatgataaatttttttcccaaagctgataaggagactctcattaaagcggtcgtccaagcaatttcatcctttgccatgttctgctttaaaatccctaaagctacttctcaaaccattcaaagattgatctctagattttggtgggggtctgcttttggaaaaaaaataagatccattggaagaaatggtctgttgttacttcttccaagttttttggggcctgggtttcaaatctctcactactcacaaccaagcacttcttgccaagcaggcttggagaatttggaccaaccctaactccctccttcactcactcctaaaagctagatactttaagcactctgatttcttaaacgctcccaaaggtcataattcttccatcacctagagaagccttctttgaggtagagacctcctttgcaaaggccttgtttggaaaattagtgatgggaataatatccccctctctgcccataactggattcccaccattaaccgtccaacctttcttcaagatctcaaccctgaagagcatactgtatctttcttcctgcagccaaatcacacctagaattcagagaaattattcacttatcttccctcttatcgagccaatgatgtcctccaaattcccattgacccttgctcccaagactatctcatatggggacatcatccttggggtattcttactgtcaactctgcctaccattatgcccattctcttgctaatacggattacccctccacctcaaaccctagatctcttacaccttggtggaaactctttggaatcttcagatccctgcaaaaattaagcacttcacttggagagctttctaccatatcttgccatgttccctaaacctttaccagaaaaaatccattaacgatccttattgtaatttctataaaggaagggtggagacagtttctcatgccttactagaatgtcccagggcccattctgtgtggaaacattcctcttgcaaatcttcctgttatacccaaaattcggttggagaacacgtgtcaaaattaaaggaataagaatcagtgcaatatctttttatagaataactcattaaatacataagtatcagagtctatttgtgttgggttttatgccctnnnnaaaactctatttcaatgtaatccggattattcaatatcaataaag

SEQ ID NO: 113502 - DNA, 1628 bp, Cannabis sativa
aaacgagcctagatagtcacaagccacagttggcacacacatagtctccctcccattcctcacgtcacaattgatcttaatccaatccttcggggggagtaccatccagtctcagtaggaacaacaagagtagggaggatagataaggcataatctgcatacacaatgattaatagagccaatataatgttgtatgctagttaaattgttgttatgtaccttatcattgcaagctctccaaattatgtcaacaacaatgaatcaaaatgagtccccacggggacgatcgccaaagatgctaagacaaattacaatacagaaagagatgctccatggtttcatcctcacgctcgcaaatagggcaagtcgtatcttcaattgtcatctgttgcccaatgattttacaaataggaagcgcattagacaaaatcctccaccacaagactttatgaagtttaagaatttttctattccacaacctgttccaaagggaaggagcaacatcacaccgatgagtcttatccaacacttgaatcaagtaggcaaactttgtacaaaattggtcgtttgcttccttaatcccaacccaatggtcattaccatgaccacttaggcacccacttagacaccgtatatgcttcaaaaagatagcaaggttttttaatatcccaatgatccacaaccctagtaaattcctccataggcaccctctttggctttgggataaatgcttggccatggcttatctaagggtcctcccatatacgagtatcctttccatccttaatcactttacatgctcttttctcgaggatatgttttggtttgacaacatccttaattgggaattagatcccttgaaagagctattgaggaagtctttacccctcatgtattttgccctaagcatttcataacataacgattgatgattattcatcagattctaaccccacttgtctaggaaggcctaattcatctccaaggacttacaaaatcccaaaccctcacgagctttgggaagacacaaacattcccatccccttaaacaaaggcccttgttacttctatcactgtcctaccagaaattacaccaaaccatcaattttagtagccaattttttggagagtttggtgatctgcattgaatatatcaggagcgagagagccccatagatttaatcagggtagctcgacctgcttttgagagtgtcttcaccttccaaccctgtttcgtaataaggttatccaaaataaagttgaaatctgcatccttctgtctacctctgaaaagagggagacccaggtatgttatattgttcgtagggcactcaaagcccatagcctccttaatgcctcggggcatcctatcacttatattattactgaagaatatagaagtcttaagcttgttaactttttatccagaccacaaacagaaactatctaaacagtccaagaatcccttggcttacttcccaggatgattacgtcattagcaaaaaagatatttaaaaatgttgggccattgctgctaagcttaatgtaatacccggaattaagaaatggattagcaaaaccctaactagataattatgtataattgaggaaattatattattatataa

SEQ ID NO: 113503 - DNA, 1021 bp, Cannabis sativa
  modified_base (46)..(46): a, c, t, g, unknown or other
  modified_base (962)..(990): a, c, t, g, unknown or other
atttcttatattgataactattcagattgtaaagagttttatttanggcataaaacccaacattttataccttaagatgtttagcagttagtgcttcacctccagctcagcttgtcattcgaatggaagatttatgcttacttggaacccgaacaattttgatattagcattaaagaaacaaccaggcaatttatccatactaaggtttatcctaaacactctgccagctttgaaactacctttatttatgcccataatcaagctataacaagagatgatctgtggaaaagcttgagattattaatctctggtagtcaaaattctccttggcttttaatggggcattttcaatggtgtcatgaagcctgatgaaataattaattagagttggtaagatgactaaagacttttctcctttgaagagttgtgttgaagattgcaatctcagtgatgtcaaattctcaggctgcttttgtacttggaacaataagcaggatttggctacaaaattttatgcaaaattagaaagaatacatactaatcagaaatggatagatcttttccaaagtgctaaaattactttcttccatgaaggtgattttgaccattaccagatgtccttactgtctatcctttagaagaaatggcttaaaaccattttgatattttgacatgtggagtagacatcctgattttcagatgaggattatccaaagttagggggcttgatacaagggactcctatgtttagattctatcaaaagcttaaaagtttgtccttaaagagcttcatagagaaggttatggggagattaaggctaaagtcaaagttgctaagattgcttttcttaattatcagcaagcattgattcaaaatcattttcaagccaatttggtgaatgcagagcaagaggcaaggaaaactttctctaatgcttctagtgttggaaattattttacnnnnnnnnnnnnnnnnnnnnnnnnnnnnnttattaacatcctaaataagaactttctaaa

SEQ ID NO: 113504 - DNA, 3110 bp, Cannabis sativa
catgggctactccacttttgagatggaaccccataattctcaacactcacataatatgcaattttcaaatgcagattgttaaagcaatacacaattgatttttaatgtgtaactatcaattaacatgaaaagttcaataccatattgtaggagtattcactttaacccatatggtaaagttattattaattacaaatttcattttaagttttattgtatgatattgtaggagcatgatacaagtgggacagtttcccatccagttttgaaggcagctgctctccaatataaccaccactagtgtacccatcttcatgagcttcaatgcaaatgtcaattacttttttgtacatggggtcttctacataaaacccttctcccataaattcatcaatatccatccactgaattaattattacccaaaacaaaacacaattaaaccacgaaatattcaataaaataacaaaaactaaggaaataaaaataataattagaagattcaacaaacgacaatggttttgattgatacctttgcagcttggatttccttctcgtcgattttgatatcaaacgacattggtttcagcatgcaaataaagagaaggtccgaattctcaaaggccattagatgtgcgtgtctttgattttttgcattgcaaaaacaaaaatgcaaacgacaagttattgttttaagggaaaaaaaatgatgtcgttttgggttatctaattaaacagagttgtgatcaaaagcctaacctgaaagcaactatttctaagaaaacagtgtcaatctgtcgtataaaaggagagaaatattagtattacagaatactacatttttttttattaggaaaagaaaatatcaaatatgaacattatattcgtaactatatatcttactccagtttcctctctcacttctcttacagctccagaatgtatgtcttcagactgaaattaatcaaattaaaataaaattagcaagcagaaaacatataagtaactattcattaaacaaaataataaagagtagtaaatatttgaccttgttaacgtaaccagtaggtaacttccacatatcagagcaattacaagggcacttctcttttaccacaagaacctaaaattaattaaaattgagcattttaaaagacattgaatttggtacttttccaaatacattttcttctcttttttttggtacctctcttttgtgattgatcacaaatccacaaacccctatttgatgagaagggctagatggaagcaagcaaacttcgtctggaatccaatatgttaacataacatatcctgattcagcatggtgataattaaaaccttcctgaaaatttcaaaaaaaccaaataatattattataataataataataagatcttgttgtgtagtaataagtattggagatggttaatttggtacctgtatagctatagggactaactcagcttgttctagcagaatttttagccatactcctttcttcccctgccatttattaatttcaacacacttataatttactcatcactagttgtcacattttacttgatcaaatattattgtaatgttatgaattagtgacctttgacttccagtaggagagagagattcgaagagcagaaacaaaagcatttgcacttaaaggcaagctgtttggattaataacgacaccattataatcgtcgttccatgcatcaagcaactccattgttgtcgtttgtgaagatacatttggagtcattacatgaataactgttttcttgagcatatgagtatgagtatgactactaccacccttaccagcctcttgatgaaacgtcaataatggatcattataagaatacagactcatccggtttttgatcaagagaatattattcgtctgtgaaaaacctgccccaatattataagcaactgaaatcaaataagctgattttcctgattgattaataatagaaatgagaaaacttgatcatcttttagtatactaattaataagtaaaagaaaaacacataccctttggaaacaagtcgtgagagttatagagtggccattttgagactcccattgttgccattgccatcgacatattatacattccctttttgttgcagcaaattataacacacacattcatatataaaacagatatatttgtatatatatatataaatatatatatatatatatgtaaccttgagcaatagtatgttacaaattgaatagaatagaattttgcagaacaagtggtttgtttctgataatattgtcgaataattttgagctatatataaatatataataataaataaccatatgacacaaaactctaaaaagaacattagcaatgtgtaaactaaaagcaaattattataggaagatcaagttgaatagttgaatgaatgaatactagtcagtgtcttgaagatgagaatattatgtttcgattcatatacatcattatgttattatataagttacatcaacatacgtgaaataatgagaactgatcagacgactgttctttagtttaagttgtattcttcaagcttttgattttcataatttatgacataacaatatgcatgattcattttcgtgttattaatatgaaggtcaacattgcattttggcataagaatcatataattggaacaagaatcgattaagaatcacaataagctttggatttgtaaaggaatagttgtgagatgctgttgcaagttggggcaattagtggctgaattgagaacattagatcaaccccacaaattgctatgttttgctacctctctagagttttaaaatatggactattggtaaattaaaagttagtttacattaatgtggttaagaaaagacaaaatatcatgtttaaaataaaagatttaacatatataagatatgtcacctgtattaccataagtagaaattacataggaaaattttagaatattttgttatgtcataaataaataaagttaagaggttatgggttttttattagatgtctcaaatataaacaaaaatagaaccggttataattgaaatataactgtaacacaaagaataaaaataagggaaattatc

SEQ ID NO: 113505 - DNA, 3724 bp, Cannabis sativa
aaatacattgaagggtaaaatagtaaatttatccctactcaatgtaaatcgtctatagaggatcaattaatgtttagattgtaaaaatggataatttatagctatatttggtatatagagtgttatatgtaatcaagagtacaatttcgtatctatagtggagtgatgaggaaataataagctaagaaatttacttagtaaattttgaatctacttattaggagcttggttacataggctcatggtccctatattgtctgggataatatcatctttcagactcaattaattgatttaataagtcaattagaattcgagagtagactatatcttatttgagaatttttaccaagtttgagccattttgagaagaaaagagaaatatgagtttatttgttaattagtacactttgtgtgtctatttaataaatgtatttaaattatattttatttgataattattattatattaaaattagattttaaataattagaagagataagtaataaaataggaaaagacacattgtttcattaaattgcaataaagtggaaaaatcaaatttatgggtttccttaagtagaatttggccatagggttaattttaagcccaattatttttattttggtccatctcatctaaaagtaaccctaagtaggctatatgaagaggatgatgagaaagagcttcataatgctagaaaaccctaattctatgtcaaaataactctcttcttcttctttctctaattcaaaaaacactatgcctatttctctctcaaaatgtgttcaaaagatgagtttagtatcagtccacactattcaagatgatactcagacttttatgaaaaattatgaaaaattgttacttttcaagttaaggaaggagaattcaggtttattatttggcaatactctgttaccaaacgtgaatcaaggttttgagtaattgaactgaaggagtcatattatttatgctgcaaccaatataaggatttctaatctcttatgtgttatttgatagatcattttgagtatttcatattttaggatgatagattattatgtgacaatcaaacatacatgattaataaattaagatcctgataaaataagttctaacactttttttgtcttcttctacgaccattgacttaaaggctaagcttttggtgcaagtttgagttactttaaatcaccatgtttccttatggcatgtgaccactaacattagagatgtcagtggtcgcatgtggcatttacttctagcttttgatgatatcatctttgtcctttgtacttatttatttcaaataagtgaagcattttagtcctctcgtggaaattcttctcagataagggtaggggtgcacatgggtcgggtttttgggttttcgggcttcgggtcttggaaaagcataaccgaacctaattttcgggtatgcgagtgcgccaggtatcagggcaggtttttttgggttgggtgtagccgggttcgggtcctatgggttgagcccgaatgtttaattaacgggatgaaataaaatttaatttttaaaaataccattttttttaacattagttggactttttttaataattaatattttttttattattaatatttttgtttgtaagttttccttacaaaaatgacattcaattcaaaacttaaactaaactatccactatccactatatgtatccactatcaactatccaatagtctattgttactgtatatatactgtatgttcctgattacatacaaacaaaaagaaataaataaataaataaagaagttaaggaagaaaaaaaatgtacacacacataaccacacagtgacagtgcaacatcatcgtcaacgtattacctcgccagtcgccaggccagccggtgaagtcaccacctcggacttcgaggctcggagaagaagaagttttcggacgagtttactttggacttggatgttagggacgccagactgtccaccgcttggatgcgaccccgccgaagaagagaagcagtcgtccgtccgtcgccgtccttggagaagaagaagcttgagggaggtgactcttggtgtactgactagtgactattgtattgtgtttgaccgcttgtgtctattgtattgtactgactcactattgtacaaaataaagtctgtgtcaattgtattgtacagtacaatttttactgactcatgagggaggtgactcttggtttactgtttgcttcgaatagtcatttttgttgaataataaagtctaaaaagtttttaatattaatatattattaagtttttaataaaataaaaaaaaatttaaagttgctcctcaagttacgggttacaacccgaaaaaaaatcaatttactatacccgattccgaaactcgtgtgggggtattttcgggttgaacccgacccgaccacacgggttttcaaatttttggttttttggttagtgggccggggcaggcggtcgggttttctcggtttgcgggtctaaatgttcagccctagataagggttttaaagtgaaataccctttcttgaaatattgaagaaacaagccttaggagaaaaacccttgatgtgcaaccattgacaaccccttaggccaatagtcacatatggcatcttttttgccacgtggcattccacttcgtcttttgttgcttggtcaaatttttctcttggccttcatatcttcaaggtgtattcttgtcttgtgggccctcatggaagaataataatgtgtatataattaatttatcttttgtgaaaattgggtatagaaaaaaagaaaaataattagtaattaaattaataaacacggttagataacctattttttttaactctcactctcgatttcttttctcaccccctccccacctgttagtctatttcacaacatgtttcctgagctcatacaagccaactattaccaccttccaatgcgccatgcgcccctaaccaaaaggaccaaaagtcgtcgaaatcttagaccccacaaacccaagacttcactctctgccacttaggagaatcaattcgtcaaaattgcgacagtccagagtttatcgagcattttttaacccccaccatcgttaaaactcaaatgcaagggcatggttgaacttaggatatcaaaaacaataaaacctatccaagaatcaaagtcctagtttattgaaaaataattggagaaattcattggaattcatggagatctaagaatacgcggggtacttttgagtattctaaacattttcaagctaaacaatgatcaccacggcatcccttgtgacctaggcttcaaatactaatacttcatcatctcgtttcttactatcgagtggtgatgttgccatcttcattaaagctttggtgagggtcttgactagccaccattttgaagtgtgaatattattttgaatatttgtacacacaagtgtactttataaattcaattagattgcgcaataagtttaaattaattattttgtgaactctcttagtttaaaattaagaataactaaatctatttttattgtgggggaaaaataattaaaattgaattaaaagaaaattttaatctaattaatgaaaaagaaagaaatatgtgttttaaaaggaaaaacatattatatcaaaagcaataaaacctagggctgaacatcgggcgggtttaccgggtttcgggttggcgggttt

SEQ ID NO: 113506 - DNA, 1782 bp, Cannabis sativa
  modified_base (1673)..(1674): a, c, t, g, unknown or other
gggggatgtcccaactgagttgttgccttgtttggtagcagagattgaagtttaataaagtttcagattattttcttcaaaaaaaaaaaattagtgtgtaaaaaaagtgtcatgatttctcaaattagacctctatttatagtagtaaatattcaaaatcatatttaatcatatttaagattgtaccctaatcacttctactattttcattttaattttgtaaattccattttaattgttgaacaattcattattcatcatcatacctacattagttaattttttttgcggaaaatacctacattagttattatcatcatgaaaattgaaacctctcatctgaaatttgaaactcacggtttgaaatgagttaaaaactctacttatttatgaacacaaaaaatccctatcaatctgagatatgtagtgttgtatattgtcgaagttggatcttagtgaagctattgaaacccccgaacaccaaaccccttgaatggagattccccccgcgaacccttcgaacccaaacaaccagaccaccgagaaccttcgctagaaaaaatggtggagtttcttctgtgcgttttgatatctttacatttggggttttttggatttttgtgtcatctaagtgttggagttgcgtatttggttttggagagatttttggttgataaaaatggtgagtgggggctgaaaagttgtcaacattttgcaagagagagggtttgaaagtgtgaaagaccgttaaaaaaaattaaagaaacagaaaaaaaaaatgtacaaataaagaaagggaagaagaaaaagaggagattaagagagagatacaagggatttttattagtttttttatttttttagtttaataatctattttttaattttaaaatcttttttatctactttcaaaaaatttcaaaaaagaaaaaaacttttttatctatagaaataaatatgagttaattttattttttattaattatttaattattttttaaaaaaaattaaacatgaaccaataatatattgacatatggtatctcacttgctaaatcagcacttaacaaaaataatagtgacggaagtaacataaatgtaatttaaggtacttaataaaacatgtgttatttaagtgtatataattgaaaacatgtggtatttatgctgcaaatatccctataatataatataagttaaggggagttttcataaatatgagagttgagggtataatttaattttttatggcataaataaataacactataagtttatgaatttttttattatttttttacatttatatggatttttttatgccatagttttgtaaaaaaaaagtggaaatcccatttataaaacaacaaaatgttttgccggaaaagtcactggcatcgaaaaaattgctggcgccaaaaaagtcactagaaaagttagtgtcatcgaaaaagtcgccggaaaaatcatcatttccgaaaaattcgtcggaaaagtcgctgaaaaagtcactagaaaagtcaccaaaagtaaatgtctcagatataactaaaaatataactagttctatgaataaaaactaatagctcaaaccgattataattgaaatataacctattctgtaatataataaataaaaataaataacataaataactcaaaccagttataannaaaatagaatcggttctataatagtgttacaataaataataaccaataacacgaaataactcaaaaccggttataactaaaatagaaccagttatataacataatgaa

SEQ ID NO: 113507 - DNA, 4196 bp, Cannabis sativa
  modified_base (4125)..(4138): a, c, t, g, unknown or other
tactgttgttccccggattatgttgtaaattggttagtttgattaatgaagtttctttcttgatcaaaagaaaaaaaaaacttactgttgttccttttcgtaactatgaaaaccaaaaccgagtgtgtcttcacctaatgaacatgaataaatgttggatctgcttttaactccctctataaaatgtaatagttaaccactttggattccaaaaaacaaagacagcatatattaaaaccaagacaaaaatgaagtattttcgcaagtcatctcttacttcctagttcttcaaagtaactccaccgatttacagagcccagcaccagaacatagatctcatgccctaatgtaagagaacctacatttctgtttttctttatctgctgtggctaaaagtaagaaccagatctgatttttctctattttcccaagattaaaaagtaaccagaacacatgactgagataattaaacatagtaaaaaatataccactactggctaatggaaactagcattatgtatcccaatttacgtaaatgctcactatttgttctgctctaagatgagtaacatgtaaaaatgtttcacccataaaaccaaaaaggcctccttcaccttatggtccagtcaaacagaccagaaaaagacaaatcctattatcagcctaaatatggattgacatgaccataaaatccatatgcatttcttaatgtgagcaggcttcccatgatttcgagcaacacctataattctaatgtatgattagatacaaaaccaaagttcctatgtacagtaacgtattcacactagtcactaaaggtaacgatcacatttacttcaccctataaattagagccacatgaattgttttatagaaccaccatgaagccagaagaaaaacagtccttaaattgataccagagacttaataaagattctttctcaattcaggctgcagaaaaggattaagatacaatgtgctacaattttccaaaaatgtcatcatgggagggggaaaactggaaaactttactaacatgatcctttagttaatgaagtgagagcacaacaagacacagaaaaacctatataaacagaatacaaaataaggttgagttgaagacatcaaaactcacctagttaataaacaagcatctgacatcttcatcaaaggctcatgaggcatcctaacaaggtatgaatgtattgccaaaaaattggtggatttcatctcagagactcatgacggttttagcatttactataaaccttcattctacaattacacattacataaggacacaaagattggttcttaagaaaataattcacggaggttacctcattgcaaatcattcctatttcataaggacctgatccctactaactaaaaggctgcagaatatgcagctggttcttctaaaagagccacaatcgtaagagtcataataaactcaaatgaacaaatatagctcaaggtatcaagctttcttcaaattcaagaatgtaaacattaaagtataaatgcatgaatagcatacagtataaaattcagacaaagaactatacatctgcaagtattaagaccaaaaaaaaaaagaaacagcaagcaactcaaactaaaatttaatcaacatatacacaaactataatctaattaacatacacacaagtaagaacaaagataaatgcagtaaataagaaacaaaatcaacaacctaaaggtcacccctttagagaaaacaacggtaaggtgctaatacccatctggatttgcatcagtaaagttccacaaaccatttacttatccaaacattttgcttctcaaaagcaagttaaagacacaaatgtaaaaaaaaatactaactttctacacgcgtaacaataagaaagaaaaaaccaaaagacaatttaagcaaaggtaacaacaagagcagaaaatttattttcttctttccacatggaaaattaagcattcaattttctgaacgtaaatacagtacaacatgagagcaactgagaaattctctttgattttgcataaacacattaaacttaacagtaattgcaagttctctatttcaatttctacatacaaaagtagcaacaacaacaacaataacacattggttacggttgtaaaatatataacaaacctcaaaattcgaaaattcaagcagagtgattaaggagacaatgctgtgagccttgcctcgaaaacgaatcccctgctgagaccatccccactaccgggcacaccatctatccatctccaatcccctttgccggagcagtaatcccacaaggccaatcttccgacccttttcgccgaaaagcaaaccctatctcctccaccaaacaccttaaacttactcgattcctgaaaacacctaaacatatccaatggcatccgacccgcttcgtcccaatccaaactctccaaatccaatctcaaaatcaatatagtcgaacacgacgagttcaaagagaacgaagatttcaacccaccaaccataaggattcggttcccatttcccctaaccaaacgaggtcttttcaagatatcaaacacgtcaccccactcgtgtctctcgagccgattccatgtctgcgaattcttcatcttcgcaattgtgcacgagaaaagcttccactggcttctccacggcgaaccaacatcgcaaagagcgtaaaccgagtcagaaaccagaatagggcttctaggtttcgacggcaaattcgaagaaaagctcagccattgattcgaacccgaaaagcaataaagcgcagcgagctcagtcaaaaccatgactcgactcgccgaatcgacaagaaccgaaccatgacgagaccaggccgaacccagctgaggcaaaacccgaaactgtcgagtcaaagggttacatacaagaagcgacttgctgagacccggagacaagtccggcgagtctccccataggtaaacgagtccgagggaagatgcaaccgggtggagagaacggaatgggaggaagtcgaggttgaatctgagccactggttctgatcggggtcaaagacgtggagaccgggatgagatgattggtggaggcggtgggcgtggtggtggtggtggtgaggtggtcggagagcgaggagatgaagcgaagaggtggcggagatgagatgaaggaagcaaggtgaggtgaggacttggttgaagagcttacagacggagcgacagatcatgatctgacggaggggaagagctgagaatatctggtgcagagtatcctgaggaagacggtagatcggcggcgcgtccatttcactcgccgtggtaccgtacaacatccgatgttagagagagaaaaagagaaagattgatagggaaactatgtggtggagttgtcgtagtaggggtagacgagtccggtattttcgtaatttcacttaatttcgatttggattacggttgcaaaggcccataatgaggcccaatataaacgaggccctaaattcggaagcccatatgagattatttcataaaataccaaaaatgataaaagaatacatttttacggattttaactttttgttttacaaaaatataagatgttatttttttggttggtttcaaaatagtattgttttcacgttgttgctgtatgaaagcgatgtaaaaacaaagtctctcatatactattttttgactgttttttttaaatttacggtttgagttgctccggtagtttcaatgtgaattgctatgtggattttggttgtgatttaggttgctctgttgattgttatgtgggttgctatgtggatttttgtaaaaatataaaaaaaaaatactttgaagtgtaaaaatgaaaaaatcccaaaacttttatagaatccataaaaaaattgtaaaaaagtgaagaaaaaaaatgtctgatttctcacaaatatagttatatcctattagcgcacactaatctttgtgcgtagtggttgatatggaagtcaaggtgagagtttgacgtcaccatctcttggatataacttacgaaaagatttaaggataccctaattcgcttcaagaggtaaatatatcctctactcttttattttggatttaatataggctaattaggatttttnnnnnnnnnnnnnngacatgtaccaaatcatatcccctgaacttttaaggccgttaaaaatgccccctgaac

SEQ ID NO: 113508 - DNA, 3029 bp, Cannabis sativa
  modified_base (2299)..(2306): a, c, t, g, unknown or other
  modified_base (2559)..(2563): a, c, t, g, unknown or other
tgtgtgtgtgtgtgtgtgtgaaaagaaattagggttatttatataagttggggtatataagtaggttttttttaagatgggtcgaagccctattttgggtttttttatgtaatttagctttggttatgaactaatgcaaatttttcatagatttatagccaatgcaaaacccttcaaccaacgctaaatgatgcctctgagcaaaatcgacgcaaatttgagcccacattttttttaaaaaaaaatcatctttagcgtttgtatatgttttagtgtcaaaatattaattgacgcaaattagttattattggcatcggttaacaactgaacaaaaaaaaaagtgagggttgacttttgcgtcggtcaactagtttgactgaagcgttgaccgatgtaaaaacccctttttgtagtaaggctggccggacttgtcctaatgggcttacccactttatctttgctaaaggacccactgatgggccttagatgttgacctagattccacgtgtccactcccagaaacacggataacatttatccccaagcttccagaatgttgcgtatggtggaagcttgctacactccttcaatatggacatgtggaggttgagggataaactcatgaatttctaagtgctactcgatcataggaggtggcttcaatctttggctgtagtacatctacgtgtcaatcacatgatggtggaagagtgcgatcatcaaggagtcgctttctagaaatggctatattttgacaattgttcactttttggtgcaaaaattgaaaaagggcatcatcatcattgatttgcacctcgatcttgtggagccttaattgtagagatgcacgtgaattgtggaaccccctgactgtcagattaaacttgtgtttatggagattggatcgtgtgccatccaccccttctcacatggattgcccttttttggtataaatacatttaacaaactccagttaccgattttcattcgtttcctaatgttaaaacttctaaaacccttcaaagcttccaactctgtcaacgctcttcgaaaaccagaacaaaatccagagctaatctttcttgttcacactagaaggtgtagttgatttctggattcatcttctatagacgattcaagcacgagaaattccgcatcgtcaactcccagtgctcataagtttcacaccagaagaggaaggcacgaatctatattttgatgcaaaagtcaattcgttaatctccctaacatctcatctctgtgaaaggtgcaatcaagtcccccaagcaaacctaacaacgattagtttgacatcttcaatttcaacatcacgtatgtggtactttgtctttgaactgtgcttcttgggtttgctgctataaacttttcattttttgtttaggatgagattagggttcttgatttgtgttattatcatcataggtttaggcatcacaaaccattgttttctgaatttaggatttcataaaattgatcgtgctacagtagtcatgctagaaaaaaatttccaaacatccaaaatccttcaggtttttggttctccattaatctcctttgtgcttttcctctctatcgttcctgacttcatatgtaaaacgaatgactcctgggagttattatttttggatagttatctagttgggtcctctataagtagctcatgggggaggaccctcttctccttttctacgttaggtagttagggttgctgactgcttggattttcttcttttgtatagaaatcatgcctagatagatttgttgagatgaagctgactcggaggaggagaatatggagcatgaaaatgctccaaaattgatcctaaatgatagtccattaaagacagaccaacacattaacaatgatagatttgtgctttttattgttattatatttcatccacgtgacgaggttaatgcctcatcatgcacacttgtatttacatagtttctcgtcgagacacagatcaacagttagtacattttcatctcgcataagactgtctagttagtcgagttataaacatactatgctaactatgtacgtaacgagttattccatgtcaagtgtacttacgattgtgtgtttgagttcttcattcttcccagatggacacgtgtcttcttctaatgtgctcaccgaattttgggtataacactaggtttatcatagatgaaaggaattacaaaatttaccggttacaaactatttatatgatctattgacaattgaactttgattaaaattagatcattagatctgtcaacaagttaatcnnnnnnnnttagatcaaataaataataggtttcttaaaaaaaagttgataaacaatttaaataaaacaaaacaatcaagtaacaaatgtgaattgagatatttattaattatataattaaattatcatttgaataaccaactattttgaaaatttagggttgttgaaacaaccttaaatatctttacaaaatttaaaatttaaactaattttaaaatatctaggttttagttgaattcttttatcaaattaaattaaatannnnntaagataaatgatttgaaaataatcaattagatattttattatcattttccaatcttataatttgataaaattaaaataacaaaataaaccaattttaaaacaggtatggttagacaattattatttcaagaataaaataagaattaaatgataactttctaaattatatgtcaaaatatctcaaattacgcctaaatttctatacaaatatctaagttatttaaatatttataatattatttataaatttctgataagtaaaatgatataaaatatcatttttcgaacttataatttataaagaataaaatattccactaaataaccaatttatgaatttaaaaatattctgattaggatatctataaatatttcaaatttattattatttaatttttcatataagataattttaatataatatttcaaattttaaaaaaaaatattatcttttaatttaaaata

SEQ ID NO: 113509 - DNA, 1741 bp, Cannabis sativa
agcaaagaactatccaatcaacccaagttttaataaaaccaataaaatttaatgtaagcccaaataaaagtctaacacatcatacctaccattcttttatttatttcagtctcaattaattaccaagagtttatctattacttacacatttttcatttcataataaataaacaatcgtgtttcaaatatcatcaaaattatgttaattaataatattttttttttaagagtggcacgtatatatattcacttgtttaacatttgtgtttctttatttttttttagattgggcaaatctacctacacatcttttagattgtataataactaaactagaatcgtccttagatttcgtacaattcggtgctgtttatgtttcgtggaaacatataaaaaaaagacaacgaagttaaatggaacaatacttttcgtctagataatcaaatgcctatgcttttagttcctcaagaagaaagtgacacatggagcttatgcaacgttgttgacaataaacaattagagttaaaattatctttattaaacaacgagcattgctattgggcaccagtggtgcctagcaccttctaaatgtgtcgacttgcaattggctagcgatactctataaaaattattatattaaactatatgggacccgatacttaattatacccatagcgatattgacacgtaggaaggtgctaggcaccagtagtaccctttatcatttctcttaaacaacaagcgtttcaatggctattagggtggttagtaatcgtaaatagtgactacacaataacacttcataaaccttctttcataaataagagaaattatatgagtgatgatgacattgatattaatggtacaagtattttgcttctaagtttatttcctccagaaccttttcctgaaaccgatgatgatgaagaagaggacatttctcaactatgtttatattggggtaagttgaaaaatactacttttattaatcaattaatcaaatttacctctagttttatatttaattgaaacatacctatatattgtacccaagagtatcttgaagtgacagtggtaaaattagtacaatgtttaaaaaaaaaagtaaaaatgatagacttaaaaaaagggtaaaaataaaagaggacaatataaaaaagtatagagtgtaattttctcgtttatatttaggtactgattatcatataatgagagctctaattataggcgatcctctcaggaatcccaataattgtattgttgttgttatttatagcacatcatatgaattagtagcttatattagaattggtaaagacacaacatggaaaaaattttgtgaatatacacctggatatagtgacattatacattataagaatcaattatatgcattgcgttgtacaggaatagaactcatgttgctaagtccaggagaatgtgatcctaaaaaggctatgaagctagttgcaactaaagaagcaacacatgaatccaaactatatattgtggaatcaagtggtggggaacttttgttagttgaaaggtgttttgattttattcccaagatgaattatgacttagagcgtgtgacaacattgttcaagatttacaaactagattttgagcaaggaaagtggattgagattatgaaatggaatggaatggaaaggaaacaatttttattccattcctttgtttggttgtattttaaagtattggaatagcattccaatggaat

SEQ ID NO: 113510 - DNA, 2854 bp, Cannabis sativa
  modified_base (26)..(28): a, c, t, g, unknown or other
ttcataagtattttgggtagcgtgcnnnattatttagggcgttacaaatatagtaattagttattgttttataatttttttaaatcatagttattagttaatattcattttaaaattttattaaataaattatattatattatacaataactaattaactttcaaaataataaaaatatatataaaataattagaatacaaaaatggtagtttgttatattacatttcaaaaataatttttaaggctacctaaatatattttaaattataagctaccatattataacttaagaataactaattacttaccaagatgtatacaaataagttttggaggtaatcaaaatgtaactcaaattatatgatataaaattaatttttttatgtaaatgtgactaattggtttcttatcaacattattagtaaccaaaaagttacttttaaaaacgtagaaaaaaaatattagaaaatgtcagattttattaacgtgatacgtcagtaaaaatggtaacattattattataaattagatgcaaacaaaaaaaaattatttcaataatataaataaaatataaattaattataaaaataactcaacaaatctcaattacaataatgtcttgtcacatcattaaaaaataccttaattctaaaataatatgcttgtaatgaaactaaatatgaaattctattttttttattttcctatatttcaaaagtaattttttggttacttatgaataagaaaccaataagttactttttcataaaaagtatcactattatattatataatttgagatatattttttttacttccaaaacttatttgtatacaccttaaaaatcaattagttatttaagttatattaatatatttgagtagtcttcaaatttatgttcaaaactaatgagttgtgatacaataaactattattttaataaattgtatttaaaaataaatatatcatacatgtttaagtcactcatattttttaaatgtaaattatatatgtattttgattaataaacaataaagttacaaacaacttttaaatcattacaaaaaagatattttttagaccaattggttatgatttcgataagataccaattagttacttttcataaaataattcattttaaacaaaaatatctcatatagataacttttaatttttagagtagttacttttaaaactatatgtttattattagtttatattatattgtaagatatatattttacgttattgttttgttattttgtgtaacaacatttatgttacctttaattttattgaaaaagctaacacattaaaataaagtaaaataaatcatataatttattagctagtaaaatttttggatatctaaaataataaccaaataattattttagaattatattatggtatcttaatattatttaagatacattttggtaaccttaatttgtgtagaaactaattagttattatatataatattgtaatgttaaatttttgatagcgaatggtgatattttaattagtaaactaacgtaatactaatgggttacttgtttattaaatttttatttttataattatacattgttgaatgtaactaatgagtatataatttaatatggtaagaaactaaatagttactttgattctaaaaaaatgcaagaaaatataaaagaaacaaataagtatgaaagcaataatcaaagtagaaaattggggagccggagttaaactactgaccgttgttgatggtgaaggaggtactccataagcatgtccataagcctcttccaaatttatgaagccttgaactctggacaagaaatatgaaaaagtatcaaatctttttctttgcaattctccccacaataaggatcggatggatatccctaaagttaaggccactaacttcatgtcatcatagaccttagttttagctgctgcatcctttggatatacttcttgagactctctcccgattgttgttttatattggtcaatgaactggcctccatgtcataatccttcgcgactatgaactattttttaaacatggtttgcaaatctttttaattacaaattgagccaggagacaatcttttccaccagttttcagcagactttggtaaagttaacaaaaaatagaggcactttgcatcatcacttaccttcgctacttgcatcagtcagatgtatttagacatgtagggactggtgtccactgtctaaatacatggttccaacaaggtgcctctattattcttcttacacatgcttttagatcttcttcttcggaatcatattcaactccactttgctttcgagcaaaacactttgtgaacttggtcaatgtagctatttgatcttccaaatgctttgtattatcatcctagaactcatacccacggatctgatcattaatgtgatttctaagatcattttcgcgaagcctagccttctcgcttgtagctcattcttttgcatttaaacgttcccgaagggctatcttttggaatggggtgaacctcatccactctgccactgtggttaacagaattactagggcagtttttccttccctaagcagtaggcctttgtacatgagtactcagcttatctgcccacacgactctaccttgcagattaatcggccagctttgctctggacattgaccaccttctttttttttttgtaaaagttgattagcagtattcgtattattccgtggagcaatgggagtagtctttttgcaggttctcccatgacacatgaaaaactgagtttttgcaaatgtcaattatatatacgaaaatacaaaactgtatgcgtctgcagaagcaga

SEQ ID NO: 113511 - DNA, 2047 bp, Cannabis sativa
  modified_base (38)..(44): a, c, t, g, unknown or other
  modified_base (1974)..(2021): a, c, t, g, unknown or other
ccgaaatatacaaagaataataaaatatttttgtcaannnnnnntgccaaaaatggaattaacagtttccataacaaaaagaaaacaaggcctatgatgcttaatcagtagggagagatttcggaatgcccgaggactccccaatcctcgagcattcaaacacataaaactcatttttctggacggggttgctcagcaacacctgccggtacaacatgatcttcttcaacattaggaacaacaacatcagagtcaccaacacaagccttcttcaaaaaactcctaaccgaagtgctactgggcatatcttgacgagtataagacctcttagtacatgaattaccaccaatagtaaggggccttggttgaaaaataggtacagaagtaattggaatcgaggttgcaggtagttgaacccctttttctttatccatatgaacaataacaagagcatctgacatcataactcgagaaactgcacaaagaagactttgaaagttactgaccggagtggaggagacaacagattgtcccactgaggttaaaatggaagatgtagtgttaggaatatcaatcctaggttgaacatccacctgaccttgggtttcagagaagtttccaggaggaagaaactgattaacaacttcttgcaagtcttgattgtgttgagaagatcgtagattcatttcttccaaagggatggaatttgacatatcaaacaggtcccttttaaagaaagatttaggcaaagctctgatgttatccttaaaagggagagccggaggcatacgcccttcatcaagatttcaggaacttcccacacttagagaaaccatgctcaaaattcccacaaaaataacagtagttttgtaacccctcgaacataaagttaagccacttagtagcacctagctgtctaaaaaagacttgcatacccctacgaattggttttgtgatgtcaagaagaactcgaatacgaagaaaggggccagagatttccaaaagagttgccttatgaatctcaataagatctcctagatctttagctacgaattgagcaaggtggggagacctaaattcgaaagggatagagtgaatttgaacccagaaaggaacaaaccggagctgatcaggttgaagaatattcaggccttctggattagcaaaaaccataaggcaatggtcaaagtgccaaggctgcccttctacaaccctacgcctatctccatcacacccaaaatgggctaaaaaaaagacccgaatgatactcagtgaaattgacaggaaatctaagggtctaagcctccctcatagctttgtcaagccaatcgggtttgagagacttttgggtaaggattttaacgacaaggcaacatgaattttccataggattagacctcaaagagaccccatcaaagtcatgaagtaaggcctcctcatcgttgagagcaaggtgatgagaggagctttagcagtatgagccatggaaacaaaaacaaaagaacaacctgtggagaagatagaggggaaaatagggaagatatggacaactaagcagaagaaagcataaccagaggaataaaacatagattacttgcaagaaatagggaatatatatagaatcgtaagtattatacctgagaagtaagatcttttgcaagaagtaaccagaggccaaatctcccaccacattaatgttttcctggcatgatccctcgagagaagaggttatgatcacaaataacccccaaatgccttcaaagacggcggactgagagagaatacgaaagggataccatctgaagctaaatatcttctgatacaacattaaatgcttatggaaacaacaaaaccacaataaatgcactaagtgtctatcatagagaggtatgatgaaagagtttcgactatttaaaaaattaaaagaaaaacaaacaaaagttggaatgggaaactgttgggttttgtgccctnnnnnnnnnnnnnnnnnnnnnnnnnnnnnnnnnnnnnnnnnnnnnnnnagaaataacattttatgttgtatggt

SEQ ID NO: 113512 - DNA, 4151 bp, Cannabis sativa
gttaggagttcattcgtagactgatgcttgttctagatttattaatgctcatgtaacagctgattttatttaatttaatacatgcttttcttaaaaaaaattaaataaaaatatctcattaggtatattaattgtctcttaaataattaggatttcatttgttcaaactaaaaaaaattaggattttcattaaaagaggatccgattaggaccacttaattaaataatattaggcacatatttaatagttacattaaaatattaatatataattataatattactcgattcaacaatggcggagatcacatgcgacaatgaccctccttctaaataccactgccaagctctacattgcccccagaactcttccctttacctcttcctctacctttgctcgtagcccttttctccgaatcccctcccttcttaagcccttgtctcctctcaccgctagggtctctctttcttccaccatgggagactctgccgacgctggaatggacgctgtccagagacgccttatgtttgatgatgagtgcgtttctgtttatctgataacccttcttccatttcttctttgttactcttctgatatgctttgtttggttgcttagattttgaataggaaatatatatatattcaaatgttgattttgtttttcttgattttttgggttgcttatttcatgggttggtttgtattttgttctttattgttatatttcaaccattatactttgtttgttgatgttctccctctttttgattctttaaggaaacgaaatatatatgtatatatatattatatgtgtgtgtgtattgttgaaggagcataatttttttttcttcctaaatcttgcgtaattagcatgatttatttcatgttttgtttgcttaattttgtctttggttctattaacagtgccccttcaataccttttcatttcaaccaaatgaactgaactattggtgttgttggaaagcatgaagatattaacttcaaatcttatatcgacggatatgtattatgcttgttttgtttttgaacacaacaaagtgaattattggctttgttttcccttctcttgctctgtttgctagttcaaaggttgataaaattaaacctcggatttcatttctttgttgtttgttgtttttgtaagaaatgaatgttcagcggctgaggtgagacttaaatagattattaactattatcaaatgagttgagatattttttgagccaaatatttggttctataattggaaaacattgaaaatccaaatgcaaatttgggttttagatctacatatttatcgtttgggctgtttatctagatttttcgcttgtctggagttgattaggtttctttgtgtgaactttctgcagatgcattctagtggatgagaatgaccgagttgttggtcatgatacaaaatataactgtaagtaaaatttgatctgcacaacacttccttttgggtattatttcacggttttatggcactttgcatactccaagtctttctatccttcctaaatcagtaaatcttatacactcttttgattttggatacctttatgttatggaaatcaactgtttattcatgttttgggcattctacattttccccccctctctctctgacaccatatattttattaatagatcatgttgattctgttggatcagctagacctccgtggtttgctaaagcttttgtctcttgtaggtcacttgatggaaaagattgaaaaggataatttgctacacagggctttcagtgtgttcttgttcaactcaaaatatgagttgcttcttcaggtattgattgcaatatttgaggatcatcaaactataggcttttctatttaagtatccaaacgttagatcttgcgggagcaaagcaaactacagacctgacttttcgaactaccctcctaggtgcttatacagcaaatataagtgtcaattgaagaacagagtcaagatccggcctatattacctatgcagcctttatatcctatgaggagggcataaattgaataagtgtgtcatagttctatttttctgtatgcagggttgcttttcttttttatcggccataatttgcttaagcacattagtctctgtttgtccttttaatcaacatatacatcatgaccaagtctacatcttttcttgttttctatgtttcttctctttcactaaaactccttgtgtgtgtctagttatattgaagcccagtttgtttctattatgcacatctattcgataacataagtgtcaagagatgatattctatctgttcatctgtacagcaacgttctgcaacaaaggtaacattccctcttgtgtggacaaacacctgttgtagccacccgctctaccgtgaatctgagcttatcgatgaggagtcccttggtaatatatttctgcagaatatatatttgattatccaatgaaagcttacctcttcaaaatctcattatattttttaattaccaggagcaaggaatgcagcacagagaaagcttttagatgagctgggtattcctgctgaagatgtgccagttgatcaatttaccccactaggcaggatgctgtacaaagctccttctgatggcaaatggggcgagcatgaacgtaataattcttactttattatacatcatatgcaaaataaataaataaataaatagcatccagatatttgtgagctattggcaccaggttgaaatttgttaagtttaagagagtgattaagggagcgctgtttttttgacttgtcatgctcacttcttggttattattccattgtttggcagttgattacctgctcttcatcgtccgggatgttagtgtcaatccaaatccagatgaagtagctgatatcaagtatgtaaaccgggacgagttgaaagagttgttgaggaaagcagatgctggggaaggaggcttgaagctatccccttggttcagactggttgtggataatttcttgttcaagtggtgggaccatgttgagaaaggcacacttaaggaagttgctgatatgaaaaccattcacaagttgacttaatagccttagtagtcatttagtggcgcaattgtctttctatccaataaagtttgaacaatgaaacatctactcagatttaaataagtaggccttgaattgaaaccctctcgttatttgctttagtgtctgtttgttttctattttcccaaaaaagaaaaaaacatgtcaaccaatgttttaaagttttgagtaacattccaaaacatacatgggatgtgtgtttttttatgtagtactaaagtttctacacaatgaagaattgagtcttggttatgctaaatttggagaatgaactttctgttatgtcgttttactcagctgaagatagtattagaagcactttaattttctcaacactctgaaagtatagatcaaattgagaaaagtcaatagagtaggaggctgcctgtgttgctctctgacatcagttagtgacaagagcattgtgtcgtgtgaaatgagtgatgacacttgccgccacacatttgatgccatattaaaagccatcatcctctgatgaagatctccacaaatcaataaaacaaaagttgcccatctcaataatttgatttaacttttctcaaccctactctcattccaacccttgtgtaatacacacgcctcaaaatcataatttcatcatcatgacttggatttagaataatatttaatgttaacaaaactcgacactttaattaaaaaaaaaaatgtaaaacactcaagaaccaatttttcagagtaacaaaaatttaaaatatttgattgaaatagactcgttcataaaaaaaaataaataaaacaattgtttgcatagtcccatcccatctccatcttttcaaggttaaatctttctaaatatttatccaatatccatagacatagaagctttgttttctttttgtttgaacaaagagtgagaaattttatttaaacaagcactaaactactcgaaattatacatataaaaaaagtaaatagtggcataagtactcaaaattttatgtttgtaagcggcataaatctaatatttatttttagcggtataagtacccaatgtttctaaaac

SEQ ID NO: 113513 - DNA, 760 bp, Cannabis sativa
  modified_base (707)..(725): a, c, t, g, unknown or other
ttttttttttttttcttctttatactgatctctctctctcccttttggcttggtgcgacaccgaagtcagactaggagcacggtgctccggccatatcgccagtcggacctcaccatctctcaccccgctccctctcttttgttctcggctcaaccacggccaagccactacggtcgccgatggtccaaaaggaccacaaaaacttgatctccaagcccagaaacccaaacccagtgatcctccgagtctctctctctctcaattttccgaagcattttgatttcaattttgcatctctagttgtcaacgagctaaaataaccttatttatagcttccttatgttgagagcttctaaatctcgttgttcaattttccatgcaccacctttgatcggagacgaccaccacacacaacaatgctctgggttggggtttgatttctattgtttgttattttgtgcatctatttagttattttaggactccttcaaatgcaatcactgttaaagttatttgtttaaaatttttggcatttacaatggggcattcacttcactattttttgaaacttttttattcttgcattcacaaagagcttactgttatgtcaattggtttgtaggttttgtggatttctgatagtatattacaaagtttcaccaatactacaaaaaactactattttagtgacaactttttaatcacnnnnnnnnnnnnnnnnnnntaaatgtgacttttagtcataacaaaatattactt

SEQ ID NO: 113514 - DNA, 1949 bp, Cannabis sativa
aaacaaattattcgtatgatcatgtctttacatacaatctaaataagaaaaaaaaaattaaactttacctaaaactaatatttacgtgcctcggcacgtaactcttacctagtatataaatatatatgtgagtggttggattttgaatttgaaaaatatttagaatgttgtttaattaaattttatcaaaattaaattaaattattataataactttttaaaaaataattaactactattaacaattatgagtaatcataatttttctcctataatctactagttaatacccgcactatcatcaatgagtgggtgtaattatataattaacctacgagaatagagataggaatggtaatataaaaaccatctccaattcgcacaatttccatattttaaaaataaaaatttaaaagctgctaattcttgttaatattatttgttgaagcaacttttttttcttgttattttattgccaaataaaatttggatcttcatatacaggataactgtgggctattattcttcaagaaaatattgaaagagaaacaagaagaattattaagaggacacaatttattttaatttcttttggggaataagtaataatgacgaattaatactcttagttatgggttgcagctgtgccaattagcactaggatacgtgcatttgcatcttattatatgattaatctaagttgagccacttttgttagattaatcattcttaattaattatatatatatatataagatatataagatatatataatgatgccttacaaactcaatgattttcatgttgttctcaacctttaatgtcatatttatccatgaaattttataattgttttatttgatcattataattttgttcttaaattaagtaatcattaatcgtgtaatttatatccttttgcataaaatatctttaggtttttttttctttttttttttttgaaatttacatttttagttgttattgaacatttaattaaccacttgtaatagcagatgttatttttaaataaattcttgtcaccaccttagtaaaactcttgttgcttttgatatttagtggttgaaatctttttttttaaaaaaaaaattaataacttataatctctacaataacttttttttctaaaaaaaaaattcatgctattactatttagtgagaaaacgtagttcacaaaacaaaactattataaaatatgttaaatctatttttttttcttgttttttaaaatgataaatgacagctacaaatactaaataatatatacatatatataatgaaatttaagtttatataaaatgcaaacattatttaatttgcatacgagaaacccacttgcaaatttataaattatatattggatatgtatctaaaaagtaaatgcaatacacagataaataaagaattagcaacctctacaagaattttaataacgaattaatttaataataattggtgcaattatcttaatgtatgaggcgtttacttttcgtttatataaatatatatattctaaaaaaaagcttaggctgtagaaaaatatcttaataaagtgatgccaacttgaattcttgaaaactcattaatcttaaatctcaacaagaatcccattatatccaatttgactttctacataactataagatatatttatataggggtgtgcttgacaacctaaaaaaaaacaattgattgtgggcatgtttgatatgcacaaagatttgattcttttctttatttgtttttctattttttgtaatgcacgaattcattaatatattgtaattttagtttttatttttgaaagaaagatattttagtatggctaattaggatttttaccttctaaattttgatatgtaccaaattatgtctctgaatttttttggccgttaaaaattcccgttgaactattgagattgttaga

SEQ ID NO: 113515 - DNA, 7305 bp, Cannabis sativa
  modified_base (3912)..(3922): a, c, t, g, unknown or other
  modified_base (4177)..(4193): a, c, t, g, unknown or other
tttgtttgttttgatttaatttttgtttgtttaagtgtgatcttgaatctggaatttatagaggttaattcctatgtatcagagctaaatttcctataaagaggaaagataaagaccatattgagcgcatctaatgtcgaaaattataggttcacatatcatatacaacaacgatttaaaccgacttaatatgtaatatagatgtagagtattttacaagtcatcaaacatgatcaaggaacatataggcttaacaattatcgaaactgttcaagcctatttcaaattatttaagcttcttgaacggtagagtataacaacccttgaagagagtcaattcaatatatagtgtaggaagtatccttaaggtcaataggattagagcttttaaaagtttgaattttggggttattacttattgaaggcatgatggtatttggagccaaatcatcctcgtcttctccaaacacgggaccaggggaatcttcagtactaggttcttggagactcttggggaggcctaggccgtgagctacggagatctggaatcgctgaccgttgaagcactgttcaccgtcgtagtccccagagaagaagaacgttttgccttcttctacaagcggaactgctattgtgatcgaactggtagcggcggtgtttgaagcgtccatcgtggaccactggctggtgtcttcgtctgaagcgtagatgtaattgcagagtttgtatgtcgtttcgttataggtttggatcactgtgtggttggtgttagtgttgaatactgcatttttggttaaaagaattaattactaaaaagtaaactaattagctacatgcaataagattataatttcaaataatattaattactgtcttcttaaagcagaacaagattttgttatatcgacctactaagcttaaagttaataattatattccaagatagtgttttataaattattaaacgttaccaatgaaagcatacccacttaaagtttgtttggtacctcgtattatatcgtattgtaatgtataatattatattgaattgtatttcatacaatacttttatgtaaaattatatgtagtattgacttttatgggcacctaaatatataatattttagtataaattaaaatttaaaatagtgttacataaaaatatgatatataattcaattcaatacaatacaatacaatacaatacgacctaatacgacgtaccaaacgagccttagtcttttaattacggctaaaaaatattagtggtgtttagtatcctcttcggtgttatagtactcttggtataattaagcatttagtcttatataatttaaaaaagtaacttttaaaaaaataaaggaccacatataaaaagtgttaggcacattgatactcaataacaatactatataaattaaggattttctcctaaaaatattaatgaattctaagttaagcaaaaatatacatatattaatgaattcttttattattatatatatctcttttatattaaattggttatctaataaaaattattagtttaacttttttttttcaattttttattaaaataaataattaaaactaacatcgtcaaattaattaattattcatcattttttttaaaaaaaatagttttaaatatctaatttaatttatttattaatatataactttgataattatttaaaaatattaacaaaattaaataattttttttatatagatattaatttaaatttaaattagacgttaatgcaattaattaatcacacgttataataaatttattaattatattgtttaaaatatctaaacttattactatattttattgtttaataaaattagttatagatattttcttataaataaatttaaaattaaattaaatttatatacttaaaaaatataattaaattgtattagatttaattttgattattataatttaaattaataattaactaacacaactttaagcaaacataagtatgttactaatacctaatatatttaggtataaatatttgtagaatagcattttttttttttgaactcctaaaaaacaattaattaaaattactgagtaatgccaaaaaaaaaagtatagaaaaatataccaatgatagaaccaattattttgttttggaatattggaactatacaacttgtgtaacacttaaatatattaacatgcgtggcatatttttattaatccatacctttttaattattaaaatacaataaaattaatttaaaaataaaaataataattgaagaaaaatgcaaaataaaaaatatatatttttttttctcttttcattttttctactagaaaagctaaagcacgatctttgaacttttttatttataaaaatacctcttcaataaaaataataaaccattttttgattttttatagtttttttatatttgtattatagttgtcatgaggttatgtttctagttattttatagtttatttattgttgttttatagttgtcgtcacgttgatttctggttgttattttagttattttcttatttttttgctgagcaaagtgtatttttgtaattttaaaactttaaaaatgtatttttataaataaaaattttacttctaaaattgtaaataaaacataaaaatgatatttttaaaaatttcccaaaaaaaaaaaaaaccagaaacacagatgagaacccaaaccccttataccctactcaaccccggcgactgatggctaccccaaccccaaccgatggcaagcctaaacccgaatcaatggcatgcccccatccgactgaaggcaagccctaacccaaaacgcaagatctcaaaccaacgaaaagccctaatctagaactccaaaacctaaaacccgccacgaaaggatctggtgagcctatatctgagttccctaaaccccaagctcaaatatataatcccttatctaaacttgcaaacactctaaatttgagccattatctatgtctcatatctgaaattatgatcctttctttatgttggtctcttcgctgtggtcttactctctgaactcttgctctctttgtcgacgacctggatttgtttttttatttaaaggaaatgttggtcatggtggtaatagtagtatggtggtgataatggtggtggtaataatgtgatagtggtggtgataacggtagtagttgtggtgtgaaggtggtggtgataatgtggtgttgtttcacagtgactgctctaaaagcaagaagaaaaagaataagacaaaataatgaaaaaggaaaaaaaaatacttatttattctaaattaaaattaaaattttttatttttaaataattaatattgtatggaccacttgaattctgttacgtgtacattaatatacacgagtagccacttagctaagagaataacagaagtgaggtttgaagaattttaccaccaaaaaatcagtttgttggattattaagagtaacaaatagtataatttaagtagttatgttgccaatacccttttgttttgttggttttgactaggactgaacatttttactgggtttgacccgaactcgaccaacccgcccggacccgacccgactaactagaaattttttgaaaactacccgttcattgcgggtgggcagtttaaccttgtggaacttttggacgggtttcgagtttgatattttaggtgatcgggtttcgagttggacccaaacccgactgtgaacacaatttttttttaatactcttacctaaactttaaaaatagaaatttacacttacatatattggacctcaaatataataatattaattcttcttaaaaaaattattcctaaaaaaagttacataataataaaattacaatatatattagggtaaatagcggcatannnnnnnnnnnttttatgtttgtaagcggcataagtacctaatgtttgtaaaactgtaatgtttctctaattttgtccatacagactctattattgtcttaaacaggacacatataaggcctaaattcttttcatatatagtatcagttactaccaaatgttcttttaataaattcaaaacagagtttgtactgacgaaactggaagaaaatcacagatttacaaatattggttagttataccgctaaaaataaacattgagtttnnnnnnnnnnnnnnnnnaaaactttgggtacttatgctgctatttacccttatattatataccatacactatttctatgtattgaaagtttatatgtatatatatttcattatatttaatgatttagttatatgtttatatatatacttaggtaagtgtttagggtttagttatatgtttatatttaggtatgtttattcataattaggtgactctataaacccgccaactcgtaacatgtgaacgggcaggtacgggttcaatttttttactcgaaacctaccaacccaaaactcgattaacccgcccgatgttcacccctagttttgacaaaaaaattccattattgtcttatctgtcgacttagggcccgtttgacacaattttagaataacttaaagttattttttacaaaagttgtcaaaaaaagtgtttggtaagagttaaaaaatagcttattgaaaaatttatggagaagctacagctaagagctaaaattggtagcttggtacaacccaacttttagaaaaaaaatgttttgattaaaagactctataataaattattttgtaatatatttaattatttattaaatattgtaaaaatacaaaaaaaaaaaattgaggaaaaaaatatttaaaataaacaatattgaaattttttattttttattttgttttaaaaaaataatttttagatttttttattattaacaaattaaataaatctagagtttcttataaactaaaatttttctttttacaaattataaaaatataatctaaattatttttattaaatacatataaatttatactattgggaaaaataattaaaagtatataaataataaaaaatttatataatataattttttttatatatataattttaataaacttaattgtaacactattattataatagaatattaacaactttaacacttaaaactttataatttattaaatactcagttcaatttctttctagagttctattacaactattttttttatagtacaaccgtaacaaactgatcgggctaagagtataatgagatgatgctgtaaatattctaagagagagaatgtatctataaaaacaaagtccataagttgtgtgatgactcgtacacaagttggcaatgcattaggctaaggtaaggtaccacgtgaaacacagctggggttacataggatttccaaactgtttggtatgaggattgacttcatgagaataggaatgtaaaaagtataattttattagaaggtttatgtaaaatcaattttaagtttattaattttaggtgatctcaaactcttaaatgagttttgacatttaaacctctctcaattaaaacccactgaaggaaactcttacactaataaaaaccgtaaataatagagcaataaaatgaaaaagaaaatcgaatttggcattaaatttcagaattagttgactgaaatgataatacaatgtaaagaaatcggtaaagagtaaagaccataacattgagagactgaaaagactattaacaatatcaaacttagaagtataattaaaattgatatataattaattagagagaacataagaaagtataattgatatttggtatataattaattagagaaaacataagaaaatacatatattatatatgtatgatgagtacttactgagaaaatctcccaagctaaagttgttgctatcagcccatttctggtaatcaacagtaggcttttctgatttgtcataccaaccgagggagtctccaactgtgtaattcttgtaagtttctacagatcttgatgaaagaggcaaaactacaaaacagaagaagaagaagaagatggccaaggattgaagcccaaaaacgtctcttttggtgatcacttccatttctcgaatgatgcttttgatttttttttaacatataaatacagttatgtggctcaatttcagaggtgatagtgactttttatttatgtatatatactatagcatgtgccaagtgggttgtgcctaaggcacgttccacccgttttatcattaatatataatctagtattaatattaatgtaatatttccattttttttaaggaaaatgtaatgtttcttttagtaatgaattttaagccacttcgcctctatgctacttactgatcatggcacgtttcagacttcatgacttgggatatcattacttttcaaagacatttcaccatatgatattgaccgtatccttcagactccgcttaattagcctttatgcgcctgaagatcttcttatatggcatcatactactactgatctacactattaaatcggaataccaccttgcgttatactacagccccttcgccatttcaatctctctctagctggtggtctaggttttggcatctcaattgttttgaatagttaaaatttttgattggggggaatgattcataataccttgcatcttgctgccaatctccaccataggcaagttgatgattctacatgctggagatgtcaacacccttgtgagaccttaaatcattgccttctttctttgttaccatgtgaagcgaatatggtaatcagggccgtctctagccatttgtaggccttgggcgagcttcaaaataaaaggccttatttataacaattttttactatatgtatatataaaaataataaaaaatcatgaatgataaacaaacatatacattttatgaatcaaccaaaaaataaacacataaaaatttatatttttagtcttttgagatgcaaaattatttattaaataatcatagtaaaatttatttaatattttttttttcaatagacagcattgctaattcatttaatttttttttaagaaacaaatgatcttaaatgagattttataaattttagttttgaaaaattttctttatgcaatgcaattcaaagtagaaatttcaaaacattctactgagatactgagatataagtaattggaaatgaatcaattttatatatttacatatatttatatatatatatatagggacaggatttggtcccgttatgccaaaacagggaatacaatccgtgattgtactttagccgttggattaaattggggcatgat

SEQ ID NO: 113516 - DNA, 4961 bp, Cannabis sativa
  modified_base (1423)..(1435): a, c, t, g, unknown or other
  modified_base (1503)..(1522): a, c, t, g, unknown or other
  modified_base (4109)..(4112): a, c, t, g, unknown or other
aaaagaaacagtagtagtacctgtgcgtgggagagactcttaagcccaaaatataagccaactttacataaagggaattccctgttgtggcgtttttgacacaaccccttactactcccacaatctcattttcttctccgtactctgctacctgatcattatcatcatatcattattaattttgaacaataaatcatgaaaactaatctacgtttaaatatatatatacacacacacgtaccagcatgatgtgagttgggaaatgacgaacacgacaaataggatcacccattagatcagtgacaagtgaaggcttaccacggcggccacccaccaccaccgagttcacaacggccctcaagctcctccaccgccaccttatctttctccgaatcatactctcttataactactaccattactaattcctcacttgctgaattcactaccattaattaacaacacttttctataacacttactattactattactataagcttccttgttattttgcaatgttttctctccaatataaactccacaccctatatatatatacatgtaaatatatatatataagaagagagagaggtcatgatcataatctccttaattccatattattacgtggcatatgtccctaccatatggttattacgtagtactgcgtatatagccgcaagatcttctctatttatttatttatttttgacaagctatatatataaattatttaaatgttaattatatatataattaaagatatataggaaatagtatttaatttgttgggtgatgattgaccagatatattgtttcaattattgcttcagatggtagtacaagcctattcatatttatatatattttatatgtacgttaaaattaataataaaaaaagaactaaacgttaaatattaaaaggaaaaataaacaattaagctgaaaaaagtaagaaaaggtacatagtctttatcatgtgcagtgtccaacttgatatatgataactatatgatgttgatatttattatataattaataattaatttatatcattaatcataataatgcatgcttctctattattatttatctctatacatagactatatatgtagatcaacgatcgagatatagtcctcttgtaccttgttaatattatttaatgctattataaactaataataaccaactaattaattagtactacatacatgcatgcataattaacaagttaataaatttatgtataaatgtaatacatatatttaattatatatgtcatcattaataaactccttaaaaaataagttttttatttaattatttttacacttcaaaatatatatttatatatttttttgtatttttacgaaaattcagatacactacaaaattttttacttttagtcacaataannnnnnnnnnnnnaagtgaaaaaattgtgactaattttaaattattattattatggtgtgactaaaaggtccgtggctaannnnnnnnnnnnnnnnnnnnacaatttgttgtgactaaaattaaattagtgacaacttgtaattaaagactatgttttagtcacaagtaatattttgttgtgacaaaaagtcacatttaattataaaaaaattatattgtgactaaaaagttattactaaatcgtaataatctgtacatagcaattaatagagaacttaaatcgtaactaaaattaacataataattgacataaaaattaatagagcaagctaaacaataatttaaaataaaaataaaaataatatataacataatttttaaaaagatgtataagtcatcattaaacatgttatatgtgagaaagaaataaatatagatgaaaaaaatcaaattattattatcatgtgagtacttcgaaaaaggcaatgcgtactactcccatttataatgtaactataaaatatatagctagaaaccacaagtatttattatttagattttgattgtatataaagacattaaatacattaatctagctacacatttaaattataattaatattgttaattagagatattattatattgtttggattgaattgaattattggtgaaagtggtgagagagaaagagaatgaatcacgttttttgatgagagcaaaggtaataaggtatagagtagtagtggatagatataagcaagtgtgatcaaatcaaatatctcatacaatatatatctttgcatatataagattatttctccttttccaatttccaaaagactgattgcctaaatctgtgtaatcatccaacaagcctatatatctatatatatatatatatattatatcatcctatatactctatgtagctttgtcgtttatctctctctatgaaatctttatatgtatatagtcgatgtatatatcaaatgtattaaaagatgtgtcaaataaaaatatgtagctatatcatgtatttgatcataataatattgtgatttatagagaatgagattgttattgaatattaatagtatttagtatttttagatatatgtttttgcgattaatattttttaaaaattattatattaaattatataatattttatatttaattagatcaatagtgatattaatatctataataatattaaatactactggtatatatgttttaacatgtctcattataaaactatatgcatattatttgacacatcattaattgtaccttatgcatatttgatattacaatttataaacggagtgtgtgaaataatgatttatcttcttttagaaaatatattgactttgctttttctctataattgatcagcctctcatcaagagagtgatgatgataattaatcatcataattatatatgctaatgacgatgatgatgatgagtatataatatataagaaatttaattacgtagcacaattgaaaagggtgttggtagacccaactaaagaagctattcttagtgtaaaattaattacaataaaaagtttattgtaatgaaatcatagtatttaaatataaattattaccaatttaattttagtcacaacaagtattgtgactaaaaatatatttttagtcacaacaaattctgatttttgtgactaatacttttagttataatataagaatgatgatttatagttagttacaacttttcatttgtaatcacaaattttgttgggactagattttttgtagtcctatctctttcggtatgtaaaaaattattttagtctaattttttttatgatcgcgtaagttgttgctattaacgattaaatttttagaatattttgaatagtttataatattaaaaataagattcgaacaattatttatcacatatttaaattttatttttagtattataaattattcaaaaatcttttcaaaaattttaaaaattttaaatataatatacataatcataaaaaataattaaactaaaaaactctcttaaatactaaaatagatatctagaagtctaccaaaccattcattgaaaaagtgtacgtgatatatagtggcaaattataatttgggaaattggaaagttcatctaaaacttgctgattttgattttcatgagtttgtactaatgttaacatttatattctagtattgatctaggcaggttttcaaacctataaatgagaattgtaagcactctaaattttgaataaattaaaacaagggtcaatgcacacacacaaacctataaatatactattattaaatatacatgtatatatttatgtataagagtggttaaatcctcctaattattatttacttgcagttattaataagttaaaattttaacggtaaaatttttctaacaattaaattattagcaaatttaagttattatttcttgcaagcagcaagcaataatggttgccggttaactgtaatcctaaactatttatgtgtacacttttatatacgtgacatatttataatggtatacttaatattattagttaaaaaattatttcaaaattcatattaaaattaaatacaattataaaaataacaaataaaatatatttttttaaaaaaaatatttttaaaaaataaaaatattatannnnttgaaataattttttataatttttaaataatagtattaggtgtaccaatataaatgtactatgagtataatagtatacacataaacaattcacgttgactgtaaactgtaaaaaaatagatagcactttaaatttgctaacatttaaatgattttactactcaaatttaaatttaagagtaaggaaaataataatgttgagaatttaaccgtaaaaaactctttatataatagtgatgagttttgctcatagagttatgctaataggtttttttttttttattattatttatttatttttgagatagtaaggtttgatcaacattgaaaatgacacgctattactattccattcatattttattttttttgatcgctcaaactatcaattacatctcaagtttttgtacataaaccggctatttactgctataaatctagaattttacaaaattacaacttcatcaccaattcttgtccacctcctttgttttgcttggccatacccttacagttcttctcttcggttgataattatcttgattcgccattgacaattattccattcatattactatattttttttagaaagaagaattctcaatattattatttgtttcaatccaaacattaaaaaaataaaaaataaaaaatttccatttaatcttttttcttaataatttttttccaactcaataataattatatatataatttaaaagatggaaaaaaattagaactatatagcaaatgatcataattaaaattttaaattaattattaaaaatacttaataaaatcgatatatatatatatataatcagttttatttatttatacatatatata

SEQ ID NO: 113517 - DNA, 1683 bp, Cannabis sativa
tttgtttctaaaaatattttattttgattccttgtgaaaaattaagcaacttttgtttttacggaacttaatttcgataaaaaatgagagagttatggaggttaaaaaactcgagtccattgggtgtcgaaggagtgcaccacgcgcaccaggccttcggccaaggaggtgctcgcgcgcggatttttctgacatcccttgtctgaaactcgtcgtgctgctccttcaaacacgcccacgctgcagctcgcgcacgaagatgctgcacctgctgagaaaactcggcttaagaccctgcattttccctcattcgcgcgcgtttgttgttgcgtgcaaccttcctggctacaggtgcagccctcctgggcagccaacacctaaatgcgatttttgtgggatttttccccaaatttcaattttttcaattttcaaaccctaaaattaaaataaaatattattttttaaaatatttaaacttaaatatcattttttaaattaattgaaagcacgattcccctgggggaggggctctgtaattgaaacaagagcacctgcgggaaagtggacagttgtaagccagaatcctgcaggcatcacgaagttaagagatttttgcaatccttgtgtcctttgaaaggtcaaaatattttagtattgcgcttagggactcgctgctcaggacggggatctccttggtacttaggagaccaaggcaagagagcaagttagtaaaaaaaaggatgcccacaatagaacccatacgtggaaccttgaataaggaggacacgctatcaggcatcccatcagtaataaaaaagtccacgagtttgaatgagatttttaaagacatactggccacacccaaaactttgggagaggggatctttgagaaatagtaagtgtcgggggatcttggcagatgattgatgttgaaaacataatgcaagttggtggccatgggaaacggtcgttcaccgccttgaaggcaatagcaaaacacgagataatagtgtaggccaccgtggaaagttagagaggtgccagaccaaaataagccagaactttgacaaagaatgggtgaaggggaaaggttgcacccactgccatgatgtgcccgtaaaggcgacccccctaccgtgggggcagtggcagattcatcttgccccgccctacggaaaacaagaccgctcatggctcgccccttgaaggtgtcaaatattttgtggaggctgtctgccgataaagtgcttcgaatacccgagtatataaagtcgacttctgtgggtagcagtggtatatgtcgcttgagcaagtgagaggaagcatgcttgtggggcacaccaaataccactgactgtttggcaagagacatacccacagaaatgtagaaataaagatgagaacaagccacctattttctattcctcacaaatctcttgcatgttggggtcctgaccctaggtactccttgatgtgggggatgatagaggaaaatggctgttcctcccatacagggggttcaccagcccgagagcatggcaagctataatgcagggaggaagggttctgtaacaccctaactattttaggcatgttaacgtgatttttaacttattgttcagctcattgctaatcaacgagattatcgaaaatcatgacgaattaaaattttgcttatttaat

SEQ ID NO: 113518 - DNA, 2928 bp, Cannabis sativa
tcaattttactgtttcagtgattgtttatgtactaaaccatattcaccaataatcaaaaataagagtaaaagaaaaaatgttgagtgtctgcccactaaatgctctgaggcagttattgtattgtgattttttttttttatttgtcttcttaatcaaccttcagtaaccaccatcttcctccctaaattcatctttttatcattgttctagtaatccttttctactatacatcacatggattcacttgaatattctatgaattacatacttctccactttgatggagaaaattttagatttgtatcaacaatccaaaaagtagaagttcttgaaaataaagatgtaccaccatacgtgccccctgctccagtcccttagaagttgcctatggtccaagatgcttttgggtgtgtaatagcagcgatgtcgaggccaatctctgattttcatccaattaaaatggatctaaagaagaaacgatctacattatttcaagagcctatactcataaagaaatggcttaacctaccatcaagacgtctcaaatgtagaatggaggaagcaattgtgttatcgatttaagtaattggtattgcaatatacgagagaaactctatgagagatatggtggatattacattcatcattgttcagggctatactcaactacaagaaattgatgttctcacattattttatttctaaagtagctggatatgcagtttcttttgatttcattgatataaaatttcttaaaattgtttgtgtttcttttattttacaatcttgtatccaatttccttaaggcacaaatcattcatgttctttgatttgtcaatgctttttggtggatgttgattgaatttggttggagtatattactatatttccttcaattctgttatgtataatgatttatatcaatataaaagtttttatctcaaaaaaaaaaagaaaaatatcattcttaaattcttttaatatcatttcacttatacttcatcttttaagtttaaattttgatgataaatccttcaaactattatacattgttaacatatttaaggtgtatctgtttacacactcttgtacacgtgatagatttatattaatacgcctaatattattattaaaaaaattataaaatattatttcaaaaatcataacatttttatttttttttaaaatatttattttttattttcattatttaatttaattttaaaatgatggattttgaaattattttaaagtaataatattaaatgtactaatataaacgtatcacgtatataaaaataaacacacaagtaatgtagagtgacagttaaccaaataacaacttaaatttattaataattttaaaaaaaattccgccaaaatttaaacttgaaggattaagtatgatgagtacgtaatacacaagtgctcctacttttaaagcaataactcttttattgatcgatttcatgtccattattgcaatcaccaattcaccatgatctaacgatgtgtacttactattactcagaattaattaggtaacgttagaatacgagtgatataaatttactcctaacacttaatttttacttctatttcacacacacacacacaaaaaagcacttaatttatactttaatcaacatcaaataaaaaaacaggtgaaattatttaccggttcaacttcttcttgaatcccttaaaaaaaaaaaatcatcttgagtccctataaaaaaataaataaataattcttcctaaatttgatttttttttctttttttttttttttcatttggaagggatcaggatagagagatgtgccaaaataaaatagaaaaaatattaagacagaacaagtcataccacaactcaatgaatgaaaaaatcaacatagataagataaaatagagttaaaagagataatcataactttaaaagaaaaccactaatcttaagagaactatggttacaggcttagcctactagtggttttacacttttcttcgtaaagagtaggtcctaagttcgaatcttcctccctcaatgtaaaaaagaataaaaattaagacaattcataagaacacgtatcagtacaagcatttaaagaatagcaagaataacaaacagtaaaagaacgacaacgcatgcatgcattataattaaactggataatttgatcaaaggaagctcaccttttttagtcaaaacaagatgtaatgtggtaattacttatatcgattggttactcacatatatttagttttacaacctaacacaaaacattcaactacttataaatttgaacttaatcatgaaacttcattagtatatacgtatatataagcaatacaaaaaatgtatgcgtacctttttaagatgaaatatgcatataaagtacttaatttgttcaataaatcttatatcattatgttgcatgaacatttagaaagtaaaaaaaaaaaaaaatagtagaaacaagtagcatacttgttgattaatcattattgtatatattggtttataaaacatgttggtttatcactaaagcataaatattcaaagtatccgtatgtgtttgtttgattagaaaattcgaagcaattacagaatatatgtttaaataaaaagaatttaatttctaatataaatttgtttcgcttaaaaaaatcaaaatataaaatataaatttctccattattatttatttaattaaacttgaaattatgcacattttcattccaaaacaaaataaatataaaaaaaaattacatatagactaaaaattataaaaatacgtcaacatgaaattttttaattttcactcattaaagttttttatttataaaaatacctcttcagtaaaagtaataaactgttttttaattattttatagtttatttataagaataattacataaggcac

SEQ ID NO: 113519 - DNA, 2576 bp, Cannabis sativa
gttagttgtcgcccataattgctatagcaagtgttttttatatggtgtaccaatatataaggtgatattttgtaattgattaattgttctcatctttattaaaataaaatgagggactagtgctaagtaccattaatatccattaaaattcctaaattcgtgtatataaatgtacttttattattaaaaaacattgttatttgacataagtggtgcttagtattattttagacgtgttaccttgtaactagttagcgaaactctttaaaaattattatataaattatatgagacccaagatttatttactatcttattatataagcaatgcaatttccaaaattgaaacaacacatagaaatcaaatagaaagctatgtaacttttatgatctgccaacataaaatttaggccaggctaattataaatgtttagcaatgtaattccttggaaactaaacaaattaattaatgttctaacttaaattaaattaccctttagtaataatttccaccaattcattgaaatctctcctagagcttcctccatcaacaacattatcatcaactattacagcctcataagcaagcattttcataaccccaatcctctccctcattcccttcccttcttcttccaccaaaacacttctcaaagcctttaaaaagtcgtgtttcgacgcaactccttcaactccaacaccaatcccccaaacatcttcaatcgtcctcatattcatcatttggtctccaaaaaaaggacaacaaatcatcggtactcctcccacaatactttccaaaatagagttccaaccgcaatgagtcacaaaagccccgaccgaagggtgtttcaaaacctccacttgtggtgcccaagacaccaattttccatttagggtttcttcaaaaagtgttgtattattttctcctctatatgaccaaaggaaagaaaatccactttcctttagggcttctaccaatattgcgactttatcagcgtgtggaaccactaggctaccaaagctaatatagacaactgatctagggttttgccttgataaccattctaggcaattgtttgggtcatattcattattaggttttgtgttagtgagtgtgaagggtcccaagttgaggaatttgtgaaattgggttttgagatgagtagagatttgtgagtctatttggtggaaggaattgatgacaactgcattagctttggggagagtttgtgccattttgtggagcatgatatcgaagggcgattctgattttcccggtggaataattattcccaacggtaaatctgtgactcgaaatgatgaaaatccgggaagaaagtttagggtttgatgatcctctttgttatgttctgcaagtagacaacataacatgttgtaagaaatagaaaaattatttatttaggaaacatattgtaagtattgtatttggtgtaattatatttatatataaaaaagaaaaaaaatgtgagtatatgttttatattataatttatttgagtgatttgtgaaatttatatttcactttcaattttgataatcaagtaaatgattgtgttggacatgattaagttttttttttaaaaaaaatactaatatttagtagtacacatttaaattaaaaaaaaaaagtgaaaccagctagcaattatataaaaatataaaaattaaaataaaattattgaaactaataatatgaagaaaaaaacctacacaaaacaataaagaataaatttaagaaagtttatatgagaaagaaataataataattattgtttttgttatatgtgaatgaagctccttttttttttttggatatatttttaagaaacaaatcacattactctacaaataatagtaattaattacataaaagttaaattgatttattaattattactgttaatttaactaaaatttctttattctatatttcccaccaattaatctcaatatgcattgtaaatttttacgtgacattaaaattacttttacattattctcagtatattttcttagagatgatgtaattttatttttatatatttatgcgatttattttaaagatatacatacatatagtgattttttttccttttgagaaatgaatgaaaaattttgacttgaatgcataataaattaaaaaaagaaattcctatttgataatattttctacgtaaaaaaaaaaagagacaaacctggatcctcaaaacgtcgtcgtatgtgatcagtataaaaatgagaaagcaaagaccttggcccggaagtccagagcggcacccaagggatccgcctctcaccggccatttctccggcaaaccagaaaaacgcatccgaaaccaaacacccaatcttcaccccaaccaccttctccgcttccaccaatcccctctcaaaattccccgtcaccgcattcaggaacgcatccaccgtctctatcgtcggcgccgccgcagacccatctcttgtcccgtcgccgatgtcgtacggcaccaccttggaattctcctcctcctccgatgatgatgatgatgatgagaagagttgatgtcttgtaa

SEQ ID NO: 113520 - DNA, 3906 bp, Cannabis sativa
aagtctaaatggttacaaggtctaaagatttgagctcttttctcaactatatattcatcttttcattgatttttttttaatttctgaaatactattttctttacttaaattcaggttttcatctccatagctttgatacttggagatgggctctataactttctcaagatactgtttttcacagccacaagcatccataccaaaatgaagaacaagaccctcaaaacatgtaaataatactctaaaccactaactagttacagtgtccaaaatcataatagtgactagtgacacacatccactaaagggaataatatgataaataatagtaaaaagggttttgttctttcttattgtccatataaaaactttacttagtttagtaacttaactgatatgagtatctttctttcattgcagcttcaaataaacaagatgagacccttgatgatcttaaaagaaatgagttgtttgtaagagatagcattcctctttggatagcattcgttggttatggtttctttgccctcatttccatcataattatcccaataatgtttcctgagctcaaatggtactatgtggttgtagcctatgtgcttgctccttctctgagcttctgcaatgcttatggagccggtttaacagacatgaacatggcatataattatggtaaagttgctctatttgttcttgctagtctggctggaaaagagaatggtgtggttgcagggcttgttggttgtggtttgatcaagtccattgtgtccatttcttctgatttgatgcacgatttcaagacgggccatctcactctcacatctcctcggtcaatgcttgtgagccaggctattggaacagcaataggctgtgtggctgcacccgtcacatttttcctcttctacaaggcctttgatgttgggaaccccgacggtgaatacaaagcaccatacgctataatctacagaaacatggcaattctcggtgttcaaggcttttctgcattgccacagcattgtttgcaactctgttatggcttctttgcattcgctataggagctaaccttgtgagagatctttcaccgaagcatatcagtaaatgggttccccttccaatggccatggctgttcctttcttggttggtgcttactttgcgattgacatgtgtgttggaagtttggttgttttcgtgtggcacaagatgaatgataagaacgccgctctgatgattcctgctgttgcttcgggtttgatctgtggagatggtttatggattctcccctcatcaatactcgctttggccaaggttcggccgccaatatgcatgcgcttcttgacatcaaactaaaaacagaattagaattgtacttaaaagtattagaatagcttatagcttattgtagcagttcaaatggttaggcatgtggtttgtttatacaaaggtctgagattcgagtctcttttcgatatctacatagttttgatgtagtagatgtcaagtagagtattgtaaagaggaagagaagagaagagagtactcaaaatgtaaactacattgtaatgagattaattaattagatcaataaaaccccacatcttattattgcttgttttcttttcatactgagtcaactcatacaattatacaaaacccatttgcatgaagaaaaatgatcatggatcaacgtgtcaacaacaaaagagagaacacaacatagtgaaaagtggtgagttttagactatggttggttcatattcatagtattaccattcaatgaatttggtatattatagtggtcctaatgcctagaagctatatatttatataataaagtaaagtcaatgaaatttgtttggtttcagagtccacttcctggtatctcactgaaaaataagtgtgtggatttaatgaaaggaagaaaagactttaaggcatggttgaactgaacatacttacaacatttattgaaactctcacaccaaagagaatcattaaagttcatatctttatcaagtgtcagtgttttcaatatcttctccctaagaatctttaacacctcaaaatagtttgtactagaagtttactagctaatgtttatacctaagctcattcatatgttaaaaattcaatcatcttttagcatttttagatttgataagccctttatctccattataacttgccttaaacaaggtttgcgttttatagtaatttaggtacgagacaattcgtgtttatggtgggttgtattcctattgtgtcgagacttagatattacaagcaaatgcatattagatagtattatctcacaatagattaaatttaaaaatattagttcatatataagaacatgaactattacactcattatcaatagttaataagatgaaactccataatgcttatcatggtatcaaagtcaaattcctcctatatgcttaagatataaacaaacgtaagtaaataaaatttcatgcatgtctagcccattttgtggattttgatggaattttaatctaaaagttattttttacataaacctatctatgttaaaaatttaaatgtataaaaggataaattatgtcaaattaaaatataaatatattagaaaatacataaataaaattaaaaaaaaatgtaaaaaaaaattaaattaataagacattaaacaggtcaatgtcacggttcattctcgtccctatgttatttaacatttcagtacaagaaatgtttctaattagtcgtctcatcttattttccattcagataaggaatcccccaatcattagtggcaggtccacacaattgatgtagcccattagtgtgaatcaatatcatgagccaagttgtcaaacaatttttttttcctaattaaatatacttactacggtatattttatttgtattttgcataattatcaagtctagaaccaagattatattggagagttatgttgatgtcgattatgcatcaaataaagacaccatgaagtcaataaccagctattgtattagttagaaatctcagttgcaacatgtgcttaattgaggcagagttcatggtaactacaaatgctttcaaagttgtgtggatcaaaggaatcctaagtaagctacaaatgatgagaaaaaaggctacgctatactttgatagctaatttgccatttatctctgtaaaaatccaatctatcatgagcgatcaaaacatattgacattaggttgttttagatcagaaaggagattgaagatggagaagtagaacttgagaaagtactaagtgaagagaatttttcagatgcaggaactaaaattcttcgagtcagcaggttccaacattgtgtggaactgttgaacattggctccatctaaagataactagaatactcccgtgccgtttgtcttgtttggttctatgaattaaggtgaaatttattgtttggtaattcatagaacaaacaaaactggaaataactgatttaactaacaaaatgtgttaagttagttaaattctacaacattagttctgttaagttagatgaattgctacaacattcagttttagttggttaagtgcaccaattagttaagtctatttatgtctatttaaaggcatgtaatggtcttgtaattgtttattgtaaagagagaaaaatagagattttagaaatataatttaactattattactgttaaaaattaaatttaaatatttatttataattaggtggtgtttggttagagataataatatgaaatgaaatggaaaagaaataattttcattccattcatttatttggttacattttaaaatattagaatgacattattattttattttaaaaagtaaagaaagattattttaacataagagaaaaaatttaataatttttttatcaatttt

SEQ ID NO: 113521 - DNA, 894 bp, Cannabis sativa
  modified_base (843)..(850): a, c, t, g, unknown or other
ttacagtgtaattacatggtcagataaacatgccaaattgtgtaattatctctaattacacacaaatctaattatattgtggcttttcaaacgcacctataggcatataagatacatataaagaattttacatttcgtacgtagtatatatagtacatattagttcgtatttttgcacgggaatatcaccatgcacaaatactaattattttgtctatgtcctatatgctatatatcaattaattattttaagatttgattcaaacattacaaaatcaataataagcggccagtccaagacagtgtacaagtacatcttttctctatgcggctgggctcatacgaataaagatttttggttaaaaaatagtatatactagtgtattaaatcaatttaaatatgacacatcaatttatttgaaagtattttaaagaaaaacaaatatttacatggttaataatatttaaaaaaaaatagttagttaagttggcacatttagattagtttaatacattataaaacactaattttttacaaataatcttaactagcgctgaatggcatgcttttataatttatacgtaaacaagtatattatcactatttttgttcaagatatttatttatttttaagagaggtttggacattacgtttttatcaagaaactcattatgtttttatcaatagttattattgctaaaaagaaataataatgaagttaattagtttgctaactcaagagatttccacattattattattattggaaaattttataatgtaccccctcaaaaagaatacactgatccatctctctctgttttagtatctgaaataattnnnnnnnnaaattttttctcatggtcatgtagattatagttatttaagacat

SEQ ID NO: 113522 - DNA, 2051 bp, Cannabis sativa
ataataacagtataataattatttaaatagctataaataatttttcataattaaacatgattaactgctaattttcaaattaaactaagcggtctttacaaataaatttcccgagtcatgaggaatgaagaaagggaaactctacgttttccctaggtctaaataaactgaaaaatgagacatacactactacaaactacacttctattgtcagttttaaacttccacttacacttttagtgtcagtcctatgaagcgacacctattccaccgagataaaagattaaagtttcggtgtcggttataaacggacactattgagttttggtgtcagttctaaaccaacacttcaagtatacatatatgtctttttcctttagtgtcagtttagaaccaacactattgagtttttgtgttgttttataatcgacacttaaagttcctttagtgtcggtatagaaacgacactaataggatgactgtcctcatcctataaaaattacaaaaaacaaaatttacttaatctaaaaatatgtatctttattcttgttgctcaattttcagactacaataaccacaaataaaataacaaaaaataatttttatgtcaatattatcacataactgaacaaaacttttaaaaaatacacacacgtaaaataatgtataagatttgtgtagttaaactttgtaaaaagattaaaaaaaacatattttttatcattacaagataataactggctgcttttaatcctaaaaattttaatttattacacaatagaagtacctcaagttctaactaaaaatcataaaaaattatacagacactatacttagccacactataccttgcctcagttggtcaactcactcacatgaaaatatttgtttctcaatttattcttttatagcggtaaaactaaaatttagtagaaattagcgaacaagaaaatgagaaatgtatcaacaagattatgaaaaatacatttgatattactttgtatttaacacataaggtgatccaagattttaataaatactaggtatgttagattgatcaacatcatatctaaaggctattcacataaatttaaacttaaaatagaattaattcaagactattgcaattatctaagtgtcactttttatggtaaaaaactcacccttaattcacactgttaatcaactaacagtagcaagatcgatcccaaaacaaaactagtaaatttaagaaatcataaactaaaaaaagttgaacaacaactagaagatgaatttaaatgaacacatgaaaaataaacacatgaaagataacaaaacttacaaccactttattcattcatgatcatcatattacacggagagtagcttgaatctaaatgtacattttgcacgatcttgagtcccctcaattaaaagacataacgatgactttaacatccctcccaactctctcaactctaaatttctctatgcttattgtttgaaaaatagtgtacaaatgaattaaaaatcttgcacgatcagtggtgaatggctacattttatgttggatgctgaagcttgtttcgactggtttcagctccaactattttaactaacagttttgccaactaggattaggaagcaactgatgtggcagggagaaaagtgagtcaaatctaccacaaatccacctaatttgattcacttgttcactacctgatcagtattgacagagttgatcatactcttgcaatgctcaagaggttcaaacagtggataaatttgtctttagttgaactttttgtgaaaatgtcaacagggttatcatgagtacaaattttccttacctaaacctgtttttccatcactacatctttgatgaaatgtagcttgatgtcaatgtgttttgacctctcataaaacattagattcttcatgagatgtaaagcaccttggttgtcacaatggacagtaatgtcgtctgagttgaatcccaattcatttcattttaaccagatagccttcttaatgttacgaaaattctgtttattacgcaagtgtacgta

SEQ ID NO: 113523 - DNA, 3892 bp, Cannabis sativa
ataatataattccttaattattcacaatttctagttagggttttgctaatccatttcttaattctagggttttgcatggttgacgatggagcctccttcaacattcttttcaagtcaacatatgaaaagatggggctccaactcactaacttggcaccctacgatcaagtgatgcattgcttctttggccaaggcatcgctcccatcggatatatcaaattacccttcaccgttggagaaagtccagccacaagaactttgatggcacagtttatcgtaatcaacgtaccctcaactttcaatgccataggccgaccagccctaaacgacttgaaggcggtaacatccatctaccacctatgcctcaaatttctaacaaggcatgtggtaggatgattgaggggagaccaacagtctgttcgtcactggtacaacttggacttgtcaaaagctaagaaagagaagatgcccagcaagagctttgaagaagagcccaacaaagggcaataaagtttaggccaaagcgggggcacatacataaatccttaatttggggatcctggaggaagcttcagacttgcagaagagttggaagaggtggaggttgatcccactttcctaacaagaagactaaagattaggaaaggtttagcgctagaaataaaatcattattgataaaatttctaaaggcaaacctagacccctttccatggtcggaatcgacccctccatgatgacccatgcagtcaacattgatttaaacattcgacctgtttaatgaaagaggaggttgctaaacaaggagcgtgtccaagcgctcaaagatgagttcgagaggctacaagcccttaacttcataacggaggcattctatccactttgggtatccaacccagtactggtgcctaaacccaacaaaacgtggagagtatatatcgacttcaccaacctaaacaaactatgtccaaagaaaagtttgattactttaaaatttaacaagttccaagagaatgaaactctaatcttgatgccttagaaaaattggcatcacaatttgacttagaaaattgaatctagttctagtggaggtgttaagcaatccaagtatatgccaaactaaaaagcaagatgtagagatgatagatgtgagtcccacgtggatgacccctattgtcaaatacttgctaaatggagagcttccagtagacaaaaatgaggatcacaaactcttatacacaatcttgagatacacgctagttgatggtaaattttacagaagaagatattttatgtccttactgtgatgtctacttcctacaaagccaataatattgtcagagaaattcatgagggctttttcaaaaattatgtaggatggaaaagtttgtccaaaaagataatccgacagggttattattggcaaaccatcaacaaagacacccatgagttgtaaaaaaaatttgataaatgccaactgttcttgcatataccaagaatacctcccactgagctacgaatgatgacctcgccttacccatttgcaatatgggagactgacctgattgaatctttaccaatagggcaaggtcacgctaaatacgttgtaatcgcagttgacttcttcacaaagtggactaaattaaaaccttcgatgtccatcactttcaaagaagttcttaactttgtaatgaagaacatcattagaaaatttgggattcccattaaaatagtgtttgacaacgggactcagtttgatggagattaatttactaaattctgcaaaaggaataaaattattaagagcttctcgtcagtatcgagaccacaggctaatggacaagtcgaggctatttataaaaccttgaaagacactataaaaaagaagctcgatgcggctaaaggaagatgggttgatgagctaccgtaggtgctctgggcccgtagaacaacagatttaactatgacgggacatactcattttcactgcatttggctcataagtaatgttaccagtagaagtgaatattgcgatgcacatgcatgaattctacaaccaagaacaaaactaggaactacacaaaatgtccttagatcttctcgataaaaaaacacactaagtagcaaatcacaaatgtttcttatcaacatcgaatcacaagacacgtcaacaaaagattttgactcttcaaagtaggtaattgggtgttaatatgcgtgtttactaatacacaagatcctacagcagttgtatttaacctaaattgggaaggcccttatattattaaagttgttgtgggaataagagtttataaattggcatggctcagtggcacactgataaaaaacacttggaacaacaaacatttaaggccatattacaagtagcatgttcagttataattcatttctttttgtaatgtaaataagttctttattttaataaagatgttatttcaagtaatcataaagtctcaatttttttaaaattacttgggggcatatgaatatacaataactaggtttttcctagaggtatattttcaaaaataactagcctcgttagtgcctaaaaataactaggttcaataatgcctagaaaataaaaaagaattgtaaaaggaaaggtgttaaattaaagttgatctagaacaacattaagtcaaaaaattcgaacctttcttaaaaaagaaataaaagcaagacttttaagtcttcgaatcaacatcaagctaaatgtaatccaaataaataacggctcacataaagaaaaatgtactataaacgagatatcatagtgtgtcttaataaatagtacgtaagctaaaatgtgtataaaggattaacttttcacatgggcaatcaagagatattcaaaatagtttaaagtaccgctcaaaatatttaaagttttctccttaatcgatatgatagacaaatattaactacttgctcaacagatgataaaaagtgttcaaaaatattcaaatacataagaaaatttaagtttgttgcttgctcgaggtgtaaatttgagaaaaatattttgttaaagttatgtaaataaagctcatttatgaccaaaaatacataacatatttaaaatattcataactcaaacaaaattttctcataaaaaaataggaaatatatataaattaaagtagcataaaaattagaagtataattaaagcaaaattgaccatacaacaacgcaaaataaaattaattacataaaagacacaaagggccaaatattatctcggtcaaacgaccatcgttcagaaattatttaaaaactaagtctatattgtgggagacttagagggcccttcttcttcttcatcattctctgggacctcaacctctttagagtcaccaccttcctcctttttggtttgttcaaagtaagctagcattgccttggctacctcacccaaaaatcctaaatccatgtttggatttgccttccaagccttgtaaatcaaaggcttggccatcaagtcaaccctcttgcaagcatttacttgggcttcctcaagcttcttattggcctcttcaagagctttttgggcctgttggttagcctcacgaagttgctcattctcgatctttaaagccttctctgatttctctagattttcaacattcttcttttggaaagtgatcttagattgggcatcactgcattgcttaaccaaaagctcacgatggtcattagacttgtgaagctctctgataaactgattgatgttttgaagacccttttgttgagccttaaaggttaggaaggaaggttgcctaaaaatgaggtcagagaagaagtaaaaaaacaaatattcgaatttggactaaccaactgttggattttgtgccctaaataaaacccattac

SEQ ID NO: 113524 - DNA, 1273 bp, Cannabis sativa
ttttttttttttttttgttctattaaaaaacaaatctaaaaaagtgggagacttttcttcacatatatataattgcttcattaatggttacttgcactgtaaaaagcaataactaggtagaattgctttaaagattggaaactaatgtagggtataaaggtaattataaaataagattctttggggatttatatttgcactccaaaaaaatataaatacaccccatatctaattaattctccccattttaattttaaaatcttaacttttttataaaacaccccattttgttacaaaattaggccttctttaaataaaaaaattacaccccacattttttcacctttaaataaaaaaattacaccccacattttttcacctccctctcctaattaacctctctccctcctaatctatacctgttacaactttcaaaaaaacaagaaaataaatctattcctgttacccattttctgatctcacatagtatagtatgtagaattttatacggtacacaaaacaaaatccatgtgaatacatttatgtatacatttttaaaactcaattatatatattaaaacggtgacatctacaatgtatttgattctagaaaaatatcaaaccccatcaccaatcagagaaaaaaatttgaaagctattaactaaatggattcatggtatataaaatcatatacatagaccaaaataactaattatataatttacttttctattaaatgattaatgtatggatgtacttattaaaaaaagaatgattttataaaaaattaatttcaaattatctaattttgtcatctcaaataatgataaaaatgtattaaaatttttggagtgtacttaataatattaggggtgtaaatataactcccccattcttttcacagttcattttcaaaagaaaaaacgtggagctgaatcattgtttttttttttttttttggaaatgtgaatcattgctatttattaaaaaaatgaattaatattttttaattaataaagtgccaacttattattaaattttctctactagttaactttgttttagttgtagcattattttctcacttaataattaattttattttacttatttattattgctttacacgtgacatgtaaaatgaattagtatttgccactaaatattcctcacttaaactttatttatgaatatatatatatactagtatattgttacgtgcgatgcacgtatgctatattttatattaagtattatattatgagttcggaa

SEQ ID NO: 113525 - DNA, 4690 bp, Cannabis sativa
  modified_base (4617)..(4632): a, c, t, g, unknown or other
ctctctctctctctctctcatggtatcaaaagaaaaattgcccaccgctttcatggaaagaccttccacatgttcttaagatggtgttcctccatcatcacctaaacctactcagtttaagcctactcccgatgtcactttcgctctaattcctccaacgtcagtagctcctcgacatccccacacttctaggtcacgatctcagatcggatctgacacttttgctcctccttcgtcccctacagatgttgatcttaccacaaatgcatcacgcaaatctcaagatcgtcttgctcacgaagatgtgtctagccctttcttccttagctctagtgatcaccctgacctcatcctagttttctcaatcctcaatggtgtgaattatcaatcttggaagcgcaacataacaatggtcttgctgcaaagaacaagaaatccttcatcgttagatctcttccttgacgtgctgctgataattctctcctaaactcttggcttcgttgcaataatatggtcatgtcctgactcgttaattttgtctcgactaagatcgctcaaagtattatgtacttcgatcttactactgatatgtggcatgatcttgctaaaagatttaatgaggaaaacggtcttcgcatctttcaactgcgaactcaactcactcgtttgcaacaaggtgataattctgtcacctcatattttagaaaattgaaatcgctataggatgcattgaaagaatttcaacccaacacaacctgtgcttgcggtgccatgaaaatgtttctagattactacaaccagaatcaagttttacgattcttgactggtttaaatgagtcgtatacatctgtttgagctcaaaccttgctcaatgaacctatcactaacctatctagagtgttttctatgattgttcaagaggagcatcaaagaactcttggatcttcagaggtgtctacattggcctcttctgtgcgtccgtcctcttctgctaatcatttgcgtgccaagaaaccatcatccttcttgctcaaattttggaaaaccagaacatttttttgacaatgcttcttcatccacggatttaccctagctatagagacaagaaaaaacaagaaaaggaaaattcaatgctcattaagcctcaaccagcatcacttctgatgatgcatctgacaccaatatcagctttgatttgtctattcaatgtcagcacttgatttcacttctcaactaataattaaatcataatgcttctcgttcagattctgttgtgcctcctgctactttaaacatgtccggtaacaatcttcttacttcttttaggtcttagattgttgatagtggtgccacgcaccacatgtgttctcatatattatgcttgacttctttctctaataatctatttcataaacatgtcactttaccaaatgacacttacattccattcatgccattgaagctgtccaaatcaatcctttactgatactttacaatgtactatatgtcttaagtttcaggatcaatcttttttcatttattgggtatgttaacagcactgcttatttagttttctttagacctgactcatgtgttctccaggcacattatcaaaatgtggtgactaggataggtaaatggcatgaaataatttacctgctacatcaagaacatgttggtattgttaattcaagtcaatattttttacattttactcaaaataatgtagaccaatggcacaatcgcccaggtcacctatacatttccaatggatttaataaaaaagattaacccctatttttctgttacatcagatcctcattgttctatttgtcatttagcaaaacaaaagagactttcattcatttctaataataaattttccaataacatatttgatttaatttacatggacatattgggacccttccatatagtcaatattgaagaatacaagtattttctcactatagtggatgacaaatctcaatttacttggacctatatcctaaaaactaaaactgaagcacaaacaataataccacaattttataacatggtttctactcaatattctacctctatcaaagtttcagttttgataatgctaaagaattaaatatacactcttttcttgcctccaaaggcattactcattaccactcatctgtgaaacgcccacaataaaatttagtggttaaaagaaaacaccaacacatactcaatgtggctagagctttatgttttcaatcccacttacccttggtatactggtcttacataatgaagactgccacttacttacacaacaaaacaccctctgcattattcaaaagcctcactacatataagatccttcacaataaaactccaacctatgaacacttgaggatttttggatgcctagattatggatctacaagtctcgaaaagacataagttttccccctgcagtcgtgcttccatcttcattggctacccaccaggcatggatgcctatactttattggacactgaaaccaatcagatctacacctctcgagatgtttttttctacgaataacgtatcctttttttgacacatctccaatagacatagacctgtgtcttcttcaagtcatacttacatgcaatacaccaataaaacacacctcatcaccacaacaggctgctgctactacttttccttcgaatagaactggtatgccataaccaaaccatctcatttaaaatattatctatgccatacatcttccacgactcaccccattgagccttttctctcatacattgaacttagcccttaattcagagtaattgttctagcagcatactctaaaattgaaccctaaacctatgatgaagcatcacaattttaaacttggttacaggccatggataccgagacacaagcctctagattgttaccaagttacccctacggaaaagtgtcattgggtgcaaatgagtttataaagtcaaatacaaataacatgggaaagtagatagcttcaaagctcgcctattaaccaaaggctacaatcaaaggcaagagattgactactcccaaacgtatgtcttagtcgcttagttcaatacattaaaataatttcttgcccttgctgcaatgaacagttggaatgtccatcaattagacattaacaacgcctttctccatggggatcttcatggagaagtttacatgaaaatatcccttgtatacaaagctcctcccaactcagtttatcaattaaaaagagcatatatggcctcaaacaggcttctcaatagtagtacgataaacttagcatcacattattaacaaaaggtttttctcaatctctacttgacaattccttattcatcaaacgaaccaccaccatattttttattgtcctcatctgtgcggatgacattgttgtggctagcaacaatgatcatgccatatctcacttcaagaaatctctagatattaaattcaacctcaaagacattagttcccttcggttcttccttggacttgaaattggtcacaccaaataggaaatctcaatttctcaacgaccttttaccctttaattattaaataatcacacatgttacttatgagctaaactaacctccacacatatggaattcaactccaaattaagcaaagacaaaggatacattctccttgatccaactgcttatcagagcttgactggaaaactcatttatttgacgataacgagaccagatatatcatatgttgtcaatcacttaagccaatttttacaatcttctcaagtaccacaccttcaagccacacataggctcttgcaatatctcaaacgcactcctgaacaatgcttattttttcctgtcactacttctccaacagtatctacatatgcagaaatcagtctctccccatcaaattttctagtgtccttctttgctgatgtagattggagaagttaccaagacaccagccactctatttcaggctattgtgtgttccttggtcaatcaattgtttcctgaaaatctaaaaaacaacaggttctttcccgtttttctgttgaagtcaagtatcgcgccatagcaaacgccacatctgatgttacttgggtcattgcactcctcaaagactttgacatttctcacattatcctgtgtatctctactgcgacaatattgctgcaaatcacattagtgagaatctagtgtaccatgaacgaaccaaatacgtcaagatagattggcacttcatttgggaaaaaaatcagcaagggacaagggacacacaagctcctccatgtccgatctcaacaaaacttagttgatatttatactagagctttactttcattacccttttcaaacattgtctctaagttagtgtaattaatatttacattccacttcaagggaggctattaagattaggtagttaattattttagttatccttcagttaaagtttgctgtcgattagttaattacgttctttaactaactcagctcatctctcctctttatctatatattggtaatcactataatttcatttttgaatcaatgagttaataatcttctctctctctttttctttgttgtggacattgtcccacnnnnnnnnnnnnnnnnagaattgagccatatataagaacatgagctactccactcattgccaattggttttgag

SEQ ID NO: 113526 - DNA, 623 bp, Cannabis sativa
tacatgatctggatcaggtcggatcataaccggatcagattcgacccgacccatttacactcctattaaaaatagagatttaatctttgaaaaagatgtatttccttgtgttactaatgatgtttctagtgtaggaacaattttaccaactaatagtgcatgtaccatagtaggctatcactccaatacacatcatacaactaatcaaacataagcaccaaacactgattagatggaactcgatactcaggaccaaataaaatagactgatccacttcagaatgatcccatgaaagatgactacaatcaagtggaacctaatatagaagaacaaccaataactgaaacacttgatgattaccaaatcagaggagacagggccaaaaggattcctaagcctaatcaaaagttcatgctgaatgtatgggaagaagtcttagcttatgcctacctaggtgtctcaggattggctgaacttggaacatgtgatgaagcagttaaagaaaagaaagctaagaaatgaattagggaaattgatgaggaaatgatgtccaagacctagataatggtactcaaacctaagggaataagtgtaacgccctaatgctaaggcacgctacagt

SEQ ID NO: 113527 - DNA, 5827 bp, Cannabis sativa
  modified_base (190)..(192): a, c, t, g, unknown or other
attcaaaggctttgtgggaaagattttgtttacaagatgaaattgaatgagtacaatttaaaagaagggcttgagaattttactgtgtcaaaaatgtttgacccggatgaaaaattagaacaagagcatgaattaaagaatgaaaaaacaaccaaaaaaatcaagtacattctgaaaataacatatcaannnatttagaagactctgatgaagattattgtgatactcacaacagaaaaagaagaacaaaccgaataactctcgatgatgatgaaaataataatagctaaatagtgttattagttactagatataatctttagagttagttattattattttttataaatttttatttttagtgttattagttaccttatataatctttagtgttagttatttttttatataaacttttatttttagtattaacttttttattataattttatctatttttagtatttttctttttgtgtttttatctatttttttatgattttaattttttctcatgtataaattacagacattttgaaccaataaaattaatttttaaagaggaatttgtaagtccattcttccgttattcaaccccgttacccccttatgtgtattgatccaactcaactcaattatccaacgtggcaactcaaatatcctagtgaaaaaatcttagttttgttttttaaaaataaaatcataataataaaataaaaactatcgaactaaacaaaaaaaatcaaaacaaaattaattttttttaaatatagaacagattttgtttttgttttttattttattattatgatttttaaaataaaatttatttaccacttggataattaggctgagctgtatcaatacagataggaggatggtacggtgagacaatgtataccaatattagtttttttaaagagaacatcagttcattagacttaaccaaacaacataggattgacagggggcaatccttcccctaaacaacacaagtccattacattcccagttctagcacgaaacgctagatcatttactcccgtgatacaatcacgtttcgcgaaacagaaaaaacactgatcaaaagacttcaccaatttcagtatattcgagaacccagctgcaagtttccaatcaggtaaccgactgttgttgagtgcattcacagccaccaaacaatcagagaacaacgtgactgaattccatccctgtccagccacccactgcaaagccatagcaatggctttgagttcaacatccaacgcagaaatgccctccgaactcctgcaaacatagttccacgccgaggtattcctctctatcccaacagcagctaagcaacaacacccatctttgaacgatccatcagtgaccaaaatctttgaattgaagggggccctatgcaggaattgaatagcctgctgagggacttttgttgcaaccaaggaagtgatcccataaaactcctcaaacctttttctcacctccaccaggaggctcaaactgtcacgacacttaccaccaaacaatcttgaattcctgaatttccaaatagtgtcccaaattacataaccatacacgagtaatctcgaagcttcctcctccgacagattacaacacatgtcttggatccgagccagcacattccccccttgaagtccctcaattctgagtggtataggggcaccaaaccaaactgaacgagtaagactgcactcaaagaaaatgtgcaatgaactctcagctgcacaattacacaagaggcaccagttctcatccactctcccaagcttgtctctagttggcaatacatcactacacattctccaaaggaatagacccgctctcagatgaatcctactcgaccaaataagtttccacaccttttgcgcttcaccaaacctgtgctcaaggtccgcccaatatgcctccttggccgaaaaacaacccgacggggttcttttcacaccagtctatcttttccaagatctcccacaatctctattgaagtaatctgcatccccagactatccccaaaaagataacacacataccgctgattccacaccccttgagactgtaagaaaagatcagacacagtcctcagtgtaggagccttgacacggatttcttccatggtctttcggaactcctcgtatcctagccacgggatccatggctgccaccaaatgttcgtgtcattcccgttagcaatgatagtacaagttccctcaagaatgatttttctagtatctaagatactttgccaaatacttgggtcaccttgcttcttttccaccacccaaaaggtttcccaagaacaaaacttttgtcgaaaaatcttcacccaaagcttatccgcattactcgccatgtcccaggctaatttagccacaagggccttgtttatatcttcaaactttcaatatcccagccccccacgttgcttcggctgacatagggactcccatctagtagctgcaaaataatggttcttctgtaaccctcccgtccaccaaaaccttctcaccatggcgtcgatcttcctacagatctttttaggaatctgaaatgtcgacaaagagtagacaggcacagcaagggcgacagagtttatagcagccaatctgccagcatgcgagagagtctttaatctccacccttctagtttatttttttagcctttccacgataaaagagaaatcgttgcttctatttcttgaaagggccatgggattacccaagtagaaaccaccaaagttcgatctaggcatctgaaggacattctcaatatccctcttttttccactagagcacccaactgagaacaatatagaggatttgttcttactacaaagctgtcccgaccaagcatacttgtggatacactcttgcacacacaaagccgccttcatattagcgcggacacaaatcatattgtcatcggcgaacatgagatgagaaataggagtggagcccctagcaatagagatgcctttgatttcgcctttgtcctcgaccctcaaaagtaaccaagagagaacatcatgacacaaaaggaacaagaagggagataggggatctccttgtcgcagacccctcgagggacgacatttcttgagaggcttcccattgggaaggaccgcataagaagtgctggtaacacaaatcattagtctcttgacagtatcctccaaaaagccatgggcactcaaaatgacacggagaaactcccattcaatccgatcataggctttatgcatatccattttaatggccataagaacccctttgcttttatttctcctcacagtcccgatcacctcctgtcccaataaagttgaatcggcaatccaacgccccagaatgaaagtcgattggaaaggcgagataatcctctccagaatccctttaatcctttgagataggatgcgagaaatgatcttatagacaaagctgcataagctaattggtcggaataactccaccctttccgcattcagaaccttaggaattagacaaatgtagttaaaattgaggtcctcatccaaggctcctatccgaaagaactcctgaacacaatctgtcactttctttcccaccatgtcccaacagttcctaaagaaagtccctgacataccatccggtccaggggctttaaggggatgcatctggaacacttgagtcttgacttcatcagccgatggaatggcacacaagtagaagttttcttcagtggtaactgaaggagaaatccagccttccaaacccgcatggatgcaaggcctagaagattcgaacaaattgcagaaaaactcattgagaataaaacctttatctcgctcattttctcttcttttgttctccccatcataaagagctcagatatggtttcttttccttcgcaccatagtagaagcatggaaaaacttactattctggtccccatgcagaagccacaactctcttcatctctatttccaaaccaattcacttctcatcaattcctcggatataagatttcttatcttttgttcctcttcaaaatgagagtccatattatccatggattgaatcctagaaagcctatcttccagcatcttgagattggcctcattatctgtgaacgatttcttcctccacacttggagggcatttttagtgatcgtcagctgttgcagcaggcttataggacccctcctttgctctcccttcagccaagcatccttaattactttgaagcatgactgctccctgaaccaagcttcgtaaaaacagaacacacgggagcccttaccctttctcgtatccgtatccagaataacaggcccatggtcagaagccaaaataggaaaattctgggcacccccatgaggacacaccgtaagccagttagcgtgaacaataactctgtcaatacgttcacggatcaaactaccgttgaacctcttgtttttccatgtaaacttgcatcccttaaaacccaagtccacctctctagtataatcaagaaaagactgtaggatttctccatccctgtccaagaaacgtctcccaccaaccttatcttctttgttcaggatcacatttaagtcacctataaccgcccatggctcatcccaatttttcaaataattagtaaactcttcccagaaccaacctttctcactatcatagggaggcccatacaccgcaaaaagaccagaatcgttgacattgaggttcccacacccggcattcaaaggtcgacttgtgaacttttaggatactcatagagacatcacttctccataatatacagaaacctccaaccgtcgcatccgagggaatgtactctcccctatcaaaacccacatcccttctcaccaaatcaatttgatccctaccaatttttgtttccataagaaaaagataatcaacacgatacttacttgtccaagccttgatggcttgcactgcctcggcccgagctagacctcggcagttccaggaaaggacaatcattgggataggagggcatggtaagggccgcctcctcgcccatatgaaaatcttgttgaaactcattttcgaccaccaccttgccgctgtcacttccatcacattccttgccacgttccattgtaataccatcttcccctccgtgaataggattctcctggacagtctttcttggtctccctctcttctttgaggatgaagactgagtctttttattcttctttcctgtttggttactcgcatcacttttgccaattgaaaaaaccagagttcccacaggggggtgtcgttcccacattcgtattacacaagagggcatctggaattggttgacctgaagcatcgacagggatgaaatgaatcgaagctttcctttttttctgacccgacccaagcacggcatgggcttgtagtccgttttcatcacataaaaaggcccgttctttgacacatgtgctttctacttcactctcaagaacatgggccacattctcctccaggcccagcccaacgttccatttgattggcacaagttcaaggtaaaggtgtggggtcctggacttacaaacattttggtgtggttgatccatcatttgggcagaagtaggcccaacatttggcattaacgtaagaatgacctcctcatctcttggattcttttccaaattagccatagggtggtccccagtgatggtacgagaatgagtctccaacgtccctgtaatgacctctttagtaaattggattagaaaaggcaattagcactaatttctgttattttatgaaattaattatttagcttatatgtgaaatatgttattt

SEQ ID NO: 113528 - DNA, 2497 bp, Cannabis sativa
  modified_base (62)..(77): a, c, t, g, unknown or other
  modified_base (2453)..(2465): a, c, t, g, unknown or other
aaaatgtataattttaaaagaggaaaaaaaaatttgggcccctgggctgggtgggccctagnnnnnnnnnnnnnnnncctatgcccagggccgggcctggacgcatgtatgactgttctatacacaaagctacgtactatcaatgaagagacaggtgaacacacttacaatcgggacattgagattcctctgccctttgcagatgctatacaacaatgtggtcgttttacaacaacaaatatgccaaccaactacattatgatcccaaccataccagaaaatgtggagaacgaaggctgaaaagagaagaactggcagccattcaagtatgagaggattatgtcagttttaaaggaattgggcgtcccgcttcgaagcgttgatacccgtgatcgaaatggctcggcttggtggacttatcgccttgaagaaaacaatggcactgtcgatttccactgtattgttccattcctccattactcaaatcacactgcaatacaggctctcctgtttctggttaaagacaaggaaggcaaagtgttaccgattctgaagcatcttagtgatgacaaagactacggctgcagattgcagaagatatggaatggttctgctctgcgtgcattttcagcactctgtcatgcaccaactgaagagtggaactttccattttaaacattgctattattttgagttttatggtttgtaacgaacaatttaaactcttatctttaattatgaattttaatcatcacttttaatttggtaaatactattttggatcatgtgttttaattagctaaatactattttggatcctgtgttttgttaaatgacaaaataaacattgtatttttcaaaattatacaaataggattctgaactgatttttggtcaaaataaaacttaataataatctgatctaacactcaaaaaataataataataataataatatgatctagagatgttattataaaattggttacatttcctgtatttgttcgtgttagaaattatcttcaaaataattatattaaaaaataaaactgctgtaaattgagttcaggatcctatttttactattttaaaaaatataagatctattttattatttaacaaaacagaggtccaattggaagctttcacaaaacacatggtttaaaatgactgtcaaagaagtagagatactccccccactttcgcaaactgattgtggattaagtgaagtgcttttggaatataattcccatattagggattggtttggtgagatagctgagaaggttagccttatccaacaacttcagccagccttcatgttacaaaaaacaaaataactacttttgattttagaaactaacaacttttgttgtttctcacaaaaacacaacttcttttttgttgtcttcgagggaaaaagaaagtaaggctttaactttccatcaactgttacattttgtgttgtaataccttgacatggtatgatggtattttgaaatgtccatatgatttaagattataataaaaattttgggattatcttaatcaaaacacaacaattctatgttatttctctctctctaaattgttacatgctatcagaagcttctcccattcatgaatggagccttcatcaactttcaatggcaccttctcaagactgaatcaacctcaagtaccactaccaaaattgtatcctatttctttttcacactcacaatccattaaacttaatgatcacaactttctcccatggcgacatcaagttcttacctcctttaaagatagtcgtctctttaaataccttgattctactcaaattctcttaaaatttctcactcaagatgaaaaaactaatactttgaaccttgcatatgaggattaaaaaacaacaagataatttacttatctcgtggctactctcatctatgtttgaaaaaatcataaatcacatgattgactcagacaccatagttaaaatttggtaatctttcagtgagtactacattgctctcaatgctgctaatatcggccagcacaaaactcagttgcaaaacaccaagatgactagatctttgaacgactaactcctcatagatcaaaggtcttgttgatctcatagcaactatcgatcacaagcaaattctggaggatcatattcaagccatctttaacagtcttcccgctgaatatgatgtattcatcacctctatcacgacaagaaaggatgagtactttgttgcagaaatgaaggcccttcttatggcttaatcattgtggcatataataagagagagtctatttatgcataagtcaattattttgtgtttttgagatccattttatgaatcttatctttgggtgtgacctcgtagactagtaatgtaacatccctgcttgaagcctccattggacccttacacctacggaatgaatgactcttatacacnnnnnnnnnnnnntggctgcttcatggactgacgattgaccctac

SEQ ID NO: 113529 - DNA, 3528 bp, Cannabis sativa
ttgcattaaattatataaaattggatacttaattctactacaataacaatgttataacttaagttgtactagagatacctttttaacatttgtggaataaaaaagaaggaaaagcaggaggtatagtcggaggtgtccatgcattatttataagttgcatgtgaatacaaacatgttactagtcgataaggatttcctacgatttcattgtactacggatcagtggagctttgggtgaaggaataataaaggcctgtcccttcaattttcacttttttcaaaatgacataacaccttttctcaacatttgcccccacttgacatggcattataagattcttcctttcattttcattttcatgttcaaaattttcaattcatacagtatatatatatatatatgtccctggcacagtgtagcagatatatatatatatgcacacgtacaaagacagttgatacatgtatatatatatactatgagacttaatcttgaaataattgatgcatattattacgtctatatatatatatatactcacagtatgatctgtattcaaagcatgctccatagttactacactcgatctgaggtatagtatacatggacccaaatatttgtaatgtatgcattatataagaacaagaaaaaaaaaatatttactaaaggttatacctgcagacaagtcactttattttatgtgtacgattctcaagctaattaaggcatttatgtcattagaaaaaaaaggtgaagaaggcataataatgtcaattataaatgcttcagaaaagagatagctagtatactttgatatgattttttaggaactatttcattaacacattaattttattaccaaatcattatttttcccaaactctgtctcacaaacccaaagtttgattggatttgggctaggctaagaatttggtccctttcttagtttgccttttttcactctcaaaattaatctaattactcgacaatttcgatctatattaattaataaggttttctaaaacttctgagttctttaacaactcagagaacttaatacaccaccaaaggtagcttaaagatcctaaatttggtgacaaaaacaacaaataattctagtaatttttgctaatgggctctctttcctttgacagaggaaaaccggcaaggtttttaattatagatcatttactttgaccatttgctttccctatcttacgtactcttcttactatgtaaacttaataattacactaaatactctatcaattctaaccctcacagtcacacttatatatgccttaatatgcaatacatatacgaatattatacatagacatagacatataactaagagctaactttgcatgcttggatatttatgacattaataattgctataaagtccataacggtattattatagtactgataatttatgtaaacatcatacatatttatatatatatatatatataaataaatgtgtgtacatactatatttctctgctcatcgaaccctgttgcccccttcatgagtaatatatgtaagaaaaacagtcatcgagattgtgagtagtagtactacacacttttcagcccataacacacacaaatatctactagatgataaaaaagtttcaggtcattgtgaacactgcatctcttaacccaaattttaatattacatatatatgtaattattaatggtgtagcctgatctaattcaaaaatgggtttatcaatttctttcaagatatatatatatatatatatatatatatataggtataaaggaaaaataaaaaatgtggaaagaaataaaaataaatatctaaataaataaatcttacatatacctttatttatacctagctagttctagttttagttctagaagtaacagttagtactagccaggagtaaaagtttatttgtgctctcattcagtaagagaaatagttccccaaatgaacaaagtactaactctttgctgtgatcaatattctccattggtactattctatgtatacaatatacacatatatatatcacatttatatataaatatatgtatggatattctacttattatcagcagaatcataataatgtccgtactaagtgtatgagaaattaaaagccgtacacaaagttgaactatagaaaccaataatcattatcttcacatgtatggtatcaatcattatatagcccatatatataattgagaaatgaaaatataaacttgattcctgacacacaagagcttatattaataagtttatataagaagaaattaataagtgggtggacactggtactatttttcttgggataaaggagggaaaatgaaaatttgaaaagaaaaacaaaactcttatccattatgaatgaatgcatatacttgtatatgagaaatgctaagggtatggttataatgttattggtacaattttttttctgctatatctttgggaaattactaacacttacgagggtgccttaaaataaaataagaatcccatatatatataccattaattactgtcacttaaaacaatatattattacttgtaattaatcgctacctggaattaatggcagtatatatacctttgttgaaaagggcaatatatacatctcgaatttagcttagtaagctacaagacagaaaaaactgtaattataatcgataaattaaccccatgagatctaaatcctataaattaaccttatgatcatataattataaactctaattggaaattaattaaaaaattatactaacagaaaaccatatataggtatgtaaaactcgaataattaatgagagagaaagcacatatatatatatataggttttacctgagacggtgactatgtgaagcatggatgattattctgtctgtctttatagctttgggtttgggtttggagcagtgatttgacgtcgtcgttttgtatatatctatagtcatatagttgctgatgcagcatcatcaagattctcaggggatcagatataccgtcttacttattaggtttatgaaaacaccaatattgtcactttgtgaatcttgatgatgatgcacctgcaaataatgacttctttttttgcttaatttcgacaaatatatatttattatgtaaaacttcgatcgaatagagacttacacagattccacgaggaaaatatttcagataaacgatgattttaaaatatatattatttaatatatatatatatatattaaaaggacacaccaattactggtgtggaagttgtaaccctaataaaatatagaaaaaatagataaaataaaaataaatatagataatggtggcggagatggatgggagtagtgatggggcaacgacttttgaaattaaaacctaaaagccaagaagataagctacaggtgtgggtgtgggtgtgggtgtgggtctactgctacttctaattaggccatagatcgtccccccatcttcgatggattcatagagattttttttaaaaaaaaaaa

SEQ ID NO: 113530 - DNA, 1845 bp, Cannabis sativa
acctcttacacacatcatacatgaaaggtgatgtcactatctcactcaaaattttctctttttttttttatttttttttattttcagttttgattttgaattggatactcatgatcatattcaatttctccacacgatttcaacctcgatcattccatcatctcaacttcttccccacgatttctattctatttttttttcttcttctacaattttctatataatggcaataactcccttatcatcttctccatcccctgctaaaaaaaatacttgttaaatatcctaaagctccagacatgggtgtcaaatcggttggaaaaaaaagaaaaggaaaaagaaagttagatgaagatgattttgttgcgcccttacctaaatagaggaaggcttctggtaataagaaatttaaaagcgtttaatttctgatggtaaaaaggaaaaaaaacaagctgctcatttgattgagatttgtttcaagtgtttttttttttagtttctactctaattttgtctctatcacttttggatgttgttaatgtattttgatacacgttgtttcttagtctcttttaggtttgatttgttatttcgatcgtttcaggttcatttgtattgctcattagttggttttaggatttcttttggtttctcaacttcggaatcaattttcgcttgttaaccttttctgggtgttgctgttatttgtgattttatgttttaaaatcagtttttgcatattttattttctttataagctgggttttgtgtatatatgtatataaaggtataactaccatatgatttagtatttcatatgtaaatttttaatggttatgttaatttatcgttgtttattagttattttgtagttttttattatatctttaatgttgtattttagttgtttataaattttacttgtctgactatttttaggtccgagtgttattctacttggacttatagtgttattgaaaatattatgaaaagtaatggggatgtgatgaaaatattttgtgccactcaattcggtccttttttgaatatttaagagtacaaattctatcctcaagttgttcatagccttttgttaaataaagcaggacaatcccaaagaagtgattgttgcagttattgttcagcttttgtcatgattttttagttgttatgaaccaagatgttaaaacttgtgtttattttatagttttattactttttcttgtttaagaacatattgtcaaaaaaaaaaaaaaatagtgtaacaacaaactatttgaaactttacattaacatgtcaaataaggtgttttaataatacgttatgattttgtttatatttatcatatgtgatacaactttaaatcatctgttgtgcaaccattgaaaaagaaaagaagacaatgtaatataactatttagaactttgcattaacatgtcacatatgatgtctcatatgcattactagtaaaggtaaagttttgtctattgcttggttatggtatgtcttccgggtgtgacatttttggccacatttattgcatctattcatgcctttaatcaaagcaagagcatgagcacatgtcattctctctttttaatttatgttgcaattacatgttttatctttcaagttcgtaacacttcaaacaattttttatttataagcttaccaatgtgtttgactataataattaaatattaaatgtaaataaaatcaaaacaacgataacaaacttgtataacaactaaaatgataataagacagaaatttacaatcatattctcgctctctctctctatttcgtcgtcgtttgtgtatatggagccatggctgcctgcgg

SEQ ID NO: 113531 - DNA, 4860 bp, Cannabis sativa
taatatatttttatttttttaaatgtaattatttgaatattagaaactaacaataataattatataaaaaaaaagtgaagaacggtttggatgggttaacccgatcaaatcgacaaaatcattagaggggtgaactttttctaatttttaattgggcgggttgcaaataaatatttacaacccgatatttatattgggttagtaaaatatgctataacccgaccaaactgatcgatgtacaccctattttgtagtaggacagtaggacactgcaaagtgcactttagcatttttctaaatttttacatcttgttatcccaaaattcgtactaatgacgtgacacttggtaatctaacacgtggcaaggaagttgaccctaggctgagtatgacaccaatattctaccgaccagaccagatgatgacgaatggctgaccagaggcattcactgaagatatgtccagatatattctttaactgtttccacaataataagccaattagtatccctattttcatgaatttgatttaatagatagagaaaatcgtgaaattcatatttaaatccttatcaatttatctcgtattttttgggtaacttatgtatttatttttctctataaacaatgaggccaattcactattcatggaccctttttttatgcacttggagaggaaaacactttgaaaatattagtaacattttttgagaaatattaagaaactcagctggttgaacttgtgatcttgatatacttttataaaaacaatacaacaaaaaatggagtaggatactaccggaataagaggtcgaacctccataaattcttatcgcttcatctagacttggtgtcattggctagaagcgagatcaatattttggtgctcttattgagagcctggaatatcatcctgctctcatcaacccttgattttcaatccacacttaaatcagcgagcaatggttttgatagggagatcctcatcaattgaaccaccttttccgatggcgacaaattctaatgtccaggcaccagctaacttaggattgaacaaccccaacgctagactgcctaatcaaaacaactcaaccgtgggaacaagagtggaggtacagtccctgtagggactaacaacataaccgttgggtcactacccctaccactgaatttacgcctggtgttcaagagactagaatgaccaaaacttaatacactagagttactggacctaacactgacctgccatctgaaggagagccctaagtagatctaggggacaatcttgagtccgagaacctgagagatgcactaggacaagtccagacgcataccaacacactccaccactactaggaagaaacgtccatcgttttcaaccatgcgttagaatggatggacgatcaggctcaatccatgtgtgtcagcaagaggaaataaatcgctgctccagggaagctactaaactgattagaagtttacccaataaactagggggtaaagacaggaggtcgaactgcccagatgagacgttaacaagggaagagatccctacatcctgagcagaggaccagaatattggctagaggaacgccaaccaactatgtaccttctagttcaagaccacagggtcaaaccatcagccgccccatggatgatcaagtttttcctggtcactacctcaggaggaacgactagactaacttctaacccagacatgagggaaggagagaagatgtatctccttggctagttgggggatcccagagataggtggcttgtataatcaggatagaaatgtctaggttcatgatcaaaactaatatgtcgaacaacaacatggagcagaccgttcaaggtctcagagtggacaatcataccttagtaggaatgatgaccgagctaacagtagtccccgtaacgataatcgaaggcgtgactactgtcaagataacttgcctaatgatggaaattagggtaacacccagaacgatgaagatccccccatgctagcaaggtccaccagccaaaactctatcaggaggcctaagactgactcagttttccaaagaatgggacctagacttgggaatgacctttgggatgatttgaaccaaagaagaggcaaccaggatggacattctgtctcttgacacaataatcaaccgatcaatgtggaaaattatgtaccacataatagagacaacttcatacccttcgaagtttaaaggggccaacaggtgacatagttagttaacaggcatgccaagttgatccaggggtgctagctcaattggatcagcttaagaatctaatacaaaaactagcccacccaaaactcaccgatcttgaactcgatcggataagaggtttgcctttcactgcacgaattaattctctatactttctgaccaagttcaaaatgccaacttggaagatgtatactgagaaggacgatttgttatctcacatcaagtacttagagatacaaacaagcttgtaaggagtaaaaggcaatgtcaggtgttaaatcttcccaacaacattagcaaaggtcgcccagcagtggtactttaagttgaaacctaggaagttcgactcaaggaacgcctttgctttagaattttacacataattcttctctttgagaaaactaagcaaatacaaggagaacctctaaaagactacatcagtcagttcatgaccaacacaaccaaggtgaaggaaattaccagagacggaagattggttgcagtgttaggaggaatcgagcctaaaagagagctatggaaagatattaagaggctcactgtatgttcaatgggggaatttcttgatcgagcaaatggctttataaagctcaaagaagtaatcagactggtggaaaatatcagacagagtaaagctgacccaagtcacaaaccctccacagctatagccaatacattcgtccagctcaactagaccttccagtctcaaactagcaataacaacaacaatggtggtaaaaggtctaatgatgggaataaccaaaacaataggaagaaggataagtataatgccgatcaacaaaactcccacaaaaaacctttgaagttcactgttttcactattctcactgacgctcaagagaccatatatatggcaagccagtcggttataccgtgcaagagacttcctctgattaagaaagatacgagcaagagggataccaccaaatactgtcaatttcaccaagatttcatccacgataccaattagtgcaacaacctaaaggagggaattaaattcctcatcaggaaaaataacccgcacatatgtaggtatataaaaattgaccaaaaccaacaggaaaataatcaaaattacctagtgcctccactatggacatacatttagaagtgattattggaggttcgcacattgctagagactcgagcaaggccagagagagataagctcagaccatccagtatgagtagaaagatgaagaagtattggtcgtagaggattgaaagcataaatagtcgcacagaaattaagcaattgtatcatttagtgaagaagacgttgcccatgttatctaccctcataacaacccactggtcgttgaagtgaacattgctaacatgaaggtggcttagtccatgaccgataatggggcttcctccaacattcttttcaagacaaaatatgaaaagatggggcttcttctcaaagacctatccccctacgcagctagtatacgacttctcaggataaagcatcactttattgggacacatctgactcccccttatagtagaaaggctccgaccaccagtacaatttggctcaattcctagtcattgatgtacacttagccttaaacgtcatgataggttgaccaactctatatgacttaaaggtggtaatatcaatttaccatctatgcctaaagtttccgactaggaatggaattggatgcctttaaaaagagactagaggacagcgtgccaatgctatagcattgccttgacaaaggtgaagaaagaagactatgtcggtgaaggatcaaatgtcgaataatttactgactaataggaatctgcccaaggtgggacgaggaaattgatcctcacattggggaccctagtacaagtattgggccaatggaggaattagaagaagtagagattgatcccactctatcgaccaagaaaattaaattaggccgatgtttattgcctgaaataaaatctgctctgatcaaatttctaagagcaaaccttgaagtttttacctagctacatgaacgcatggttggaattgatccattagtaattttccatgccttgaatattaaccccaatgtctaacctgtgcaaaagaagcaaaggctgttgaatatagaaagggcactggcactcaaggaggaagtggaaaagcttcaagcaagaagttcattgtagaagctttccatcatgtcttggtgtccaatcccattttagtgccaatgcccaatcaaggatggcaagtatgcattatttcaccaaccataataaggtatgtccaaaggattgttttccacttccaaagatcgactagttggtagatgctaccgctggctatgagatcctaagcttcatggatgcctactcggggtataatcaaatcaaaatgcatccaacagaccaagagtatagaagtttctgaatagattttggtctgtactgctacaaagctatgtcggtcatattgaagaatgttggagctagggctgaacatcgggtgggtttaccgggtttcgggttggcgggtttcgggttcacgggtttcgggttcaaaaaaatgaacccaaacccggacccgaatagggca

SEQ ID NO: 113532 - DNA, 1830 bp, Cannabis sativa
attaaaaatatactaaacttaatctaaagttaatactaaaaataacctaacacttatcaccctcacaaccaaaggtaacaaggaagaggccatccaaatgttcagagacggttataggaaaacgacactgggaagttcaaatttgagatagagtgttgatcagagaggaacggctaaagtgtttgacagtgcaaagcttcaggaggagattgatactgttaggatattcttcaagtatatcatttaaggtataagctgtgttttcatcaggggtaagaattagaggttggggaggatgaaaattaaaggaatccattactgaactagaacaatgcacgactatggtaacgaagagagaacagagagaattaagtacagaaaaataaaatctaaatctagctttatagagaaaataaactagactgtgaagaatacctcttggcttgcctctgatcatagctctagctctaagatctataggtttcatgattgttccattctcccaagcatcatcatcttccacagttcgaatcgccgccattttaatgaaggaaaatgtgtctttgatttggcttttgatttgatacttggactcaaagagaataaatggaggggagagtcgaggagatcgtagccaaagaaggaaacgaaagggcaaagtgcaacaaatgcttgataaagtctcacctgatgagagatttggaggataataatcgtcagaatcattaatgctgcaattaatgagggcaaaggtgaaatgatgagggcaaatatcgcagcaaacacaccaagtaccaccacaaaacaaatctgggtggaccaaaaacccacttggggtaccgaaaggggaacaaggaacatacttcctgaaagctctagaaaggatatccatttcaatttgtaaggaaaagagaatacaaaaaaaaaaaaaaaactttggatgcactgaatttgaaatatttttatgttggttttatgctgctttacatttatactacattagtttgttttcatggggatctataataatgtcattaaaaaaaaaatcttaaaaattaatcgtgtagtctgtaaaattatttaaaaattcatgtgtcaatgaaagagtaaaaattatttattttagacattttgtgtaaaaatctctcatatttgtctaaagtgaatattgtctttctaagactaatctagggcttctactataattcgagagtttatgtgaaaaatagttgcatagataatactctaatgataaaatcaaaaattgtgtatccgtaatttaaaaattgatatttggatgctttagatcattatacttgattttagctagtttaagttagttaaatagacccttatactgtaattatgtgtgtagcttatcgccacattaataaattatcttaaaaactaagcaaaatgtaattgaaaatgataacttacaattagttctataaaaatactatttattcttaaaaaaaaatgatgcccataaatacagcctcttggaatgaaataatctgtagattcattgtgaaaaactatatatttacaaatgacaataattttactaaattacagtaaaaatacaattgtaacagtctgcagcagcagaatgtaattctatcattgtagaacatatatttgcagaattaaactagaaccagaaataaataattgcataatttaaaaaaacttaacacaagagaattatacgtggtatcagtgttctttcgaacactcttagtccacggggttatgctcagagaatgaaattatttagtaaaatctcaaataattacaaatacaattgacttaaacaagtttagactc

SEQ ID NO: 113533 - DNA, 10895 bp, Cannabis sativa
  modified_base (1098)..(1113): a, c, t, g, unknown or other
aattaaacttctaatccatgtcttcacgagatatgacccctaatcccaatatgtgtttataacctaaatttctttttcaataagaacagtgtacggaaagtgagtgcgcccagcttatatatacaatcatacatacatacacatatatatttacaggaaaaaatctacgacagagaagaaaacaaatcgagcatacatatgaaaggctaaaactaaaataaataataaaaaataaaatcgaaaaataaaataaagaactttcacctgtatcgaagtggtggagatcaggaaacgcgcaaaaagcaaaaaaggagggcttttaattttatattgaagctattcaaaaatttgaatgtacagagagagaggttgaagacgaagttgatgggcttcttcagcgcccaaggtttagagctttggaggcaaaaaccctaatggaccaaaaattagggctctgagatttttaggcctttttggagggaataagaataaaacaataataaaaatgaaaaacaaaaaactggaattttattatattagtcgttttgacttttatatacgaaatttcttgacggtcaagaatcaagtacaccgacatccatgggtatagacgtaatcacctcttacttcaatcattctccaccgttgatcatcttttgtttcgcgcaaagcaaattaataataatggaaataatgaaaaaatatatactttccttaagtataactttcaaaaattcttaaaaaaaaaaaaaaaaaaaaaagagtgaattaaaaagtatagattttatagtcgatttggttttcaaaagtttattatgattttattaaaaaaaaaaaaagaagttcattattaaatttttaagtacatttactaattggaattaaaataaataaaagaaatgaatgaatttattaaaagaaaaattttatttacactccaaatatttttaaaaatattttattttaataatttttattatatataaaatttacatctttaattgtactaagtttttttttaatttttttttgttctaattcatattcttaaaaaaatatatctatcaaataaattaattatattttaaatattatgannnnnnnnnnnnnnnnaaaaattatatgaaattttcttaacaaaaatataaacatgagttagaaaaaattatgaaaataaaattaaaataaatattgaaattaatataaaataatgtgaaaaaaattttaaaaaaacattaagagtaatttttaaaaattatttaagtttatatatatattttttttaataatgaggtatatttataattttatgagttacaaatataactctcctattaaaatataaaataattagaattaatattttattattatttattaaactaattgaaaatattgttaaaaaaaaatacttgtagaaatcaaaattatatttattgaataataattaatatgtaatattttaatttttatgttgtaataattttgtatattaaaatttttattgtaaattttatttttctattaggggattctccgcccgtcctctcctccattaggggattcttcacccatgctcgatagggaattaatggggatggctattaaaatttttaacggggatggggacgggaagtactccctgccaattctccactccgtgtgcatccttattttactggcgtataaaataaaatagtcacgcgtgcaatacactgtttgaacataatttttggagtgttaaacttttccgaatttcttaaaattttacagtttgcaggatgtcttaaataattataatttaaatgactatgaaaaaaaaattaataaaaaattatttcaaatactaaaacaaatagaaatatattaatgcataaaattttccatatttatttattgattaataatcatattcataataatgattttttttttcttgaaaataattaattgaatttaagaagcaaagcccttacttaataaattgaaaaagtagcaattattttcgtaaactgaattttgaaaactgaaatgtttgagcaactccgaagaagaagaagatgaatctctacgcccacgacctctctcttctcgatttcaattatggcttctccgattccatcgacgattccttctctcttcgtcgaactatgcttaattcatccttcgctcatcgcgatgaagatttctactacgatcaccgccgcactatgaaattgcatgatgctgccacccgcaattctactgctcctcccacccaccgccacgatggcacttcgccgcttcctttgggtatggattggagtcctcctcctcgtaaatgggtactcttccaaatttcctcaaattgatgaataatgatttcatattaatttgagctttgttgtgtgtttttatgttaatttgattagcacagtttcagtttgcctaaggtctttttagattttaggattaaaagaagttctcactttgattagaaaaaaaaacaattacagcttatttaaaagtggaatgattaaaaaagttctcattttgattaggagaaaacaacaacagcttacttaaaactggaataatttacatactaatttattaacactattagcaaaagataaaacttagacattgcatatgccttttgtttctttttttattgtttggtaatttgagcttatagatgaatgtaagctgaaattcatagcttctgaatgtaggaaggacgggactctgtttggccacatgatcctcattcaggatggagctattgttgtgtaattccttcttggacttctatgcccaaatcaagaggttcagaccctgtagtggtatatttttctttcagcttaaattttttgaactgtcttacttttcttctttccaaattaagctcttttctgattggatttgaagtgttaagcttcattgaacatgaactttcaatgtttgctgagtaaatatatatgatgaaagtgaattggcagtattattatttttatattaacattcattggcaacagttttatagggttcaagttggtatacaatcaccagaaggtgtcaccacagtaagagggatattacgaagatataatgatttcttaaagctttttactgaagtaagtagatggactttcttgtgccactgaaattggcatttcctaagttactgcttcccttagtcatatgcaaaattgatgaacttaggatgccccagatgatttgtttttactaaatctgtatgctttagctatcaatctgaccttttaccgtcttgtgtagcttaaaaaggcatttccctcaaagaagatacctctggctcctccaaagaagcttctaccgataaaaagccaggaacatttggaacaggtactttagatatttctctcattagtgtattggtattttggtgctaaatgatactatgtaattcaactataaactttaatgcaaccttcaacagacaaaagtattatcagacaaatatatacgtcttcttattctcaaaatgaattcatttcttacagcgaaggtgttctttggaggattggatggaaaagttgttatcagacattgatttatcaagaagtttccaaatagcaacctttcttgagcttgaagctgctgtgaggtcttgtaggtgtttctttgatacgccttgacattatctttcttcctttcaatctttagcaactatatgctgtaatattattaccaatagaaggatttttatgtatagattgtttttcatggttcttatatgttttttctttttttcaatgcttcagcatttaatgatattgataagcaaagttcagacggagattcttctactagtggtgcggttccaccattcttgtcacaagagaactcagatatggcatcaaattatggtgatgagatgtcttctgagaaatctgaacttagaatgacgcctgaaggggaaggaagagttgtagccacagatcaaataagcgagagtattactaatgttaaacttcttcgcctcaatggaactgagtttattccagagccagtggattccagagctagtggccattctcatagactgtcaacagagagtataggaagtgattcaattagtgatgctgaccttcctggagatccaagaaatgcatatacttcaatagatgcagatttacgaattcctagagatgtagttgctacctttccagtaaatgagagaaataaattgaacagggtcctaataacattacagcagagactagccacagcaaaagcagacatggaagatcttatagcgagattgaatcaagaatctgccgtaagacagtatcttacaacaaaggtatgtttttgttagaataccttatcaatccgagttagtctttacgatactgatagcattgaaatattaattcgaaggtcaaggatttggaagtggaactcgagactacaaagcagacttgtattgaaaatatacaacatactgttttctctgaaaaggaaaagtttactcagatgcagtgggatgtggaagaacttcagagtaagtgcatgaagttggagttacaactcaagtccgaagaggtttgttcccactattaccttttatcgagtttccttatccattattgagttcttcaaacaaataacaaataaaattgcaggaagggaaaacacgtgcagagtcaacaaaggagttaatcatggatgagaataagatgttatcacaggagttggatgctgttaaagagcagcttcataattttcggaaacatcatgaaggccttgagtcgaaatcaaaggcagaattaaagctgcttgtgaaagaggtgaaatctcttagaaagtctcagtcagaactgaaggaagaacttagtaaacaaatgaaagaaaaattgaaattagaggtaaggtgtagtaaattccgttttgataatttcaatagttaatatatctgatttcgggggatcctgaaagcatattagaattaaaatcaaactcaaatttgtctgtttctgcaatgtgaaactgatgcttttatgtttcagagggttgttgaaaaggaaaagaaaaaggcagaacttgcagatgcagctaatgagaaactgcttcacgaatgcgaaattcttcgtagtaggcttgatgaatgtagtgttagtttccttgttgaagaggaagataagttagttttggacacttcattaccttctgacactatggatttactaacaacatccgacaatcgaatcggtcttcttcttgctgaggtactcatctaaataatgtgctttgctttcactttgaaaaactagtgattaactttttaatcccaaccattattaacattccattaactgcaggcacagcttctggcccaggacatggaaaatctcgatgagtcgcataccgataaagtcaacgacaatgtcaacactttgaggaaaagtgaagataagttgaggcagattctaacagatacactagttgacaatgccatattaaggaagcaagtcaactcagttatacgatgtgccctgagaacaagttccaaagataatgacaatgaagaggataccacttcgaggagatccgttcttagcaaatttttagaaaactaactattgcaaatatcaatatgtaaattcagtcgtatgttcatataaataaataaacaaataatttcccacataattttggtggttgtcttagtattatgaatattggatgctcggaatgtgcattgtataatataattattatttttttcttaataaactacacatgtaaacatatatatattttataaataaaaagggtatcatgtggtagattccttcctcactctttcggtcattttgacaattttagggatcacgtgtcagttatagaagtcttatacctcaattactttaattgggtcatcggtagtcacttaagttctcatcacatagatggcaccaccgatcaagtttttcttgaatccctttttagaggggcttggctgggtttagaatctttgacccaagcagaagaggatataaacatgtatttaaaaaaagaattatggctaaaaagtattcaaacgttaatttttgtagataagttttacaaggttaaaactaaaatgcctcaactttgtgaaagtattaaagactgcaaatgtaaattcagtggacatgtacatttaaatcaatatattcccacataattttagtacttaaaatagtaatgaatatcttttttttttttttttttttgatattagtgaaaagtaattcgaatttgagatttgcaagaacatagtaactaaggccatattagatgctcggaatgtgcactgtacaatataatttttttcttcatattcattttttttcaaaaaaaaaaaaacaaatatattatcttattttaagtattgcctggtctaaaacctaaactgtgtaataaaacactctcaacaaacaaataaaacacaacagaagtataaaattgaaagggttaaatgcaaattctctaattatttgctccaaaaaagaagaaaaaattaatacccttgtaaatttttaggctaattacgtacaaaaaagaaaattttaaagggtttgatgcttgtctttcacatcaccacaaaatggctgagtaatgaaaagaatgtaagcatgcagccgtgtagttggtagtatgagtttagtaaatagagctttacatcttttactactcccctcctcctcctccgaacatccccatcatgtctttgttaccgcccatttgcttcattaagctctgcaacccacccatgccgccgatctgcttcagcatctgaggtgggagtaccttgctcatgtgctgtgcattcatattcctggatagagcactcatttcacccttcttaggaatcttaagccccttcattttgctccatacctttgcaaggcgtttgtactcttccatcatctccattacttctctaacggggcgaccagagcctctagctatccgcatcattcgggactcattcataagcttagggtttgtactatccaactctgcaacataatattaccagtaaggtatcagactcagaacaatgaatttgataatatatagattgaaggattcttttccaattactgttaacttgccttcgttggtcattgaatccatcattgtcatgtaccgcttaatttttgcctggctctccttttcacgtccttttggcattaattcagaactgaaccctggtagcattgagaagacctgcatgaaccagcctctccagattaaaatcaaatctaaatatcatgtgaaggatttcaggcagataaagtcatgttgtgacctggccaattggacccattttcattaagttctggaactgctcatacataatcctcaatgtgaaatttccttctgaaagtttttgtaggagctcgggctgctgatccattggtactacttcatgaatcttgtccataaatccagaccagtctcccattcctggccatagaagttattttaatatctataagttatcttatttaaaatataagttcagttcaaaaaagaaagaaaaggggggaatgaggagcacacctaagagtcggctgacaaatggtttgacatcaaaaacttcaaactcatccatatgttctccggttccaataaatataacaggactctttgttgcagcaacactgcaaatatgcaaaaccaaagtaaattgtcgaagttaacaaagagccgggctgtaaacaaaaattgaatgaaaagaatgagacattgcaatggaacttacgcactaagagcaccacctccctttgcatggccatccattttggtgacaattacagctccaactgaaacactttgtctaaacgcttgagcttgatcaaaagctgcctgaccaatactgctgtccataacaaatacaacaaggtctgggttctgtagcattaaaggaaacataataaaaataaatatatttattagaacttttttttttcccagttattgaaatctgaaaaaaagaggaatgaatttccaaaaaaaaaaacttactgtagcttcagaaacttggcgcatttcttcaaaaagagcagcttcttgcttgtgacgtccactagtatcaacaattataagatcacagttttctttcttaaatctttccacaccttcaactgcaatttttacagggtctgactccatatagctgtatcaaaagaaagaaagaaaaaaccataattacttataatgctgaagacctcactacagaagtaagccctttgtctgaagtgctaaatagaaaagcaaaggaaaacaaccaaggaggaggaggaagtgttttttgtcaatttaagggctcaagctaagacatgatttatttacagcagtatcaaatttgaaagggaacaaaaattagaagaaaaagtgtacattttttaacattaaggctcaagccaaaataataataataataataaagtcagtataaaatgtatatactcacaagtcacaataaacgaaaattaccttccataaaatggaatcttagctttagtagcattctgcttcagctgatcaaaagcaccagctcggaaagtatcagcacacaccagagcaggcttccaaccttttttctggtggtagtatgcatactttgtacatgtggtagtttttccagaccctgattttattttttgataaaagaaatttaaataacgagcaatgtaacaaagcataatactatttgttagactgtcttttttgcggggtaagattaatatataacttcaattgcaagattgtgaaatttgtcaaactaacaatgtaaaataacctcacttaacttattctacgtgaccaatggtcgcatagtgtaaatcaatgatcttttatggtagcaaagtgtaattcatcgtcctttctatgaccatgctaataattttttttgtgaagttaatttgctaataaaaaatttcatttacaaaacactcatattgctgaaattgttcatcatacaatcagtcagcataaaaaaagtaatggattatgaaacataccttgcaaaccaacgaacattacaatgctcggttttccttttttaagagtgaaagaaggttttccaggatccaacattttgcacaattcattaaatatagcctacaacaaaactttcattaatgcacaaaaatcacaatgggatttcatactagatgtaaagagaccctgaagaattataattaaaaatcaaaagttcaaaaaagaaaaaaaaccattgaaagattacttgttttcatttccaataaaagttcaagcaaaccgaaattgagattatataatcagaaatagtaaaataaaaacatacttgctggataattttgcgcttgttgtgaccagcagcgaggtcatccaaattgacaatcttcttgatattgctttgcatatcacggacgagcttgaattgaacatcggactgtagcagagcgcgactgatctcattgagacattcattgaggaccttctcatcgatcacagtggcattgctcatctgctgaagagcgcgggatatgctcccgcctaactgtgctaaaaccatcttgggtaatcggattcggagaagacgaagaaaatatgggtagaggttttcctggagattgaattacaaatctttcttcgatttagaaattagggttcgggataggggttgggaaaaggggggaaattgagagaatctgagattggagatgaagaaatcgtctttctttatttactcatcaaatcatcatcatcatcgttatgctcatgaatgaattcaagtcctttcaggtcttcctatgaatatgatgctatctattatttatttatttatatatgtatatatattttgagaaaaatatatatttttttattaaaccatcttaacgattattacactttcataatttagaaaacttaaattttctaaattattaataaattaaagtgttatttattttttataattaattcgtaatacggattgcttatgtattatggtagtctaaagtacaaataaaactataatttagagagtttaaccacaaaaagattatttttgaataagtaaattgtatattttttttaatgcaaattatgtaacatttcagttataacttcgatttataagtttaaaacgttttaatgttttttttttatatatagaattaaagataattagagaaatccaattaataagcaaaattttatttgcaaattgttcaacaaaatgtaaagaaacattacaaaaattattgaaaagacttccatagtcatgaacaaataaatcaaattctgaaggcatatgcaaattattctcaatagcttaaacataaactaaactatcaattttcagcataacccgatcccattgatgtctatttatttaacttaatgtctctttaatactaatgatattagctatttttgcatctttcctatggtgaaagctttcaggacttggccaccattatcacatgctaagcaacccattctaaaccaaccatcatgaaagaactctacaatgtgtttgacttggggtaattttaggatgggtgacctcctcggaagttttcccaagaagtgtgcgagtgaggacaaagcacattggaagcactcgtattggtctgtagggtcagtcgtcattccatgaagcagccagagtgacgtactcgtgtatgccatcattctgtgggtgtaagagcccaatggaagcttgaagtgtagacgttacaatatatcatataatttatatgactatttaaaaaaatataagttcaaactaatatgttttttatgatagttgatttaaactttgaattcaatctatatatatattttcattattacaattaattaaaatataacaattgaat

SEQ ID NO: 113534 - DNA, 2065 bp, Cannabis sativa
  modified_base (1169)..(1173): a, c, t, g, unknown or other
acccttattgcaactagcgctgcaatcactttagaaactcaaacagtaaatttgaaaaaaaaaagataaaaaaaaaatagtaaatggaataattccaaaaaaaaaaaaattaattactccattactgttgtaaaagtatgccaaatttagcatatgctaaaaattatgctgttatgattttttagcctattatttatattatttttagagttaattttcttctatattgtcatttttcggaatagaattatgcctgttttctttaatttcaagtttcgacatttggaatttataaatttatcaaatttcagaaaaagatgatttataaaataggttgtgcgagaaaataaagcttaaattcgactatgatcagaatagattttagaaaaagttaaaatataaaaattctagatctctctttcagctttccggaacatcttgaattgtccaattccaagcaatatcgagagagttatagccaaaatactatcagtcgttgcaagcaagaaaatttctagaaaataaaagataaaaaaatagccttttaagtagagttgcaatttttatttatttttttaagtttaaattttaaatctttttagtatcttctaggtaactttgttagcatatataaatatattattattagtgtttttagtacattttcaaagctcaaaaaactcaaaaactcttaattaggaagcagttcaggagaacgaaaatgagagagcaaattcaatcgcgaaggctttttcaatggggttttcaacattctttcttctttgttttcttcttctattctgaattaatatgtgtgaatttgctacgatgaatatgagtggctaaacaattcattagggtttagatagatattgtttggcattgatttatgatttaatgtgatttaattttctcctaatttttatgtattctatttcattcgtatttaattacttttaattgtttgatcactaattaaatatttatgattttgatgcgaaatctgaaaagtgtgtgtcaattatgctatagtgaaatagaactaaatttcgatataggacgagagtacctatatagtttggataacttataggaattctgtgtttaatgtcttttacatatttaatttatcacgaaagtagaaaatttacatgtaattgagatttatnnnnntgagaagactataaattacttgagtaaacctgctattgcattgaattatttaattagtaatagaaattttatcatgttaaaccatattcgatagatacaattgaaattgaaaaccttaacttttaatcatcgttaatttacttgcttcctgtttttattgttttttttagttttaataattttctcttaaattccactacaagaattaaatctattggcggcggactcattagcgggggacatattacgccactaataatgccagtattagcagcgggcccctaatttcgccgctaatagggggaatttttttttaaatagtattagcggcgaattgctcgtcgctattgccccccgctaatatcccgccgttaataagtgggcggaaaaaattccgccctttgagttcaaaattattaccggcgaaaataaaatatatatatattatatacattaccggcggagcattcgccgctaatgtgtctataaataccccatccgaccctcttctcccatttttcaccaaatttcttttatcttcatcttcaacctaaaattttcccctcatttctccaccacccaccaccaccaccactcccacccccacgatgcaccaccgtgtaccagccatttttttctatttttgataagtatttattttttgttttatatttgagattatataatttttaagtgttaaaaatggtatatataatttgtatatatacatatatatataattttgtgtaaatatatatagatgattttagagtttataaatttgaatatttatatataaatatatatatgggtgcacttttaatgggtattatccataaatgggtaatattaaaattttttgagtttttatgcttaattttctatctaatta

SEQ ID NO: 113535 - DNA, 4198 bp, Cannabis sativa
cagcttggtttggggacacgattttatgtagtatattcctcagacgagtggcaatgaatttcgagattactttgtaggccacattgcataaagctataggacggtagtcattgaccatcgctgggaagtccttcttgggaacaaggacaattgccgtgtcattgatatacttgggaagttcagtgtgggtgaagaagtgggaaaccatctcaaagaggtcattttgaaccgtgtcccaatggtgagcatagaagctcggagggaggccatcctgccccgccgctttatcctttcccattttgaaaagagttgcagatatttcctccattgtcgggatcacgttaagggtagcattgtcatgtattgtgacgattgtgctaaaagactcttgttggaaggaagggtggctgcattgttgcttcttgaagagttccctgaatttgtcaatgaagcatttcgctatctccttgtcatctctaatccaatcttcacccgagttgttcttgatacattgtatgtaatttcgtcttcttcggactgtggtagaggctatgaagaatttcgagcacatgtcaccctcatgaagccattgcactctcgatttttgcttccagtgaatttcttctctttttagggcctcggtgagttgttggcttgctagctccattgcatggtaatcgtccgggttctttatttcaatgtcttggagatgagcttgagcgttctgcacttgacgatggacattctgaaattgaagtttgttccattgctgaagtttctttgttgtggctttgacttttctaaagaagtttagcatgggattactatgttgtctcttcacccaagcctctttcacgatccagaagcttctggggtcccttgcccacatgttctcatacttgaagagtctactcttgcaattggatccacctagagtgtcaaggagaagtggcctatggtcagaccctgaagcagaaagatggtttatgactgcatttggaaacaatattcgccattccggggaagcgagtccaatgtcgacgcgagctcttttcattgctcctcctgggttagaagtccccccacctttagcccaagtgaatcgtggcccttggaaccccagatcaatcaaaccaacacgctgaatcatacgacgaaagtcaaaagaatagcgggctgagtttccatttcgagtgtaattaaagcaatccgagtctcgaagagtgccattcatgtcccccggtaatagaattgggttagttgtgttgagtgctgaatctcccaggtggctccagaaggcctccttttgttctctatgcggggggccataagttccaaacaaatgtcagggacatcctagagggtccgaactaatttcaccaatgattacatatttgtttgctagtttgatgttacagttaactcccttcatccaacaaattccaagacccccggatagaccaacaggagggacataatgagagttctcaaaatggagtctaatacaggttctagaaaatttatcttgcggtagacgagtttcagacaaaacaagtacctcgagtttgtgttggcgaaccagattcaccaattgcgaactgtcgtggaattctcgagaccacgatagttccaagctagcactttcatggcgactcgggagacttttctgggcaagtcttcgtagccccaaagtgaaaatcatgtcttccttcaattacactttttccttttttcgtagcttcatcatcttcgacttctgtaattgtgcaacttgtcctaggcttcgtagtcttctcaattacgatgaagtggttattcaaatccactttcaagtcgaagccgcttccgtcaatgtgattatacttccctggctttcctcccatattgattttttgtttgtctgcgacccttgaacgatttcggggttgctgagaggtttgggtgattcttaggaggccttcccctacgtttcttctcaactggttcatcgtggacaatgggagccttttcgcttctacctcccctgcttcgacatctgctgctggagccttgttccacacacgtaccaggcgagaagctagtgggtggagagtccatttcagtgtcgagccccagtcgttgctgaactgtatgagcatttttttccgttgggttgtctctagtttcaggttcagagtggttatccttcgatagagaaggcggggtgttgtttgtgtacgaattgaaacctttgactggagatgggttaatgagtaagtcatctgatgctttacgttttctgggcccttgagagtgttcttggactctaaaatcttcaatgtcaagtattgggttaattagagtgggctccctgtagtacttatccacagttaaggatccaaagatcagttcacgggcttttgggtcggcccaacactcattagagggccaatcaataagttgggtccgtgttcccagtagtgggttgtaggccagtttgcttgggcccatgtcgaagtcagaggtttgtttgtttgtgggtgattcacctgcctctgctaagtcttcaggctggctgttgctaatacgaggtttgtttaagggtgcctttgagttatctttatttgtagctcctgaaatggaagtttttgtctttcccgtccttttcatcttcaggattttctcagtgttgttctcgataccattgccctccaccatgttggagctcgatgccccattggtcgtgtccatagtgtcctctgtggcagcctgttgtaagtccaaaattgataccgtttttgaattattgccataaggggcaaattccccaatactcggtagataaactaacggaatctgggtaatgaccatgttgggctcagcggtttcgattgcttcctcatcgtcggagacgattcttttcttcgtcggatattgtcgacagcattcacgtatctcagccgagtctccgttttgaatggctctgtgtaccttgaactggtttctaagaatggggtcattccccaattgcttttgcagtacccagtcctgaaaccacttggccagggggtggagaaggtcgatttttcgggggcctccttttttaaccatgtaccgaacatcggataaaagttaccgttggtgtctttcacaaccgtgggagacttgaaggaagtgctttggtcatggtttattatcccacatttgaaacatgtttttggtaggcgctcatatttgtactggagccataggtctttgagtttttgtctacgaagaaagaagccagagaatataggtttattcaggtcaatggttgctctgaatctgagtgaactcatgcctacagtatcttcaatcccatgggggagttcataaactggtgaagctttggaagcgatttccttcagattggacaagttccagtaaaaagggggtggtatccacttggacccagataggggttttgtcaaatcttacctcagctggggagagccaagatggccatggcatgatcacaagcaaagctccgcagacaaaccatggcctacggttgaggacattcatagcatcatttctatttgcaaatgtgaactggatgataccgtcatctagttctttccatttccaacccttgatggcactccaagacattttcagtgagccctgtatggtagccttaccaagtcgatatcggcttatgattttccccagcagcactttgttctcctcctgtggttcatcaatctccccagggtttaaagcaaaggtaatatcatcttgtgtgatctgtaccgagtcttggaacaagtcgcatactcttgaagggtccatgagtagttgtccagtgcagcaaaagaaacaagggagagtgaaggtagtgatggttgagactgtgattctacaacagtgagcgttagagcaaatctctaatgacttccaagaagtgagctcctagagagcatttagcagtacttagttaattctccaagagataacattaataatagtacacatcatttctttaaaaatgacgttcacaattatatatgttgaattaacttttattggttttgttaaaacttgaattaattgaatagttttttgctgtattatctcatattgttggtgatcaatagctaatgggcttagcatctatgtttataaagagcagactcagtctaactaaggttatgtagctaagtcccctccctaactctat

SEQ ID NO: 113536 - DNA, 5149 bp, Cannabis sativa
  modified_base (5101)..(5110): a, c, t, g, unknown or other
ccgtgtcgctatgcacatacaaaggcgcaaaaggtgctggggctagataaaggagctacgacccgatgcggttacgacgactaacttaagaagggtcattagatgcaatgactctatccatctagagactccggcatcggtgctgacatgagggccagattcgtcttctgacaactacttccctcgtttggcctctaggtggtgaagttgttcaaaaatggatcctgcgatagcggctgctgagaggatactgtcagtaccatcagcatcttctgggctaccggtgatgcctagttattgtattgctggtaggaataacccgtctttggcatagttcactcagtgcccttcttgttgcctagtgtagctgaaactctagagttacattagaaggaagcaactcgagatattataaactagttaaggagtccgtacgacatgcttatcccactggaagtccgagtgtttgctttaaagaccatcaaatgcccccgcacttcaccagaggagacagactgcccaagagatcctaaagatgtaagcatgcacctcctggacctctccggggctcgagagacacgtgcgaacttgatagtcgtgtgtggaagatcattgggattcgttcacgtcttcaaccatctttcccaaaagggaaggactgcttaaagtctgctttactcccaatgactcttccacccattgatcttttcaggcaaagtctaagcttgaatttttattcaacttcaaccttccttcccaaaacccgaaactttttcaataaaaattcaacatttctcgcatgcatatatttttcgtgcaagaaagatcactgggggtacaatacgtcttcaaccctgctttccggaacagtaggactgcttgaagtcagtcttactccctgtgatgatttcccattgatcttttcaagaaaattcgaagcttaaatttttatacaactttagtcttccttcccggaaaccgaagcttgttccataaaaattcaacatgactcttgcatgcacgttgtttttcgtgtaagaaagatcactaagggtagatacatcttcaactctcctttccgaaacaaaaagactacttgaagtctgtcctactccccgtgacgctttcccattcatgttttcaagtgaagtctaagcttgaatttttatacagcttcaaccttccttcccagaagcggaagcttgttccataaaaattcaacatgactcttacatgcatgttatttttcgtgcaagaaagatcactgggggtgcaatacgtcttcaaccctcctccctgaaatggaaggactacttgaagtttgtcctactccccgtgatgctttcccattgatcttttcaagcgaagtataagcttgaacttttatccaactttagccttctttcccggatgccgaagcccgttccataaaaattcaacatgacttttgcaaccccaatagtaccttaccattcagagcttacaagaaaatttaatatctgaactccttgcgcacttttagcctttctcaatgaaagctgaaagattactgccatgggattcaacgtgacttttacttaaacaaaccctacgtaagaaagactgtttacacaagggtgtaggcctagcttttcctctcggaaactaatggcctcccgcatagagataagaagcacattcggtcaaacttttttgaaaaagaaaagacatgcctgaatcccttcttacatatctccacgggcttcacatagagtttagccaatcaggttgcattaagatctagaataaaaggcagacaaggaccaaagtaaggaaaatgtctaagtctaaggcaatcgtagacaacactcccgggacttgaccttgtgaaagaactaaacctcgaagaggatacaagaaatggcaaagaatcttgtttcacggaaaggggtaatctactaactaacaccaaacaagcaaccttctagctggtgagccgaaagacgtcacagccccaggaaagaaaaggtcaaactaaaaaatagttcctaaattgactaggagataatcgaggctaaagggaaaaggatgaagcactggccattggtaccaggtgcttcaatagtgcaacaagcccctaaaaggtctaccacatcaaatctctaagtaaagaacatcgaaaaggaagaccctatttttctattaaaagccccccatggccagggaaaaatattaattctctccacagatagaaaagtgtgattaaaaaaggggatatataagaaaaaaaataacaacaataatatatttaaaagaggtcttctgaaggttcaaggttgggcaccgcctgactgcgaggaacctgcatcagatatccgccccacagtcttcgtatagaggtcgtgaatagccttcatactctgtatgaagtgggcttggtgggcattctcctcctctagttgctggttggcctactgcaggcccccaatctggaacttggtgtcggtaagctcggtctgaagagcctcgttggcagcacacatgtcacggttagttgccttaacctattccagcttcgttgccagcacaccagcctccgtagcagccctttctgccaacaacaccacctgtcagaaaaggccaagttagaaggctgaagtgccataacaggggacatgctaaacagacataaacaaaaaagggggaaaaatgaaggcaaatgtttgaaagtcttaccccaacggcctgctgcagagtgagccaatgtgaaggcatctgcgctactgtaagatgctcagtcctccatgggcagttcggaggccctcctgaccacttggtctaagatctctgcagcaaagggtgcggcctctcgccccaacctaaaggccagtcaattctccaaggcctcgacctctatgatctgccccgttgggggcaccatgtgcatgtcatccacaatctcagccttgtaagctactgacatcatggccacccgctgtcggacttgcagcttttccacctccaaacacccttttagggccctgtttgtctccttttccctttgtgtatcgagagggtcaaaaggaactgccttcctagggaaggaaaatcccatcgaaggcactcctggcaggaccgaggggagtgatctaagttgacctagcctcagttgagaataaggaggccgggggtggtcccccataccccccattccaaggatagacacttcaagcttctgctttttcctggtagaagagctattgccccccgtttcaaaaaggctggtcttttccaaggtagacatgatatacctgtcaaaagttggctcggtaaaaaggggcattatttgacccaaaatttctcaagaatgacgctattggagcaagttccctagaagcagataaaccttaacgatcccttcaaaactctaatgattgttgaaggtatttgtgggatgtctagaaagggcaccacttctaaagagcagacgcttcaatttggcccaaaagacgtccaccgattggataggtgagaagttgaaatggtgccgcatctcccaatatatgtctcccatcattgcatgcattgtaaggaacactcagaaaatgagaagattgcctaagtccaatcgtcactgttttgagcttcccagaaaacacgcgcccaacacgagcacaaaaatccaaaaatcagcttttagaaccctaacaagaaaataagggaaatcataccttctacataatgacactttggtttggcagctgatcacgtaatgcatcaaatgacttgtcataagtcccatgtccgcaaagatttcttagaagatggcactgcaagttccaggaccatggtatgtcctgagaccttgggggtaaatattatccacatatttggaagcatgacaaatggaaattaatcgaagaaggccaagaggacaccaagccacctaagcacctctcttagtgctctagaagaataaaagcaccaacctcgcgtgaaaggtctctgtaaaagaagtctccctgagtgttggccacgcgaaaggaattcgtgagctagtgcctcactcctctctgaaagacttaacctttttgatctcgtaaaaagtatggatcttctctaaccaagatacgccagtccagaggacgcttttgacccataaaagatcagcccacacatggtaggttacggacctaatgacaagactttttatgtacgatgttagaggttgtctcacacgccaagctaccatgtagagcatgtgtgtccttgtgtactctgccaaacaatccaacggctagggatgagggaaatttaaatgagaatggctctgaggtgcacgcatccaaagtcctgccagtatagccagtacaatctgacatcgggaccacatagaaaatctggcacctaccaatccaaaggtcgggattcatccctacaaagatccatccaaggtagcccatgcaatggagttggcctataaatactccaatgaaagcacaagaaaacgaatctagaccttttccttagagcttcacctttggagaaaagactcattcaccatcactcaagcatacacgctttagtaaccctaccattaagtccagaatattcctactaagattcttcttcttcaagagaaacacagggggaaggactaactatccatcgttcttgtatttgaataaacaaacatcggcctaagagcctaataaaatggactcgtggactaaggatagttaacacttgaccacgtaaaaatatcttatttgttattacgttatttataccttcactactttcttaagctctaagattatttggttgccgaaaaactaaataaacactgagcaatagaatcaaaagtaaaggggtattaccctgtagtttttaacaattgaaatatacggggggtttgatagaaaatttatctttcttatattattcttcaatttataattaatgtaccaattttaatgtgaaactttttttgtaaataaaatttgtgtccccacaagataatcatatttttatggactatgatgagtacgaaatgtcaaaaagtttgtgtggctggcgggccatgttggattttgtgccttaaataaaacccattacaatnnnnnnnnnnatcaatttaagagatttgaagtggtttatgttaacatgt

SEQ ID NO: 113537 - DNA, 4009 bp, Cannabis sativa
  modified_base (27)..(38): a, c, t, g, unknown or other
taattgtgaatgactatatgttctggnnnnnnnnnnnnttgtacatatattaaaccataatcatgaaaacaacatgttaacataaatgattctaatctcttattgataacaagtgagattagattgtaatggtttttatttagggcataaaatcccaacatggactacttataagaattttgaaatataattctatattgtcaaatagtgcaattctatatttataggtgagtaataatggaattaataaactagattattttcctgatgagactcaatagtaattaggtgtttactggagcttcgaaatatagctccatggtctctagatcacatttatacaacattgtacaggggaagatataatttagttgtattgattctagagataataccacacagattcgagggtattaccttataatatctagctatgtctctctttgaatgttacaatgatgagaactgatgtatgccaatttgtgaacaagtgagatgagaaaacagactaagtatcttgtgaatgaaagtgtcatgtgacaaaggagaagcgagagtgctttaaggctcgttggacttagaatttaggtccttttcacattgcctaattccctttatatagattaagaattacaaaagatctatattcacgcaagtaaatatccctttaaaataaggaatatcagtcttttataatatatttaagtcacaaaactagctaattaatatccttaaaagataggtagagagtttagagttgaattcctacatttgtggtttgttggaactgtctcgtagatgaaaacgagttgttacccgtgccagaagatggttgtggaccccaccatttgattaggcttcttttgatgctcttcgatctttgctagctggcctaccttctgtttggggctggctagcacatagtcatccttggccagtgaagatgtggtctgactagaccttcttggctggccattttcttgtaacttgatcttgcttgtgtcttttgatcccttgcattgatgtgttatgcatggtaattttactcacttattgacacgctgtattccaagtatccccagtctttcctatgtacacatgccacgtcatgcgggcaaaaattaggataacattttcaccccaagtccccatgaggttgtctatacggatagggacgttttcaacttcagctctggctattaaaaccttaatcgggcagcactggtcagccagatgcttggcctttcatatgacccacttcatgataaaaaatgactttattgccaatcattatggggatttattttaatttattattttgctacacattttcctacttacaaacccttaatcttctacatggtgctatttttgaggagaagtaactacccactaagtttttgggggaaagtgaatgagaacctatataaggttcatttggcttaactcttcatttccattttattatctctttctctctcttgtttgaaatgtccttcaagaaaaagaggaaaaaaaaactcttcacttcctctagcaacccaatgccccaagttctccatttcatgatgtttttgcttctttttaacaatccaatcttcccacaagcatccacaacatacttcattagtgggtaagtcttcaaatctcattttcttattgttttcttgttactaccattgacgagtacaagcttttagaaatccttgattctcacgttatagtatagttttttttcacattataacccacatgatagctttagtatgaataatgtattatttttttataaaaaagattagattttgagtttcgtttagattcttgacactttgagtcacaaagaacggtcttcaagtttttaaaaaatagaattttgatcttaagaaactcttggtcgacacacatggtttgtttatgaccctagcaagcacatagtcttagtctaggcacctcggcggttctcgacttccagcctgagaacttggcggaatcatgctctggtcatgagaccctggccggcacatggcttcagcccatcaactttgccagttttggcccttttttgaccttagcaaagactccacatggctttttgagcctgtctcgcctatatccattacttggttctcttaagaactttgtatggcatatcttaggttgattctatattggccaattagcagcctaaactcattgttgtttaactttgcgcacttggattttgtactttactgaataacagttttgtagaataggatgcctggctagtacccttaggtttagttgactcatactttatttaatccttttattttcgtctggttgctcacctccgtctacccctttattttacacaaattaactcgcgtgactttctaggaggtgacaactggatcgacaaagacttgctcagtcttatctttgaacaccatcgtccagctccttcagcaagttcttcttctaagggttctttgggtgggccctccagtgcttttgaggttagcagtggttccccagaacttgaagtccaacatcaccactatttgaaacgaatagataattcattttagggtaagttcatttaggaacaaaactagaggtggaggcagttccttcctagtttatggacttacattgtctaagatggtgtgcctgatacattacccacaagttgggaaactctaacagttagagatctccctatagctgagactgctattaccgttgtcaggcactctgagcttgccatagctaagacgaaatagacgtgtcgtagggtatctcctcatgaccctcacattgttgagttcatgatgagagagagggtccataatttacaagaggctgaatagccctaagctgaccagcttgaggctgactaggttaaggagcttgcagtcgagcagccaatagccggcaaggatgaggagacctcaaccggtcatgatagtgattttgatgctgagcaggctgaacttgttgctggaaaaagtactgctaggaggcattacaagacttgcatagtggttttgggtaatcccctaggctcttatcatgatgctgggaggcatatggtaaccttgggtcatccgtcaaaggtcaggattgaccatgttgctgaagaagcccatgaaccgtggatccttgagtatgggaaccaacaacgatggatatctcctttgtcttctctgtcagccaagaaacttgaggagattaaggcaaggggatttgtgggaggaatccgatgcgacagacccacaagagattaattagcgcatgactagcatacaactagattgtctggtcgagtcatcacattgagcaacaggttttatttcctttgcatccttacatcagggacatagccaacttcttcaggctatgtctaacccaaatcaccttaaaatgtatcaagtatctttcagtgctcttctttccttaagtacagcatggctagccacaaccctcaccttatgaggttgggtgttactttgagctaaaatctattcctctgtagggtaggtccagatactttttctttatctaattaggctatcagtggctcgataacaccaacaacatggaagtgtcaaaagattgggaggtactcccggagttacatccttgcctctggcattagatatgttagtcactgctttaagacggtgccaacatacattcgctccatccctactctctagttgagggatagggccaatcacatcttgtctcttctagtggagaggcgtgacatactcaggctggcttgtgaggaaaatttttggaggtacggtgtacaccctcctacgcctagtactgagagtgctggaggccctcccgaaggtcctagcgacactcttatggtagaaggagctaatgaagaagaaaggcctatgcctaagctggaaaagggtgagtttaacgatgacatatctgtaataccctaggattaagagaatggattagcaaaaccctaactagttaattatgtattattgtggaatta

SEQ ID NO: 113538 - DNA, 4383 bp, Cannabis sativa
caattgtaattggatatccaactttttgtaattagattggattggatcggttcggttcaattggattggatgatgcccacccctacaaaggaccattccaaaatacatttttgcctagataaaaatattttcaagcaaaaaagcttcctagttcgagataactttgtccaaaccctaaaatgtctgatttcatcccattatgttatacacaaaacatgccctgaatgaattcaagaatttttaaaaatcaaatttgtttcatcaaatatttttataaatattaattgaatccgatatgaggaatttgtccttccagtttcttttttatcgacttcgatctcaaaatgtttttaacactgagattatcatttttatttttcggcgttgtgatcttcttccactttcttttaattccgggccatacaccgaaaaaaatactaaaccatgagttcttgcatctctatattattgctttcgccataacaacaacacaaataatactacaaaaaacaaaatcctctaacgaactcattatcgatcgaatcaaacattaccttctcaaatccgaactcttatctaaggtattgtaatagaactctccaaccctgaaatcgaacaaaaagaataaacacaattagttgttttttaaaagaacaaaatataactctcaccagggctctatagacataaccgaatcaaaagtcgtgaaaataaagcgaacctattcctaccatgccgtggaactaactctcggccttctttcccaagtctgaccctcgttcctgttttccatcttgtgaaatcctatatacatagaatgcccccactgctccgctgcatgagaaaatgaagtattgaatttaaacatttcagaagcaacagaccaagaaagtggcggtagcatattcagtggtacgttactaaatgactgaacaagtaaccacaacccggaatctgaatggcataaacagttgaaacgtatccagaaaagtaatggcaagagctccgtatattatgaattaaggttgggtttggttggaaggattgaaaacaaagaaatagaaatgaaaactgctcctttccattccattcaatttcgttacttccaaccaaacacaacctaagaatatgatgaaagcaaagcaaacaaatctaacatattgaatcattgataggtgtcaatattacaagaaaataacctgataaatgccgttaaaacactgataattgatggtctctgcaagggaaaaaaagaagataaatagtaaattttagaagcatggaatggaaataccttcaatacaagtttgtatatgaatgcgatatatatctagaactgtaaaaacttcttacctgtgctagcaagcgtacctccctcaggaaaagtatacttgcaataactgccacattaaaatcaatattaatcaagactgtctaaacaaacgtcagctgaaacacaccgaaaactcagataacaaaacaagtattacacagaaatagtatatatactaacccagttgccctttaagagctaaagaagattgttttcctttgttatgtgatcttaaactaattacgcttaaagccagaagagaaccaccgagaataacaccaaacctaatggcggctgtacttcccgttaccatgaagccgagaaagccaccaatagaaagaactaaacctgcatacacgaaaattgaataatgtcttctgatcattttgtcttaattcataaaatagtttcgttagcacctgaagtattataagataagatcctaatatagtttttattttatagtatttgaatgaaattaatttagtcgatttaaatatttagtatttaggctcgatcgaaatgggaactatagtattcatttttatgctaatgtcaatgaaaaacaagaaatagtttttcccaaaatacagacaaatggaagtttaactcctaaagctttcttgtgtcgaaatggtacttcctgttaccggacgcattgacttagcaagaggttttattgtaagttaacataccatacggtatcccaactcggaagtcgtggattttcgaaatgtcactcagatcatcagttgatgaagtgaacgtttccacaatttccttaacttcaggagattgttctgcagctgttgaaagatagtctttgccatcttcactaatttcttttacgatctcactcaaatcatcctttgctttatcagcttgtatcttcaactgttctgatgtttctttcagaataaccaacgctttcttagagtatacctcgtatgcttcctgagatacactctgaatctttaaagcttgttctttaaaggaagctaatgcctctctccaagcttcctgagattcgtcagctcccagttttatattatccttttcgttctccacttcaatttccgaatgcttctggaaatatttacaatattaatgtcacgaagcaaccttattcaaagacgaggaaattggaatgaatgaacgtgtacactaatgcaccataatgtgcttaatatcatcaaaatattaaaaaatgttttatttatttaaaatgccacaaacgaaatcaacgcctattccagaagaaaacacatttggttaatttaagacaagaaattttaaatacattgatcaattataataaacagaaagaaattcaatacacatatatgaaaatcaagatttgccctgacaaaagttcggtttcatcacagtgttcaacccttcagcatatacactatcatcaataacaagaagaaaactgtccattgttcaaaaaaaaacgacaataatttcaacatatacatggcaagcattaaaccataaaaccgccaattaaatttcacactcaaaaattaaatagcgataaaaacctcaaaattatcggcttacagaatcctcgtgcgaagcggcaaagacaaccagctgtcgagtcgaggaaccttttcgatgtagtgaaattgaagcagaggctagtcctctggttggtgcagcaaacagtcggcaactgtgagctcttccaagtggatcgaaacacaaagaagacggcgaggaacgcaaagccattggagccgctttcttcaaagagagccaagaaccggtgttacagctagggtttaatagcgaaagtgattccatcgtcgaactcattttcgctattgcctataatttcagttactgttcagggaaatataagagaaaaactagtaaaaaaaaacagttttttttatctagtttcaaattattcaatgaagcattgtctattttgcttctcctattaaaaaacaagacaaaaatttgaaacaactacaaactaatatcattctctccaataaacaaatacaacattgttccaacaagtaacttcgagcatttccgaccatgctctctaaacaaactccttagctaaagtagagagtgagccttgaagaaaatgagctcccaccatacaaataaatagctctaagaatggatagggagctccctactttttcaacgattttcaaaacaaacggattaaagttctgaagtaacatctacgaccaacatgtgcagctccattagcatctcaacattattaagtgaatctaatcaaatgtacttactacatttttattattttattaaactaattacaatttaacaaattcaaatcattaaaatattattaaaataatcatgagaggataataattggagtaacattatgaaaaatgactctccattttaatattttacctaaaaaaataaatacagaatcgcccttagagatgttcttaattgtatgactatttgtagttaaaataattccaattcaaattgcctagcttagctatagaatcacttcatcatcaacaccaagatatatataattatcctaaaattataaacacaaaataaaatatttgtaaaagcaatacaatagcatgcaaatgatattgattcacaaacgaaaatcagaaaaatttagaaagtttgggcagtgagtgaagtaagtatatatagtacctgaagtaattgtgttaacagccaatgattgaaacggaattcctactcttctccgatctccgatcagaacgaggttgatgatatttctagggtttacagagagaatcgaagaaaggacaaaaagagtgatagagtgagaaagattgagtaagggagagagcaaagaacaatgtgaccaagtaactgggcttgtgcttaggcttgggcttggtcttgggcttggcttctcatattgggctaataatagaggtctttctgatttaatttctgaggaaattatactctataccctttttatgttgtcctctttcatttttaccctcttttttaaagtttatcatttttgcctctttttttaaacattgtac

SEQ ID NO: 113539 - DNA, 5206 bp, Cannabis sativa
  modified_base (5159)..(5162): a, c, t, g, unknown or other
taattaataaataagttaaatgataattttattgataattaattataattattaaataaatagatttgacatttataggattaaaattaaaatatggcatttgtaaaaaaatgaagataagttgctaaataaatggcaaaattaaaacctgtagggcccacatatgtcgtaactgaaattggaaaggccctatccttacaaatgttcaaacaaggactgggggcaaatattatcccaatttttactcacgtgacgtggcatgtccacatatgtaggattgatgccacatggagtacagcttgtcagtaagaagaccaagtcaccatgcacaacgtactagttgatgaagagtccaaatacttaagcatgacaaatagacagcaaactggccaaccaggggggtctagccggacctcccctagccagacttagtgccaatgtaggccagccagcctccagcaaagggtaggtcggctaatctatcttctagcaggcacttttggtgcctctgtaactttcaaccttgaattgtcctgaaacaacccacaaaaataggggtttaacttcagttgttcacctattacttagggataattatcaagttcttttcttatttatttattgtgtaacaaataggtgatatcttctcattttaaagatgtcaacctcatatctcatgtaagctctctcctatataaagagcactaagctaaacctaaaagctctaagttttgaagcctaagttctcattctaaaactattgaaaccctagctcactctctcttctacacgccattagcattgtagtagagactaagtcttcttcatctcatctacctgagaactgcctcacattctcattattgtaatcttaagagagccactctagaacttacaatacttgtgatctgagtggtattatctcttatatcaatacaactaaatggggagtaggttgttaccctttaactaagggggccaaacctctataaaattattgtgtcctttctatttacttgttctcattgtttacacgtggtaattttgatcataaatacaactccgttgtcggttggccaaatttgagttcaacaatgagtatgacccccatgtggcttagttcattggagctaagttgacactgcctaagtctaagaactttgacaaggcgtgtggtggaaaagtgatggcaactgagcttctcaaagttttcattgagagtgatgatccaaggcattgagcctttaagctaaggcctcttgtgtctagtaccctcactgagcttcaagctcagataatttaggatgattactatcttcctaaaattattgtccaaaagcctcgacatggtgctcccaagggatcccagaatacctgttgcagtgcttggttgagatttcacatgaatgtgagtgcttacttgcccttgcatccacgattcatatccatagctgacttctttggtatcttcccttacaagataaacccaaatgactataggattctagccaccttcttcatgttttaccgccttaggaattggcctattccaactcctcatgagataaactttctctacggcttgaaaagaagtgtgacccacataaataaaggattttatcacttccatcaatttggctcattcatagaacacatagccaagagtaactgtggcctttactaccaggagtacttctataatcctgctcttctattgagacacattaccttccaaaaagtcatccctttcaaaagttttgctcctcttattgacatgaagaggagagttggtgccatgttgcttgaaattgatgtatgtgagagagatggttgaaccctctttagtattgaaaatcttcagaaggttggatttatcatgtcattccagagagtgtacgctgatactagcttcaccgatgaatcttgtaccatgccactcgagcaaattgaggaagatgctcatagtgctatattattttgtctcaaactgtaacgaaagaagtgacttctatttgaaatgacacaaactattcagagagaatctttatgttcttcgattgggatgatagagaagttacctctactaggactgctctagagaaggatggggaatccataggctgttgacgctccatgttgtgttcttgacttgttgccttatttctctttgttgtactaacctctagtctttacttttttgtagacaatatgagcttcttggctactatggcatcttgttcaaacttgaagacgaagattttgacaccaaaggaaattgagcctttagcaagggaagtggttaaagacattcatactgcttctgctgctttgaaaaagaagatcaggaaaagcggtagaactactgatgccactcttcctactcaaaaatctagtagggagaagtctaacaatggtggtgctgatgaaagatctccaattaacctctctatggatgattatgaacgtgccactatgaactcaggttcgaacttgatggagtgattgcatgagtaaggtgcctggctccttctgaatagtgaggcactgatcggtgctagggctgagaacattctgttgcagtggttggttagcaccaagcctttgcatacaatttctcaaagatgcttcaccaacatctttgtggtaatagctttgtcttgactctttctaactttagctttcttttcttttattatcacctgacacagttttcttatcttcaagcttgttttggttatgcctacaccatggacaatggacagaagaaggtagtggagcttactaagaagcttggggttactgaagatcatgcagtcgatgtcgaaaaccaggtgactactctgaaggagaatgttatttcttttaagagtgaagtgaccaagtttgaaaaacaatgcccagaaggcatcccaggtcatgttattcaggtcatgaccttgagacacgatctcccaccagatatcattcaacacggagtagtgtcggtttgtcacctagagaagcaaagcattgaggtctaagggttaaatgccattgttgacaattctcatttttggttggcgcctatttacaactttcttaatttggaagagcttctagcagataaaggcgcctctaggaaggtccaatattaggctccccaatatgtgacatggatggaaagctttatcgtcagggactatcaatgccatatttgaggtgcatcactggaactaaaattagtgtcgttatccatgaagttcatggataattctgtagagatcacgcctccggcctgagcctattagagaaaatcctttatcactggtattttttgacccatcatgaagaaggattgtgttgagtatgtttggaagagtgagcaatgccagaagtacgccaaggttccacgtgcaacaccaactaaaatcacactcatgagcagcccttggccttttgcagtttggggcatcgatttggtcggatccctccccaggggaaaatgagaagttaaatacgcaatagtcagggttactactttactaaatgggttgaggcagagtcaatgaacaccgtcaccttaaagaaggccttggactttgtcatcaagaatattgtgtgctgttttggacttccatacaagattgtctctaatgacgggaaacagtttatcaacgaacacttcaccaacttctatgcctaagtacagaattgtaagaagtttctcaattgtagccaggccgcaagctaatgaataagtggaggttgtaaacaaaattttgaaaacaacgttgaagaagaaactccaagcgtgcaaagctcattggccagatgagctttcgcgagttctctgggcctataggaccatagagagaacttcaataggacacacgccatatgtgatgacatacaagtgtaaagaagtaatctcagtagaggccacgatcccctctcactaccgagatacctacgatccttcccagatcactccctgctctaaaaatcatcagatttaaatgaggaactctgagaacagtcacatgttcagctcgaattctactagattaaccccgtgagtggtggtctacatctcagatggaacttttgttacctggatagggttttctctaaaagttcccacatccaccgttcttctcttgttcaagaagtcacacatgtatcttggtcttctaggtcattcttgctctggtcaacctaggtcttatagttgtctccagacgaaggggttgtgaaggcaactctagtgagaattctagaatgaactctgggtcatcttgggacgacacgctatgagagtgttcattcaaagcgttgtaatcactacttccctcaaagtagtcttcaacaagatcataggtgtggagagaatttaattggttgctcaagtttaattcttctctctgaacttgagggaagtactcgtactattgtctatgggcaaagtaatggcacaacttacctctttcatctcgaaaatatttccaagtataaagtagctcattggtcgttacccactggatttcatagcctccaattttgaagtagcatctcctactacttccttcaagttgagcaggaggtccctttccccttatagcgtctctaggtctggtttcttgagaacattgaggaggacttagtggaggaatcctatcgattctctcgttatttcaaggtcattcaacatcaggtggaaagcccattggttggcgccctcgagcttgaaccctcttggactcttgatcgaagttaccctccttctgggaggtctctgcacctggtgtttgcctagtgcctgctcggttactaggtgtagcagtggtgttccaagcattgagggttttttcttagacactagttcccacgtgacgaattggtcaacaaggtatctcttttaccaactcaaaaaaacctcttcgagaagtagttttgtgattagagcaataagcttctctaatctgttgagacatgttagctctttgttgttcctgctcatcgtgttggccttcaatgttcttccagttttccccaaatcagtgttgaaactgttcgtgttgcttatcaagagaattttgtagctgttgtcgcaagtcagccatagtttgactgagctgagtgacctaaggattggtctcctttttgggttttatgccctaaannnnactcatttcaatataatcagattacttattaatatagatcagaa

SEQ ID NO: 113540 - DNA, 1826 bp, Cannabis sativa
tatgaaaaatatattataactttccacaagcaattaatacaagtcaatcccaaacattgtattgtattaaaaaatactaatacaatacaatatagtacaacacaatccaacacaatatattacaatacggcgtaccaaactagccatttacgtaatttaacaagagtaatatttagtgatatttaaagagttttatcacccaaaaatcggttaaatcgtataattccatgagataaaactacttattaagcataattggctccaagccctaatctcctatagctcaataatatatttttgtaccaagtaccaacacatcaaacttggacttagtccaaaagaatacgatataccaaaacaataagtgagctagacaacgtaaacatacgtggtggtacctaccattaggccagagaatcctccaaaacaggaagcacacacgaaagctcgctttgcttgtaattgcgaaacgtctaatactttatttataattattaattattatttgaatgaataattatgaaatccatctgaatccaaataaaacccattcatatttttatataataataaatttgtacatcaaagatgacaataataattacaatttcccctatcgaaattacatatatagtactccaatattctcagcttcaaattttacccataaatcttctcctttatcatcatcatcatattcataccctgcatatacccatatacatacaatcaaatgacttttattgtaattaatgaaaaattaataaaagtaataggtaaaagtaaaagacttactgctgaaattcaatattgatggaggaggcggttggattagcgattgcagcgaaagcggtttgggacaaaaccatggttgtgccagtggctgagggagcggaaaccaaagaaccggcgtaatcgacaatcttgacaaggatagtcttatccgggatacaagtaccaggttgggatgcgctgatgcacctcacttggtactgtcttccgcacgaggccccattgtcccagatcgcatctccagccgccccaaacaaattactcgacggaaattgcgatgagtctctgtcgtaacacgccgtcgctatacatatacataaataaacaacattaataatttacattagagagagagaaagagatagagatggattgattaattactacttacggatatatggaggagagtaatgagctgaggtgccgacgtcaccatgggtggtatggagattagtctggaaaacgaacaatacgataaggataaataatagtgggcgtggccaagttttagttctcattttattcacctttattaatgaaacttttacggacaattggaaatctgaatctctcatcatcatcatcaccctttctctaaactatatatatatatatatatatatatatatatatttgtttgaaatttgaataaaatatataattagattttttaatatttaattttagggattctatgtattattatagtaatagtcaacggctggaccctgatttgtttaatatggtagttccagttggaccattagttttatcaaaaaaaaaaaattgaaagagaccaggtagatcttttctattattatttatttctttttttagaggtcactctctcctggccagccaaccaacgcgttttgagccgtaattattcattttatttttaaaaaaatatatatttatatcgtgagtaaatatgtattttgcaaaagttaccaactgaaccatgtgttttgttaaatgacaaaatagatcatgtattttccaaaacagtaaaaataaaaccctgagcttaattt

SEQ ID NO: 113541 - DNA, 5042 bp, Cannabis sativa
  modified_base (5004)..(5012): a, c, t, g, unknown or other
atacctataaaataaaaataaaatatattttaaatattaagataaaaaaattaaaataaaaaaattatatgaaattttattagaattttttttaaaaaaagcatacatgatttttaaaaaatgtggaaaaaaataaaactaacttttgatattaaatgaatataatatgaaaagaaattttaaaaaaatattaaaatttttttaagaaaattaattaaagttaattattttttaatattggggtgcacttataattttatagggtgcaaataaaatttttcttatatttttataagaaaagttgaacttaaaaatacgttacatttatatttagacatactatttgttaagttaccattataatgaatataacatattttggctttttcattatgactaaagaaaataaaaaatattataaaatgtaatattattttaattaaaatagtacactttttaaagaaattaaaaaactacatgaaaataaaaaataaggtaggttgcaagttttcaaactttaattacccctatagtttaggttcattataaaaagtgagcagtgtgcccttaaaaagctctgtggcagttagtatctgtttttatttttaattgttacaacctcccaagttccctttattccttatttattctagcaataacttctttttttcaaattttaaccattccctcatccctgtttttgacttcttcttctgcatttccactacctgcactcatgcttctgaacttgttcttcattcatggaaaatttactaaatgatatgaatcatactctaatcttgaccgactctgaaagagaggtgcaaactctccctactggatcgaatcatgaaggtcccccacagacgaattgtgttctttatgccaaggtcatttcatctcaggacattaataggaaaacattacgttttaaaatgagtgctttttggaaagaccaataccttgtcactattgttgatcaccactctggactctttctaattacctttggttgtcttggtgatctcaagaaagtcttattattggaaccatggtatttccaaaatcatcttattgtcctgacttcaccaactgcgctacaaacggccacaccagaagccatgtcactaactcaattctggattcaattgcataggctgcctttttaagtaaatcaaatgctttggctaaatgggtaggcaatctgataggtacctatgttgatgtccatgaagactctttaaatgaaggttgggggccctttctgcgattctgtgtcatccttgacatctccaagcctttgcttaggggaaaaatggtcaaacttaaggactcacatgatgaattttggttagaattttactatgaatgtccacctggattttgttttgaatgtggaatcattggatatccctttgaatcatgtcataaattcttgagaacgaatctacaatggtattgatccatcattagcctatggcccttctatgattggttctccactacccgaatctggctatgaccattatagaatagattttttaaaggtggagtatggccactattaactagacttggtaagaaatcatttactgttgctattcgtaatctgtccacaagacctcttcccctgccaccgaatctaactaccagagataattctacaatagcaaggccacaaaatcaccatcttgcttctccttcatgtatccctccaccaatcctaccaacaaatccatcccctacttgcaccacctctacagattaagtcgtcattatccctttcccgtcttatcttccaacttcaccaatgattgccacttatccacccataactccattaattaaagaagtcagccactctccacttctgcctacaccattaccatcgatccctccaacatacaacattgttgtcaccactcatccctccattgcatcaaaaagttatctaaacaactctaaaggcaaagctgtcgttgcctttgatgatgcatctgaaaatatcgatcccaataaaaaatttaaacgccaatttggcttgaaatctcttcgaaatgttcttaaatgttgccgatctaatgctatccatgatcagtcggattcttcagcaccaactggccatgcttggactctgcatgtttccaacaacaactccttggattccggtgagttactgtttgaaaatgtagtggttgttgctatgcaacaccgcactcaaccatgaatctcgtaagttggaatgcccggggcttggggaacccgagtgcattcaggcatttatgcttgcttgtaaaagagcaagctcactgtgtcctttttattatggaaactaaattaaagtatggtagtatagatagttttcgcaataaattacactttcctcatggcctaaaagttccaagacaagcgcaaggtggtggtcttatgctctaatggaactcctatgtcaacctatcaataaataattattcaccaaatcacattgattgttttatggaatgtcaagatgggccatctctgcattttactaggttttatggacatccatgtatttctcagagaccttatacatggacattgttatgtagatgcttcgatgtggcacctctatctccttggctggtaataggggatttcaatgaagccatttcacatgaagataaaattggaggcccatggagaagttctacacaacttgataccttccatgctgctatggatagttgcaatctttgccaaattccatttgaaggagaaagaacaacttggaccaacaagagtcaaggaaatggtaatgtgaaagaacgtctagactatggttttacaaataatcactagtaatcaacttttcttgctccttcttagaaacatctggacttttttaagtccgatcgtggagctatcaaagcaaccattacttctcttattgatcaggttgaaatactagagtacagatcaaggttttgttttgagaaaatttggctgcaagaagaagcttgtgctgatataattcctgctaattagagccataacaccagtaaccctttctctcaagtgattacaaacatttctcattgtgcaaccgacctacagaattggcattatgcaacttttggcaatctgaaaaaagagattaaagattctcatgaccatggctgccctctagaattctaccagcaccaatccacagcattttccagcactacaaaattcagaatcgattttggatgagttgttagcaaaggaggaagattattggcatcaaaggtcaagaatttcttggatgcaatcgggtgattctaatacaaaattcttccatcagcgtgcaaatgccaaatcagctaataatcgcattaaaaagctcaaagattcaaatggtaatacttaaaacagtacactagctctgcttgatattatttccaactactttcagaccattttcagcagccaaggtgtggatgaccaagccattaatactatcttggcatctattccaacaacaattgatgcgaattcaaggcatatcatttcagctccatacacggctacagaagtttgaaatgcggttaattctatgagtaatgataagagccctggatatgatggaatgtctgttatgttcttcacctattactggcacattgttggctctcttgtcactgattcaattcttgatgtcctcaacaatggcgcggatcctacaatactcaataagaccatcatcactctcatccccaaagttaaaaaaactcagctcatcactcaattccgtcccattagcttgtgcattgtactctataaactggtctccaaataaattgtgcttcgaatccaacccttcttaccaatggtcatttctgaatatcaaagtgcttttttgtctcaaaggttgataacttacaatgttcttgtggcatttgagctgttacattctctcaagaatcggaaacaaggctcacaaggttatgctgcaattaagttggatacgagtaaggcctttgatcgtgttgaatggcactataagttggaacaactgttattcagcttatactttgctgcttacagtcagtttcttattcttttcttttaaatggaaaagtgcatggtgatttgatccctacgcaaggcatacgtcaaggcaatccactctcaccatatcttttcctcatttgtgttgaagggttttcaaggctgctgcaaaccgaagaaagcaacgattttttatagggtttaaaagtatctagatctgctccatcagtgtcacatctgctttttgctgatgatagtgtgctcttctgtcgggcaaggcatcaatcagcaaggtccattaaacatgttctagacatttacagcaaagcatttggtcaagctattaaccttgataagtgtgtgctctcgtttttaccaaatacacgacatcgtaatcaggtttattttcaacatcttctcaatatgccaatacaaccttgtcatgagcaatatcttggattaccatccttcactggacgagatacaacgaaacttttcagtggaatcacagataaaatttggaaacttcttagtagttggaaggagctattattttctactggtggaaaggaagtcatgttgaaagctgtggtacaagctattcctacatatgtaatgagttgcttcagattgcctattacattgtgtaatcaaattgaaagtatgatggctaacttctggagaggctcgacatcatttggcaatgcaatccattggaaaaattggaattccctttgtaaagccaaaattcatggtggcttagggtttcataatttcatacactttaaccaagcactcctcgccaaacaagcttggcaattgtttgaatatcctaactcctttctcaaccgtattttgcatcataggtactttctaaatggacagtttcttgtagcagatttgggagcttgtccgtcattgacatggagaagtataatttgggggaaggaacttgtaaagcccgcttagttnnnnnnnnnattagcagttgtttatgtttaattatgaaa

SEQ ID NO: 113542 - DNA, 2556 bp, Cannabis sativa
agagagagagagagagagctaatgaccaaggatgaattcaagatttaaagtgagaagaagaaaacttaaaaaaaaaatactcttagaagaacaaactaggcaaaggcttcttaaattcattcatttctttcatcttactagagtagtgatggggaagtgatcactttacttctctagctattgatggggaagtgattgtatttgcagttcttattgacgactctatgatcctatagaagaagcttgtattggtcttggcttaaatttaaacctctattatatatatatatgcaatctatcttaacaattacaccaaaactaatattatatctataaatttcatattttataataactatatatattataaatttaaaactaactaaaatatatatacatttttttttaagggaaaacaactgccctcctcactgtccgcccaatgactagcaagtgtaataaatttataatacggtcaaaataaacataaaattaaagtgccaaaaaaaaatcttcaaatatacattactctatctcataataaaattactctatctcataataaaataacttccgcccaaactccacatatcaattttgataaaatagaaaaacattttttataagaaaaaaataacttaataatttggagctgcacttataaaaagttgactacataccctatcataagaatagttaataatcatagagaaataaactaataacaagaaaaaagtatactcagtaaaaatatttgaatctatattatgaccaagtaatttttgcaaatgacatgatatattataaattttaacatgtatatctaattaaagtcaaatatatgcaatccactaaataatacttccatataacaacattacccccattttgttttgaaacatataaacctaattaatttatgatgaactccgtcaaaattaaaaatttatacatataaaacgatacacaacaatatatcttatgttcaaaaaaaaaaagacaatatacatcttatatgtgccacaatcaaacaactatttagacaattatgggaacatcgtatatgaagttaaaaaataaaactatagagcttcaaaaaccgacaaacattaaaagaagtaagatacatcagcacaaaacacttgagagcagccaaaaatcaagtccaaaataccagatatgggcaacacaaacattgagaagaacagcataggaacagtactagatatcccaaatttgtagtaaaacacataatgcgaagccatgccatgtatgcttttatatcaaacgaaatataccaccaaaaatatgtaagactgaaaaattgtgcaaactgcagcatgaagataaataaatatcctccaaccttaaaccttggctaaactggtactaataagcaaaggctgcacacctccaggattcgagacataatcttctcaaaacatgtccacattgaaagcaaaagccccagccaccacccaaaagcctgggaaaattcaccaacagaatgacattcacgagtaaaagcagaaacctgaaaattcattgaacacaacaaacctcaaacacgacatgaacaaaaaagttccacagatacccaagatacaaatatagcaaatacaagtcatttaaacaaaatactagcaaaacatatgataattaagatagtctccaaccattttccatcacctataaagatagaccaaaatccaaacaaagtaacacattgaacgaaaggagatataaaatgtaaggttgagggttttatgtcaaaccaaagcccgctgcaattttggtatgtagttaaaacaaacagaaaatttaaacaaatgaaaagctacatgaccacatccaagataaagatctttgccaattacaaaaggaaaactaaatgatatactttacacaaaagtagtaaacatagtaaaaagggaaacaaggactatgataccacccatgcaatgttgttcttgaaacaccaccacagttgccggccagctttaaaaaggatcaatttaaaaaaggataattatgtaaagctgaaattattatttttcacaaaatagataggtcgtaggaaatccagtgttgactaagtaaaaccatggcagctatctccataagctttaaaaacaaatgatgcatttacctaaagagaaaatatcatcatatagggagagattcaattagacaatgaaaggtaaataaaactaacaacttatgtttcagaaaataaagtgattgtaggaaatccaatcatgactcttgttgatgagtaaaacaagaaatagaaaagattgtgtaaataaataaaataattacagtaaaatgagcaaaatagtaaatagatgtgtataaaataaaaatatatatgaataatagccgcacaaaacctgagacgaatgtatacctgggtttaggtgtgaatacataaagttaaaaacagctgccacttgatttctttacgaagatagggttcacctcgaagaggcacgatacgctacctctataaatacattcaccaaagctattagctagaaggacagacagagagaa

SEQ ID NO: 113543 - DNA, 1884 bp, Cannabis sativa
  modified_base (43)..(77): a, c, t, g, unknown or other
gtaagatttcttaaactttatacattgttttagaaattcatannnnnnnnnnnnnnnnnnnnnnnnnnnnnnnnnnntagatcctggtaaaacaataatccaacagaggactaggccagttgccgagacttaagacaggggcaaaaagagcaactcccaaggcaaatcccttcggacaacccactgtcactcaagaggaatatcaggcactgaagtgaagggtggaagagcaggaatcacgaaatgagtggcaacaacaaatgatgatgactaagaatcaaatcatgagtgtgttcgaacaacaaatgatccaattggacaacactgttccaggatttaacaggcccgagatgccttcgattctaccatttcagtctcctagccatgttgctaggtcttcctcacagactacccatcctggtgatgacgacgatgctgctatcgatttgtagtttttcttagtctgcagtgtacataatattactgtttatgaattaaaaatacttttatttagtttacgacgttttatgtagttttgtaattacaatataatttttttataataaatttaattatatattataaaatttaattttttttaaaaaaatacttttgccaacgagttaatctgcgccggtaaaagtatttaatattaattgttttatcggcgcattaactcgctggcaaaagaatttaattttttattattaaatagatttgttgatgagttaatgcgtcagcaaaaagtaggcggcaaattgagaattagcgccaaatttgtgccaattcttttgccgacgatttaactcgccggcaaaacgttgacaaggacacctcagccgacactcaattgtcgacgatgtacttatgccaacaaattaattctccggtgtaaagtctttttccggcgcatctactaatgtcgctggtaaaagttgatatgtcgacgagccattgccggcgatctttttcttgtcagctaaaaagaacgtcggcaaagctatgctggcaacttccccttagttttgccagcgagcttcgtcgctggcaaaaggtctttttcttgtagtgactcttaagagacctaacatctcgtatatatactactcatagttaattgcattaaccaacttttgtaagagaatctcgctagaaattgttttgggctttggtctaagacccaagtgctagaaggcacttcatttttctgagtactacttaattattttggaattttcactattacacaatagtctttttgcattagttaacactcaaaaccgacaaaaaaaggctacattaaactttttcgctaatttgagattgatgctactttgtgtcagtataaaacagatatttaaattatttacgtctgtttataaaaagatgctataaaacgtctttttaaacagacacgacattgttgaatagctcatttacacatgaaatgcaacctatccttctattcaacacacaaggagtctccatccaattcaatcttctcttctctttctctcttctctcattctcgagctccttgcccgactaagcccccaaacccgatgacccccagccacctttaacccccagtacggtcccccacccacgaccccaagcctcgaaaaatgtagcagtgacaaccccaatgggtacccccgtcctctttctctttctccattctttctgatcttctattttttttgttctgcatctttctcttgtttttctttgtaggtggtacactcggccagtggttctcggtagttttgccctatattctttttattttttttttggtaaatagcggcataagtacttaaagttttgagtttgtaagcggcataaacccaatgattttttttagtggcataagtacccaatgtt

SEQ ID NO: 113544 - DNA, 3653 bp, Cannabis sativa
gctagttgcaataggagtttctacatagaatttcgtaaaaatacaaaaaaaaaatgttttgaagtgtaaaaatgaaaaagcccattttatttatttattttaaaatgaaaaattttgttaggcatatctttttttttttttggttgaaagtttaggtgcatgtttcttttcctttttatctttttaattcttttgaaatggatttaggcgcctcttagataagtgtacaaatattaaactttgatatttttttttatttacttattaaatgtatattattatagttgtatttttctaaaaagaattagagttatgatatagtgacgcgccaggtgagtcgggatatttttactcagtcacacttggcacgtcactataagtgagtattgttcaaataataaaaattagaaaattttgagttttactctttagtgatcctctttatttttagtgacacacattataggagactaacatcgaacgtttagagactaattatacatgtcactaaaaaccactcttcactatttattgacctccactttttgtgcggttcactaaatagtgtcactaaaaggtcaaattgtagtagtgtccctacactgaatactttctttattagattgaaaagatttaagaggagaagaattaccttttgatgactttccattgaatattttacttccaatcttcttcatgtatttttcaaagttcattacaactgttgccattttatcatcatcatcttcatcatttgttgcttcattttcaatacttttgaaagttatggtctgttttttcattggaagcactcgatttacctttttgatgaatcttttgattcaatacaaatgtacgaagagaccccatcaatttttctactttcatagagctaaaatcctttacctcctccatagcggtgagcttaatattgaacctgttaggaagcactcgaatactttttctaacaagaatagaatcatcaagtttctcaccaagagtaaaatattcattagaaatattagataacctttcattaaattcatataaagtttcattatcatacatcctaagatcattaaattttatttgtaacataatgaatcgtgaacgtttaacatctgcagttccttcaaattgagtttgaagaattatccagcatctttagcaaaaacacaagtagaaactagttcaatgaagctttccctaacaccattaaaaatggtgtgaggagttttattattagagctagaaagtttttctcttctgtataaaaaaaaaaaaaaattagatattaacttcatgtttccattttcacctttttaagtaggaggtgaccatccagacaaaatcgcttaacatactttctcatcttgagttttgatgaaagctctcatcctaactttctaatagggatactttgagtcatttaaaagcggaggatgatactccaaattacctttcgcaaaaggaaacatttcacacaagaaattaaacaaaaaataactacaagatcacactaaaagtatagtgaattcttttgatactaattgaaattctatttttataattaccaagtaaaattaacaaacaatttaattaatatggaactgttataaaattatttgaacaaaattgaaacatgttatattagaaaatgaacccgatagatcaaaattatattatagaaagtaaaattgcataaattaaaatgacacacgatattttgtacgtggtatcagcaatccttacacattgctaccaatctacggggtcacgcccagagataagattcatattagtcaaatttcaacaagtacaaagtaatagacttaaacaaaacatagactccctctaatgattttactgcaagcttgactcctatttgttgaatgaatctccttaagacacaaaggtttgaactccgttcaaattacttgatgaatgcttgcttcctcctgatgcaatacttgtagaaatcttcttctgaagatagtggtgcttgtttcctcccgatgcaagacttgtacaaatcttctcccgaagatagctgtgcttgctttctctcaaagaaagacttgtagaaatcttctctcaaagacaacagtgcttgcttcctcctgaattaagacttgtagaaatcttctctcaaagataatggtgcttactttctctcgaagcaagacttggatgaaccttctcccaaaggttgttctttatgttcttcactttgaaatttactttacataaaagtaatcacaaagatacacaaactcgccaaggaatagcaaaacaactatctcttacaaaagaaacactctcttctaaaaatataagaaattaagaagtggaagagttaaaaccttttgctattggtctaggtcatatttataatgataaatggcacacaaaaccgagctcaaaaggtctgaatacaaagagaaaatattaattagtttccttataaaaactcactaaatgacaaaattcagtctgaacagaaatagaaagtgcacaaacgaaatccttatctgtctagtcaacattgtgaatctagattccattaaagtcaagttcatccccatgaaatttttcttggacattacacaacctagctgaagagattaatgagatcatatcagaaaaggaataaaataaatcaattacaaagaaatatcatatatagatatagtatttattacataataaagtattttattcttaacatataaaaacacaacatgagtaacaatatattctcaattaatacaacataggtcatgctttacaagcaaaaaaacaatcaaacaataaatgaaaaatattcctaaaatggaatgtaaaaatttgttcaaacatactgtcaatccattcaaacagattcacggaacatgaatagattttttagcaaaatttccttatatacataaggaaagatacattaaagacacaacattacacgatttcctgaataaaaaatcaacgtttttaaaaagtaataaatataattactttcattaaacataaaaagtcaatcatgataatttaaataaggaaactctatatttatttaaccaatataacacaatctcattttataaaacttttcatagcaaaataagatctcaaccttattttgaacatacttacacataattaattttgtcatctataccaaatatgccaactaaagactttacaaaagtaaattaattctagaaatttcagtaaatggaaataaatatcaaacttgtggcaaaatatccaaaattctctttcttcacttttcagtaaccttaaatcctatgggaaaaatggacataaacaattacccaaacattctaaaagagatcttgccccactaattaaagatactaaaccatatttaagtgactctaatagttagattgtcgagtgctattattaccgagcacaacacataaaaatattaaaatacacatataacatgcatgacacacctagaattcaataaaatttctgtaattaagttatttatttttctattgcctacttctaacactaggtcttatttctactaatatacatagaattaaaaataataattaaattactattataaaataatataaaataaatgagaagaaagaagaagaagatgaagagagaaagag

SEQ ID NO: 113545 - DNA, 2082 bp, Cannabis sativa
  modified_base (1978)..(1982): a, c, t, g, unknown or other
aaactaagcggtctttacagttgcaatgtctttaggagcataagcttcatactaaatataagaaatacgagttttgttggccctaagcaaatttcttaaagcggatgtggacataaatagtatctcgatagacttggcaatgaataagtagtttagaattagcttcaactcaggtctacaaccgaggtaagaggttttcgtggattaatgggatgttatggaataaatgtttatggatctctatgtccttagtggaaattaagccaaaagaattgaaacagaggttaaccattgcaccaatgttaacattaccaatcagtaagaagaaattatgaatcgatgttacccttctgaacaaggattaggttgtattctgatacagtttaggaggcttgttgcctgtatacctagaccattgaaggagtatggacatggtatttcagtcatgatattgagtgtagttgttttgcactgaaagttgggcactattatctatatggtgaacaatgtgaagtctatatggatcacaaaagcctcgaacacttctttttttggaaggatttagatatgaggtagtagcgacgattggagttaattgaatattttaacggagtgattcttaaccactccgggaagtagattagtagtggattctctaaatcgaagaggtctaggacaagtttgtaaaaagaaaaaatctcaccaaaggtagctggaggtataaccagaacagagattgagttcgtggtttgaaaacttattaatatcacattgttgtttgatttattaggaagaattcaaatagcccagcaaggtgactctaaattacaggggatacaaggaaagacttgggaacggtttggcaatggacttttgatttcgtttgaaggactttatgattgaaaataggggctgtgtgtaccaatcagataaggatattaaataaacagttctgaatgagtcttatattatgtcatactctttacacctaggagtaactttgatataacacgatgttaaaatcctctaatgggtatgaaagatgacattgagaagtatgaattggatgttcaacttgtcaaccagtcaagaaaaggtagggcttcatgattttatctaggtgagtaggaataggtgtacaaagtcagtacaattttctgtatgaaagcggaatatgattaaatcagattaatgtgctaatctatttttcaagaaaatagtatctcagattaagatttaagtttatctctatacgttgagagagtctgtgacaagcatgtgtgatagattttgaaagttcctgaaataagcataatctgttgaatgcgttttcatataataacaattatcagagtactgttaatatggtattgatgtagtctaatgattcaagttcatatgatgcttatataagagatggaagagctatgatgattcaaggtgtagagatattaaattctaagttgagaatttaacctttcttcaggtggttccaaagaaagggaaatttggaaattagaaagaaagggaagttaagttccaggttaatcagttcattttgagtttttgaaaagggtaggtcaggtagcttatcagctagccatactccttgtttttatctgatgtttacaacatatacttcgatgtttcagaagtatgaggtagaagatatccatttacagagttacgagaatattgaatttcaaacagacttgtcatatgaggaataatcggagcagaatttgaacagaaaagagaaagtgttgcagaacaaagactatatcattagttatcgtgttgtgaaagaacaataatattgataggtgatgtggcagttgaagtcacagtggcgggagctatatcccgagttgtttgagtaaattttgaggacaaaatttctataaggcggggatagttgtaatatcccgaaaattatattgataattatttggctatattttattaaatatgtaattannnnnatattaaagtaagattataatcttacttaagctaattacgagttaattagtggaatttgagtaaatgaatattatatttttgaaagaataacctagtaac

SEQ ID NO: 113546 - DNA, 2691 bp, Cannabis sativa
aagtataaatgaataaaaagtcaatatataagtataaatgaaaaagaatagtagaaagatatttttagctatgtgcaataggtttaaatttaaaccgcaatatttaaagaaaaacagcaacaacaataacactctttgttacatagttgatattcttagatatgtgcagtatgtttaattttaaattttaaaagagattaacactttctattatatagctacataaatttttaaagtcttaaaaagttataacactaaaaaaaatgttacagatctgttgattgagattttcggaaaccactaattacgtattagcaaagatgattaagaaaactggaggaaagatttttacgtggttccagtattaatgaactgtagtctacgagtcacttttatttatggtgggaatgtttttttgaataaagaatattcaagttacaatataagggctcactttagtgtgtgagtccaaaattccctttttccattatagttccaagtatttataggaaaaaagaaggatcaaagaagggaaatggtacatatctcctcggtctctaggtgctacctagcctccgtgataggagtttggtgagataagatttgtcccatgtgcggttgatgtgatagtgcatagccgtcactttaccttgcctaggtgaatgagtcgtcagaatagtatggcttcataatgatgttaatcatgtgccacattagtcatatacaatgatttgcttcaaaacccgtgctaggcaaatagttgagtctcagaggacctctaatctgggagcttggcacctctcgaatggctaaagcaatctgttgattatgtatcctgagatgggggtcttggatcctcctaaacgtgccttaacttagcgagttcgagtgcaaagtaattccacaagtagtattaatctctttgtgaatgaggccccctcaaccacgtggagctctgtatgtttgccacatattttggtaaaaaataggttcaacatttacccctcaagttccagctcataaaattttgaggtggaagttgcaataatgctttgtctcttcagttcgctcttgggggtattaggtgtgacgttagcttcaaacaaagagtcccagccatacaaatgagccacacattatacaggtgttggcctatttatcaattgtgtctttttacctcggttttgatgatgtcgattgtacttcttggcaaaaaagaatcctccccaaaatactggcgactctctacccccagtcgtcccacccattgtgatgtaagggctggtccctcttccccattatgtttcttgtgctaatggctgggaaggcaatgaattgaattcctccttgaggtgcgttcatcagcttcagaggatcgttgtggagaatgggattattccccgcccgaaggggtttttcatcggctcccctaggaaaaagagaccccaaaccatagctatgggggtttcgaagtatggagctaggcacatctaatggctggggcgactctcctaataaaaaattacttcatcaactttttagtttttgtcggactaactccttttcaactgatcctgcaaggctacagactgttagctgagctatttattttctatagtgacaaggggtgggatgttcccactcatgctgaagttttgtatatttttataaacttgttacaatccttaaaaagggagacaaatttaaagataagttctattctttacaacctcattcagacattgttgacgggaaagtcccatataattttaagaaaaatgtaaaagattttaggcattgattttcttttcctctggcttcagggactttgaatgtctagaccttcttattgagtggaccaggatccttcttctactccaaacggctcctacacaactctttcgggaccacgaggcagtattccaaaatttatctaaggaagagctcaacattggggacttagtgaccacttgaaactacaacagggtaggtctcttggtggccccccaaagtgtgcatgactgtaatcttggtctagtcacttgccctaatgcctaggacaatgtagtggaggaggaactcagggatttaaccatcgaggacgtggagaccagttacaacacctatcgtaggcagaaggaggaggaggacttgatcgcttaggcccagagcgcatggagagggaagcaggtctaggtaagagccccgaggatccgcgcccacaatttcctttccttgtgcccaacgtagggactttggggtgctacctcttctgccatcagtaagtcttcactaactttgtttcatgttccatctattcaatagtattcatgtgtatagcctataagcctcgatgagaggctcaataggttaaggatgccctgctttcggtggggtgacagagagaaaattagctatgtttcattcatatgggacttcttgggtaggtcctagatgggatcgagccttcctgtccctatcttgctagatcattcttcatacttagtttcaagttggttcctcccctccaatagctacttaggggacgacgactccagtgatttggtctaccaattggttaagacagagttggggcaccggggtaggcaggggtgtgcataaatcgatccaatccaatgagaaccgaccgatccaattacaaccgaccgccaaacattggatatccaattg

SEQ ID NO: 113547 - DNA, 1820 bp, Cannabis sativa
  modified_base (1778)..(1792): a, c, t, g, unknown or other
tgaaaaattcataaactagacacaatcgaagaagatgaaccctccttcaagcacacaatcgaaggttgctagtagctaatctcctcagttggctcgatcttcacacttgatttcttgctctgtttcaatttagtttcggagactagaggaacttcaaatctactttttagattcaccacgatatgatcagatgtaaaaattggaggaaatagtcattcttcccaacatccacatcttgcaaaacttttttagcaatactcaactagtcaaaaatatcttattgaatcccacttttcctactcaaaacctctttcgtttcctgaggagatcgagtaaatcttcccttaaaccacatcatcattcttcgactcatcctgcacttctagttctttaatatccagaaccacattcatagatttggttttgatcctatcccaaagaaaagtgccaatttttttagtcttatttgccttagttttttccaaattattttctccctttgctatgcatggttgtcggtgaagttcgtagagagaaggaagaaagagaaaaactttaacttacaatattaccactaatctttccataaatatggaataaagcctcttatttaggtgtggttgttgtgcatgtaaatattctttactacaattatttcgtttggatttttttccttattatgtattgtaagattgaataattaaaatattaaatgtattatttcacacattttctagttgagtgaatcacttaaatatttgccttaaaacatatttgttcatataaaatgtattaatattgttcgaccagaagcctttcgtaaggctttaccactcatgtagcgtagccatgtggctttggtttcccaattctcacagtaataagttccccttattttactttaataaaaataataaaaaattactaatcaattataaatggcagtattaagcatgttagtcatcaactatttgactttggtattagttttaactttattctttaatttttattatttcagaagaatccactcgaacggcgctagagctactaccagtaacacatgtgcaggtctactttccacatacatatgtacacccttcattcactgtatattttgcaataagattgatcacaagaagtttcttactgtgatctatactaggtgtactatatatataaatatatatatatatatttatatatggttgtccctgcaatttcactttgttctaaaaataatgtggaagtaacctttgttattattgaacaaatattttatttcttcttcataaagtataatttttaaaattaaacattatatttttatgtttctagcatttagattttaagttttactttattatgtttgattaatgtatgagatatatgatatatatttggcatattcttagcatattttcgtataaatattttttttatttgtatgatatataaaaagtaataagtatttctgatacttttcataaaactactatatatggggtttaaggccctgcccatttacatattggacttatagaataaggcaaattttatattaacaaattacaaatttaatggtttttatacaatttgtgccaaagtatttttttttttcaaaaaagctattttataggaaaaatttaagaaaaaatttaaaaatttaggaaaactagataagaataaccaagtatctttgggtaattaaccagagtggtaaccagttaccctaaaaggtaaccagataccttaaaaggaggaaattacactctatnnnnnnnnnnnnnnntcctcttttatttttaccctctttttta

SEQ ID NO: 113548 - DNA, 3759 bp, Cannabis sativa
  modified_base (3580)..(3580): a, c, t, g, unknown or other
  modified_base (3705)..(3733): a, c, t, g, unknown or other
ggggggggggttcttatttctgtctgagccgggtcaattagggtatgttttactgattatttttgttgacctcgcttttagccaacgacagtgagtctaaattgtaagcgataagtagtataatgtgtatatgtaatataataaagtaaataaagacacgagaatttatagaggttcagctccgagcagttcgataatagcctaatcctcttggtttgtattgacttaagaacaagaaaaataatcccttttcttagagctcttacaatagtatctctgaatatgaattcttagataagttttttgacccctttgtccagtgagtatgaatcactattaatagggctataagcttgggagggaagaatttcccctctgattacaatggatataagtggaaagattgcatattaaatacagaatacactaatcaagggattcgaacagctttccatatctatgtgatctgatcccaaaattatagggatttctccagtgactcgtgatgcgaaagctgaaattgctaagtgttgtcaccttgtgcggattgctcactgcccggctaagaaggcttcgtccgagcgaatgtatgtggtgccctgttcggcatatttcttgcgagcaggtacatagagttgattccatgtgtcaccatcgtgtgatgccacgtcagagtgtaaaaattgggataacaattttaaagtatattatcttgttataagctggttgtattggtgtttctttgatttgatcaaatttgagcttttaagctcaagttttagactttaatggtagattttgtttttgatgcttgatgatgaaattttctattggaatatgttgtttatgtaggtgttctggagatttgaagaagttttggggtagttttgagttgagaatgagatttttgaaaaatttatagtagaaagcgacagactatttttgcagaaagagtataccattttcagcaagcagggacccaataaaatggtttgtcatttttttagaaatgacctatcactttttagggtattttcctaaagcctcatttttctatttttttccgatatttagggtattgacatgttatttatcaatggggaaactattagttttaagtctatgtccctaaaaagtgatttaacgaatcacttactagtttatgtatgttgtgatttaagggtttttaaaatgtcaagcagtagtttctactctggttgaccgatacacctacatttagaattgagataaaattagtataataattacatatatgtatacatgtttaatgtgcatgtcagtttccattagaataacatattagggtatcggtgaggtgtacatagatacaccgagataccaacagatatatgttaggcaaattagtagccatcagattagcatattatgatattagtaaagtgtacatagagttgcagtgagatatcaatagatatatgttaggctttgtcatacggacgttccagatcttgtacgcgtagaaggcgggataagactgtaattaggtgaatgggtgtctgattataatctggtttatgtttatacttttcttactgagtctgtcgactcacatatattgtttaaatgtgtaggtaaacgcaaagtaaaggctaaacaatagtgagctcgggatagatgaagattgtacatatcgaggcaattagacttagagtgtgcagatcttcaggacaattgggctttattttgatagttgctaggtgacgaatcttgtagtacaagtatttgtaaatttttgtaacttttaaaataggatcccagaatatgtattacatgtatttatgtaaatttaagtttatttatgaaaattttactatcacatttttttagtaaaccctttgagtagtaaaggaatgcacagtaatttgaaaacacgataacatgcataatttggtagggtgttatagtattaatgtctatttcaagtcttacgaaaagtttatacattgtgaggatttgatacaccacaatttgttggctttgatgtatttcaagtagggatgcacatttcttccatggggatgggggcccgcgggacccgtccttgatggggcggagattcccgaactaaatggggaacggggtggggatagggattattttttatccccgaatattaaacgaggtagggatggggatcacactctgcaccccgacgggaatccgtttagtattttattttatatttctaataacattttataagttgtaatttatgttcgcattttttttagtatattagtatcttttttatgacttttaagttgtgttttggataataattagtttattgaataataattaatgtataatattttaatttttatggagtttaatatttttatatagtaaaatttttattacaaactttattttttattacgaaatttcctaccccatctccgatggggaataagcggagatggggattaaaatccttaataagaaggggagagcactccccgccaatttcccgcttggtgtgcatccctaattttaaggctttgcccctatttttatggcttgtccctaattttttagggtagtataggtgagagtatgttgctactagccaaagagtaacaccttcggcttggtatttttaggttttttcattgatttttacttgatagaatcaagttgtagagtgtaagattttagtattttattgatatattattttgtttgtagattctcattctaatatttttttttttttttggtgtgtttgttttatgatgtttgaggtagattttcaatgttacaagctaacgttctagctcttctggtgtgttgtttgagaatgttatagttttactatctaaattttttaggatttttttatcccctattgcttttcttcttctgcagctcatagtttgatatagcacgtccttcgattagataatgagcttaagctatcatagttcgatggcggatgtcagtatcataaattccgataataatattctatcaccatgtcaaaaaaaaaatatactttcgtttcccagcatgaaataaataaacaaaaattacaactatcaacttaattgatcaaaatgaaaataaaacgtgttcaagcagcaaaacacgtgttgtgtttataaaatttaaatacagggaactaatttaaggttataagtgatattgaattaatacgattctcttattatgtatagcacttttaataggtaactttttataatttgctagcaatatttcgtaaatatttttttttcttaggttatattagatttgatacttatttgcattaatatcggcatgataccgaaaagagtgttaaatacaattggtgccttttgataattctcatatatatatttatatacagggatatgattttgtcccgtgatgtactttcacaaaatgtattacgtggtacattagatgggtctcagggtacattaaatgagtgtcaaattacgtatatactttttaatcttaattacccctagatcaatctcagttgcagatcaaatatctccctcatctgacggctgccgtacatcacggattacantccgtgaaagtacaataacgggacaaaatcatatccctttatatatatactagcgaaaagctacgtgcgaggcacgtatatactaaattttatgctagaatttttttatgttatttgaaagtgannnnnnnnnnnnnnnnnnnnnnnnnnnnnttagttattaggtgagattattatta

SEQ ID NO: 113549 - DNA, 3258 bp, Cannabis sativa
acttcgttttcatcaatcttacataatgttttcttttttgaaaaaaaaaagaaaagaaaaaaaaaacaagagttttgtggtaaaagaaattattaagtagagagtagagagagggagagagagagagagagatatgtatagaaagtagtataccggaagtgaagatccgtacaggaccaccattgttgagcatgttaagctgagtttcgattcttcgcatgaaatccatggcttcttgaatgggcctagtcagttcgtcccgatactttaccaacaaatcgtaataagcttcctgcaattaattaattaattaattaattaaataattagatccctatttttcagtattcattattatatatataataggagacacgcacaacaacaagaaaaaaagttaataataataataattaatattttaatatacatttatgcataagataatctttttatatttaattaccataaattgatcgagttctgggtctttcgaagagtctctagagctaactagagatcgctgccgcgactcaaaatcctgacgagccgctccgagccgagccaccacatcaggcggagcaccaaccttcgataatttaatttataaaaaatgttaaaaaaaaaaaaaaaaaaacttgaaaaccacaagtgatgagcttgataagctttatataagtacaaaatgaaccagaaaaagattatttttttttaatttttaagatcaccttttggcaatccatgtaagcttccaagagattggagtactgagggtgagcaatgatcttatctttaatggtttcaacttctttgatagagcggtggtgttgaggttgatcgtgatcttcttgactttctggcaactgatgatgaagtacttggtgctgaaccgtctgatgatgatgatctcgagtagtcattagattaggatcgtagtgaaatttctgaatatgttgattatggtgatgatgtgaagtggttgcttcagttttcactataggctgatgaggattattaagattatgatgagattgaggatgaggaggaggaaaaccaccagtactacagtgatctcctccagcagtggttgactgaagatgaaaactgttgaccgacaattgacgatgatcatgatttcctctcccgtaattactattattaccacctcccatactatttatcgatgaataaaggaaattcccccttccaccagaccctgtgctctcctccatttgattattattagtattcatcaccggcctaaaaagaaaaacagaattcttttctattaaattaacttcataattattagctaaaaatcctaaacaaaaacataccaaataattatatataataagataatattctgatgacgacgagagaggttaagaaactgaaaccctaggaaatggagatgagatcaccagagatgagagcttgacttgactttggtttctttttgttctacatgaaataagaatgaaaataaagtaatatatattgtataaatatgtataattaagaacaaattacaattaataataatagcatataagaataaactaagtaggtttaattattagatgaaggagaaagaaggatataataaaaaggatgataattaacagaacaaattaaggaaacatcatacatatatatcatatatatatatatatctgtgtatgtgtacgatttgtttggaatgagaaaggagttctcacatggccgcgcgcgagagagacagagacagagacggaggggtttgccggcaaccgcgcgcttctggtcttcgttggctgacaagactttcttttgttgggagaaaaataaatattttaaaaattcctaaaagcaacaaagcctataatagtacttactaggcctaaaagataaggcaactgtgcatttctttttattattattattattatttatttttcttgttattattaaagaaatatacttatttattttattttttctgtttactactacagttgaagatgtatgaatgttattaaacttactcacccattgtttcacggattttatttctagctagtgtgatataggagatactatttgttttgctgattgttgaaaagatattatcacatctagagtaattttgggtgcttttatactgtacctctttaaaataatccatttatttactatttatgagttttaaaattgatgagaactttttaatttaatcttattcttcgtatattgttatagttatttaaaatcttttgtaaaattttaaagaatttgaaaaaatttaacatgccaaaaataaagtttagatagtctgttgcactcgtgacttttattttatacgcatgtgaaataaattgttttgaaattccgtattttaatatttacaaatttattattcaattaatcaattaattaaatgcaaaataataataaatatggtactgaaagagttgttctgtaactacagaacacaaccctataactacaatataaaactagaaaataaaaacacacaaagtttttgtacgtggtatcaacaaaccttgcagattgatattagtccacgggccacctgcagagatatgatttattagatacatctcaaaaataaaaagtaattgaattatacataaatagactctcacttattgtatgccgcaagcttaatgtatttgagcttctcattgaatcttgttgaaacttcaagtggtggaactcccttcgatctccttgaagagtgtttgctctcccgaggcaagacttgaaaagttatatcccaaaagcttgtagaaccttttcctgaaggtagtactattattcttcttattttgcagacttgaatacaaacttaagacaatacaaaatacatataaatagagtaagagatgaacacactcttcttcactaaacaaagactctcttttctaaaaatatgagtgaaatacaaagatgtaaaagaggtaaatgacctagctactataaggtgtatttataatcaatatacaccttattgacagctcatacacggtctgaacaagaccacaactcacttgacaattccctaaaatagatcttcaattagcctagaaatttctatttctgtacctacagaatcgtgagtattaagtgcgacttttcttctataaaaaagaaaggttttgctttggttttcttcacaagaaatctaatcgaacatattaagaaactcacacaagatcagatatactaagctctatagaaaaaaaaaaaaaaaaa

SEQ ID NO: 113550 - DNA, 2750 bp, Cannabis sativa
caagttccaatattaaacatacttgaacatagtagcctaaaaaaacaaaaaaaggaaaagataatgggaatgaaataatatagaatataaaagtactctagacaattctctgtaattcatatagttcttatccctttaaaaaacaaatgaaaaatgtattgttctttttaataattaaatgatttcttgttagttatactatactaatctttgacctatctgactgaaatttcattcatctttaattaattacttgcaagaacagagaacatcccaattgcctggtatggaccatatccatttattgtgtgataaagctgtctttttacactgtggtgggtactacttaactaacttgtttttagatttgtctttactaatatgattgggtaggtcttaggttttaaatctactatagaacattaccataagatcaaaaaattatctcaaaaataagttttcaaagaagagatttaagttctttctttacaagatgcacaaacttttcaaaagttactccaaacattttgccaatatacaaacatgtaaatctaatcctaaactagaaaagaaaaaaagggaattaatttgaataaagtttactatgtgaaacaaagctgtatcaatatgtaggagatccaaaagaaaagaattatagaagctaaattaaaacaaacacaagcatatattgcttcttctttcttgtgttgtgaaatgtttacaatctagatcagtctctccttgtagccaaaggaacaacctcagccaggggagttgagaggggagtcgggatcggcgaggtccggcacaccgggcatgtggggtgcagcctaagccaaggatctacacacttgacatgaaagaggtggctacaatcaggcaactgccttagcatatcattagccttataatcagccaaacatatggaacaacaacatgaagaagttgaattagtcttcttaagcttattagcctcagagtatggtaatttggggtaactcttaattgtggcatcatctaatccaatatcaacaacaaagctatgcaaatcatgatgcagctgctgctgctgctgggcccggcggttcctcccgccttgggccgcgctatgacggtcgggcccagacacctgatgttgttgttgctgctgttgggaacgagtacagaagtaagaagcaagagttatgcttgtgatgagtaataaaatcccaactgaaactccaatgccataaccaaagccaccaatgtcttttgagccaaagaaaccaccaccgtaatcaccacttgttgtggagttcatctctcctactaataataattatgacaaagcaaaacatcagggcttgggattgaagaagcccatgatcatgatcataattataattattggtttggttgctttttacacattggggattcaaatatttgacaaagtcaacggtaataagatagatagagaagaaagatgtatttgggtaggtttgaagtaaaggaaagggaaaatagaggcatttacatgtgaaatataatacataaatgattggatgtatacgttagattatgaggttagctgtcttttagttcttagaggtcaacggtcttattatttatagtgttaaaccatttgcattatttaagcatcttcaatacatattcaattcttctttctttcaactaagcatttctctctctcattctttctctctccgtgcgtgcaatgcacgttttatataatatatagagtttattattatgaagtgataatcacatagagtaacttgagatacaaacaccacaataatatatgcattatattattcttctctttaactctaaatgtagtttagtaccaatgtttaagaaaagaagtttggtattagaggtttaagaattaatgaagtatatataattaatcaactccggaccccttaggtttttatgataagaatcctaatgcttcctcataagataagtaataaaaaccatacatataccaatttttatttttgtttttttgggatgatgcaagctgttctgtatctaaatccagttgtatcctttcttgaaaattgttggtttttattaatttattattttttttttttcaatttttgaggtgggagttggttggtttggttggttggtccttcatcaataataatacaattggagtcattttgttatgtttttgggtacatagggtaggatctatgtattatagttttgcaagttgtattatgtttttggcatcaacaatagtcatatattatttgagcaaaaaatgaaaaatagaaaataatcatatatgtatattattaatttttcaaagaaccacaaatttccacatcaaagtaggtgtgaatgtgattagttgaaatctttgattgcagtttaacggatatcttcatgacctaatttcattttgattataattatcatttttaatataactcttcacgtgatcaaaaattatctccctagtgacgttcatgtacatcttaacaaaaattagttttttgaaataactttttactaataattatatatgaaatgaatattatatgtatatttttttttcttcaaatcaataaaattctatagtaggggatgcaatttttagctcatgctatagggaaggaaattgggccaattaaaaattaaagataattgattgtagacaaattttatttgaacacctgtatgtgattatttcatgtttttttgtctatgatgaactttttttttttttt

SEQ ID NO: 113551 - DNA, 2443 bp, Cannabis sativa
attatataagaaaattagaatattctactaatttttgtaattaatgataatgtttatgattaattaattataatatatgtatattgtattatattattatttatatattgatttgttgaattattattggctaatatataattatcaataggaattaattgaaaacaaaaaaaaaaaaatagtaaaatataatgtaatttatattaaaatataattctttttaatgaaaacataaaataaaaggttaaaatagtaatttaatatgtaaagcctaaaaattattgacacttttatatagttatagattatagatataatatatgatatatttaatttatgtaccctccaagttgcttagtaataattatatactgatttggaattggaaggtattaaagaaacaaaagattattatatatatacatatatatatatatataattgtataacaatatataaatcatagaaaagaccaacatctcaactaaactatacctaatcatcttcagttagctcagtataccatttaaaatgaggtcctattcataatcctaccaagatatttctgataataataatgattttttgtattggataaatattgtatactcacaactagatacgataacatattttatatgtataaaattaattatatatctaaatgacaaaaaaaataagcttaggattaggtcacttttatatagtatacttttttaatctcaaactatatcaacttatccatgatgataactacttaaaaaaattgtaatttatgttatggaacgtttttagtttaatttttttaattttttatatttttatgggcaaagccaggctaggcctgctacttatactgggtataggtgcggcttgatataaattatattttgctattgtgattaattttgtctctgtgatatgattttgagtgtttttaacttgtctctgtgacatgattttgagtgttttattttagtcttgtttgtatggcatgattttgttttattttatttcattgttggtttttcattgtttttcgatggctcgccatcaaatcattgttagtggttgagagtgacaagttctctgtaaatgaagggttgttagtagtgcagttacgtatcttgcacaatagttgaatgcttaaacaacaatattgtatgaatctagtgcagcaatttctatatttttgtgtcctctaaacggtagatgaaactgaatataagtgttattaaaattaactatgatgttgtatttttttttcatctaattttatttttaatttttttgtcaaacgatctgagaattaagtgactgattatttgactcgtttttctaattctaatcacggtcgtgtctacaataaggagatatactattaaattacaaactattattttaattgattgatattaataaaattacataatttatcaaaaaaaattattttttttagacaagggaaaaaaacagaacagcaaaaaaaataatgttatattataattaattagctgtaaaaaagagaaaagataggattctgtattccaatttgatcaaaatattcaaattgtgtgtcaatggtgagccctagctattcgcccacattgccatgggaattaaaaaactaatatgtaaaaaagtgtaacctaacttttgtcactttctcaaactcaaagatcaacaaagtgaagaatatattaaatcttacgtagtgaattgaaatgaaataataataatatatatgacccaagaacgacttaatgaaagatatttttttttaatttatatatatttgagtagtattagtagtgtccagtaccttttataagtagcgtcttacgattggttaacgaaattttttaaaagttatttttctaacttatatgggacttggtcatacttaataacaccaatagcggtatgataccgagaaggctgttaggcactagtagtacattttagcaattctctatatatttgtataagttgcatttttaatatgtattacctacaaataagtattaattagtagaaaattaaatttgagattttatgtttattattttatatttaattaaagaaaatttcttatttttacatcagttgagaaaaataaaaaataaaaaataaaaaaattattttattaatatatatatatatataaatttcttattcagcaagaaatatatataaaagtttcatcacttagctaaatatgtttaatataaatatatttttaatagatttttttaattaaataattaaattaagtataaaaattaaaattcttatttttattatttttcgttagatgaaaatttaataatttaatattttaaaaattaacatttatagttaaatatttttaataaatgggtaatatacattaatgttaaatatatatatatggaagaggtttcaatggttacatttttattgt

SEQ ID NO: 113552 - DNA, 2924 bp, Cannabis sativa
tttgtctatgcttttgttccattttctctaaccgatcatgtcttttccagtggttatatggcaccagaatatgcttttgatggcttattctcaattaaatcagatgtcttcagctttggtatattagtcttggagattgttagtggaaaaaagagtagaggctttcaccacgaaaacaatggtcttacccttattggacatgtaagtgtcaataagcttcatttgttgttatttagagcaatatctcctagttctcaaaactgatgacaacgaattttgatatttttaggcctggacattgatgaaggaaggaaggccgcttgaattgcttgatgaatgcttagtctcttcgtatgaaaatctaggtgaagtcttacgctgcttccatattggccttctatgcgtacagcaaagtcctgctgacagaccgaacatggcatcggttgttttgatgttgagtagtcaaaatgaacttcctcaacccaaagcaccaggctatttcttggagaaagattcaataaaaggagacacttcctcttctaagcctgaattgtcttctacaaatgaaatgagcatatcactgcttgaggctcgataaggcttttactatatgctcaagacaagcttgatggataacatgaaggtttcttttggctgctgttactaaacgatggctgaaatctatatgaaactatgagctacatgatttttgtgaaccatgtcagccggatatatgtatacatagaactatacaaaagtgattcgtttgtcttagaaaaactagatatagaatgtatatatgcctgttagatgaagcaaatggtatataaataaggaatggaaaaattgaacatcttaccacacacattttcatggtgaattaaatttacaactatatgacagaaaacaagaaacaccaaattccatgattcctaccacctgtcaaattgattcaatgatttggaaacaattataaaaatgttccaaaatttaattactgtgcaggactttctctctttctctcttcattttttttaagggaagggtctactgtatttatataaattacattaaagttcttcagatgaagattatatgtttaaaccttataactgtgtcattgtgctctgcagggttctttctcaaaagcataaacaatcattaggtgtagcattagttaatggatgatttttcttctaatttggttagaagtagaggtaacttggaaacttcttttttcagccccaacaagattattgtcctggaggattaaagcaaagtcataatttttttttcttaaaaaaatatggaattcaattaatggtcttatgaaagtgtacaaaaaaatattcactaagcttctaaggaaatgattggtttgagaaaacgcatattaggacgaacaagactgaatctataggatgttgtaccatattacaatgttttggcacaaggataaaaacagataagaggctgtatcatctgatttggattgttgatctataatacatgctctcgttttttcttcttttttaatataaatatttggttttcacctttttatttctagtatattgtatggtatataatgtgaagctcatgtattactcaaagaattaataagaggaaaatgcctgattcatgatgtcggttgactaattttctctcaagaggaggagtagttaaagattgatattacattaggtaccattttttgtaaaaaaaattacatttttacgtttaatgaatatttttttttttacatttttacaatttttcatagaaacaacaagaaaattacataaaagtaacaggaaaataacattcaaataacatcaaaacaacaacaaaaaataatatacagataacaaaaaattaacaacaaagtaacaagagtacaacataaaaataccgtatattttgtaaataaaatcataaaaaatgtttaaaatttcgtacaaccgtatttttgtaatttttttgttggttttatatatttgtgaaataatcccttaaagattagctttgggaccaaaccctaaaaatctttacatagcaaactacctagaggcccataaactttaaataggtttactattaggtattatacattacaaatctcataccaaataaagatgtttattgtgttcatttaatcagatcacttatttagtctaatttagtatattagctcaaataaatgagtcatttacaaaatatgggagaaaataagaaagttttgatatatatatatatatggcatgcaaacttaattgcaccaaatacgatattttttttaaaacaacaaaatatgtgagtgataaatcatcattcatagataagaacgaatgaataccatataaaaaaaaattaaaaactcatatataaattttacttctatataatcaaaaccagcttaaaataccattgctcggctatttcagataaagttaccgagaagataggcatcatacatccccagtaactttttggagatatgtttgcatctcaaagtactttatgtgcgctaggggatcttctctcccagtatacatctttcatattgttatcttgaacttaggcaaaggtaatgcattgatgtatgcagagaatggatatccccttgacttgtctagttctaggtctgacagctttgggccagctaggccttttattatgtctctaatttgatccaattgtgcttgcatagatggatctgatgcggtggacacttgtctgagtggcctttcatagttgggttggagcccttggtcggccagaccatggttggtcaagccttagctgagttgctgtcctcgaccggccaacccttggctaggtacttgttggaattattttaccagaatctaaatttactaccatgtatgttatttaacatcctaatatgaattctctaaaacaat

SEQ ID NO: 113553 - DNA, 1461 bp, Cannabis sativa
tttttttttaaaaaaaataagaaactgatcagggttttggataatattttggtgtgggagttatgattttatctccttttgctgtgtatttttggacttcttaatcacccgtatccttctatatctggttaaatttaaaatggagcatgactttacaaacaagtaaatgaaatgactgtagaatgctgatacctcagttgtgattgccttacagtttccccatcattcacttagaagtttgaaccatgtagttggtgtattgatctagtgatgattcctgcaggtgggatgtgaatttgttaacctgaccaggtggaaggttgcaatatgtggggagtatatgaagtcaagatttaaggtactggcttctgtttggcgttggttgttttgatcatcattcctgtactcagctacacttaaactttgtattgagtaatcaaaaaacttaggttcagtttggagggggacttgcattcaatttggcacagggttacaattgggtttctgtttggggataattaggaaaactttaagggcagtttgtttcaagatcttaggaatttcttcttattcttgtaatttcagatgataccttttcttcttttgatgattttatataaaaaaacagcttatgttatgtatatatatatatataatgttaggtttttgttttgataatcattcctatgctgttacagacatgttcgcgaggaacagcatgcaatttcattcactgttttcgcaatcctggtggagattatgaatgggctgatagtgacaaaccacccccgaggtattgggtgcaaaaaatggttgcattatttggccattctaatgaatctgtacacgagggactaagggaacaagggaatttggatgaaccaaatagcgctggcaaaagatcaagagctgatgcaaactggtttggtttctctctttttttagttgtggcctcagtacttggtatactgatagataatatgctaagctacatagcacagtgtgatttttattagtcttcatacgacattctttcttaacaaaccagaaacaaaccacatgggtggcgggttttcctttttaatgtatgtaaattagccagttatgtcattattagtataaattataaaataatagagacacaattagaaatatttaaactttaaaagataaatcattgtcccaaacaactttaaaaagtattttagacaattattcccatgcggaggcaagtttccaaatacgggacctaaaaaagtaacttgtagtaatgtttattcatatttataattggcccaagttggattagaacttttcagaactgtacgagaggttattctaatataaagtatcacttttagaaagatgggtttctgatattgttattgcagattatgacagtgcgggttttaaaattctctcttttattaccttgtcatttaatactttaagggctcgttt

SEQ ID NO: 113554 - DNA, 2797 bp, Cannabis sativa
taattacaatatatgtatataaatccaatccttcaaattatataggtgtaccaatcttgtatttaaataatttaaatagttttaatttcaattttgtatgcatatagtaatgatgtatttacacaaattttcaataaatccaaattacatagtttaatgtttcaaaaacaagaaacaaatgtttgaactccattggtgcacatttaatatttttattagatctggatcgaatttatccatctattatattgaattggattcatagaataaaaaaaaattaatattaattttcatatagagatgcatttctttttttacttataacaagataatatctaattactattaaaattaaataaaaatattaattaattttattagatgttcagagatttttggacaccacatccaacacttgatataatcaaattgaatatttaaagataacatttaatctaatcagaatttggatcgattgtaattaaatcggtcaattattattgtattaaatcgatttatgcacccaaccttataatatcataaatattactcaaaatgttgctaaaactcttatatattgggtctatgtatatatatgaaatgatgatatcgtagtatagtgtaggttttggatgaaagtatataaacaaaccttaagaggccttatattattgcctcgttggcgaagaacatcgaattcgaccccatgagaccagcaatcttggagctgtttattagttttcttatctacgaaaggaacacattcaccatttgctaatcttatgtctgatatatgaaaagccgaagcatcatatattaaaaccttattgttaggaagaacaatcatatgcattgccgacacaccactattcttacaaactatactccaatttcctttgaaattccttggaagatccggggccgcattcgggtcaaattgcccattatttgtatcgtcagccggagcacttgtatcatcccctggcggcggtgtatcattaccattgccgccaccaccgccattgtcactgccaccatcaccgccgggtggcgctagaggatcatccccaatgggcaagaaaggaaaatgtgatgagaagaagcctaaaccgtttccattactactaaagccttctccactactaagttgtccgggcaaaggatagaaactcggctgggctaacccattttgaatgaccaacaatataattacaactagtgaattaatgtggaataataaggtagccattgaagagaaacaaacaagttttcttcaatggcgattatatgaaatataattattatatatctatataattgtaattattaaagctcatttgtgagtgtattagttgggagaggctctctctcctctatcttttctctctatgcctctttctctctttttctcaatgttttttggttttcttcccctttcctagtttttctctccatctctcttcaacttaaggtggcaatgagtcagttaattagctgcaaattagccaaaatagtataaatgtgttatacctagcttggtttaataagaaaaaaattgaaactatttaataacaatatatagaaacaaacaggaaaataaaaaactatgatatcactgtatacgacaaattattatgatttgttgatatagttactcctcaataaaaattaatttacgttttttcaataagttaattacaatattagttaataatataaaatgaaagaaaccggccgaccattttaatagtaaaatgtttgattatgttacaaatactatttattgaattaccaaattaaatcattaattattagttcttttgatcattcttttttgtggcaaattcttttgatgataattatatatatacaaaatctgttgtgtattctctcaccttcatcttctatattaataattatgtatatagtatattcataattaagatagcaattcttgttatcggctagtgttatcatgtatagttgtattcatgctgtgctattgtggattggcatgtcttaagccgtacataatccatttatatttcgtgttaaaaaatttaaattatattttgattcgtcattcatgttttaatctgttaaatttgtgtattcaataataatgaattcatcacacaatataatatatatatagttattgatatatcttatatttgatttatttgagaatttttacgttaattatgtttaagtaatttaggaaaaaaactgtagtctatcactatactgcattaatatatttttccttaattatcttatatttgatttatttgagatttttttttcttaaatacatttaagtatttcaggaaaaaaaaatgtagtatatcactagcaattaatatgtgttaatatattattaaaaaatcaagtataatattgtaatatattttgaaaacatttagtataattacttaattaacaaaatattataaaagtataacattcaacaaaatattataaaattacaacattcatataacatagagaagaagtagaagatgatgatgtagatcaagagacaaagtaaagagaatgagaatttcaacttgtagaggagaattcctatttatacaataaaaaaataagacttataaaatagagtaattaaaactatacaatcaataatttttattttagataactaattgattttaatctaaaatagagtaattgaaactatacaattaaacattcactacaaaaaactgctacttttatgataattttttagtcataacataaattttttatgactaaatgtaacttttagtca

SEQ ID NO: 113555 - DNA, 2638 bp, Cannabis sativa
atatatatatatatattttaagcaaaaatatataaatatataagaacatttttaagtgagagtattatttttttaggacaaacacgaaaatattaaattaaatcagttgttataggagcacttaagaatttaggataagcattaatccaagcacgaactcctatcaaactatagtaataaacttagctagtgcgtgggctacaccatttgtaaaatacgaaatggcataacaagaatcaccaccaactgcagctatcagagaaataattccatcaataattgatttaaacataaaattagagtctgcatatttcaccaaactactaactattgaagaatctatctccactctcatcacattggggcccaacctggacgtccaaatcaaacccaactgcaaaactagaagttttgccaccaccacctggaactcaccaaccccaccaatagcccacaccgcccacacaaacccctcctcacctcgaatcacacccccaaaaccaacaaatcccttacttggagtgacagtcgcatcaatggacaacacaaagttgccatcaacaggaggctgccatcttctgcaagcaccagcaaccctccccctcaccctctcacccctacttacccacccttgccccgcaccagctccactacccagaaactcattacttgaaccaaccgcaccattagcagcagctgcaccaaccacacaaaaactgcactagtagcaacagtcgcacccggtgcaccagtaaacgcaccaatagcagcaataagagggccattattcctaacccgcaccaaccgtaccagccccttgaaactcttctaaagagactctcgccaaatcacctatgacctccgacctcaattgctttttaccaaacaaaactgaatttcgatcatgccacagccaccaatataccatatctaaaaaagcaaaagcatcttgatcaagctcatcaaacaaccaaaccaataactatgataacaagccaaacctaagccgacacaattgattccacatctgtaacctttgccacatcgaaatcagcaaagaacaaagcaccaaagcatgtttcggtgtctccgcttcctccccgcacttatgacaagtagactgaatatggattttccattgtatcaattgggaatttgttgggagagcccgataaaacatacgccacaaatgttttttttttaactttttggggcacccttaaattccaaagaccatttccatttagacaacttttgaactcccagtcttctcacgagccaattcatgcgctaaagtatatccacttttaacagtatagcatccattcgtattataaactagatagttgaatccatgtaggagtcgaatatatatcttccttttggagatcagtataaggctcacaaggcttcatgattgtcgtttagtttcttataaaaaaaagtaatggcctccatttgagatagcatctccaatgttaattgcccgaaaacacacaataaacacccttggtttgagaacccctaccttatccatgcctttctccttctaaaacctacgagaaagaccttcaaaaggtcccaaaggggggttaggccgaagaacatagcacatcatagctattttccaatataatacttcctcttctatatccaccatatctatttttactccaaaagctcttttaggacttcttgcctaatttttccaaatttcccacacaaattttgaatcatattaggagagggatgtaaaataggaggaacactacccttaactaatttcacttgtgattcacaacgtttcatagcctctagaaagctcacaaaatctattctggcctcatgttttctttgcaactacaccagcaactacttcggagagagtacttctgctatttcttcacaggcccagcaagcctagggcccacctagcccaagggctcaaaataaattattcccttttcaaaatacacattttattttctaaataacggctcaaaaatattttttttcctatgactcactaaatttcagggtaggccctttttcttcaatagtttgtgctgctttgtctcccatttcattcccttccccattgtgaaaatcgtcataaaaaactgatagagcttcgatacctaaaatctctcccatagatttggttttaatgaccaaatcggaagacatcaacccatgtttcttgtttaccataacgtcctattttcctttcaacttcaatcgctcagacgtgttagaaccagatccctaagatgcactcttgtgctacaggcctcgacctaccatggctctagtacgggactgaagttgaagccctagcaaagctcaccctccctatagtctcatatatgttgaatgatataatagtatcataaatatattttttaacataataaaaatatttatattattaaatttatgtttgtcaatttagtgtgctaatttgtattgactagccttctaccgaaaaaaaaaatatagctccaatagaacatccttattcaaagaatttaaagaatttttttgggcttttttttttataaatgtacaacaaaaacaatataattataaaaaacgtgcaaaaaaatttattttaaaaacttatacattttgaaaactt

SEQ ID NO: 113556 - DNA, 4081 bp, Cannabis sativa
  modified_base (26)..(52): a, c, t, g, unknown or other
cttgatttttttataacaaattagannnnnnnnnnnnnnnnnnnnnnnnnnnatagaggttctactgtagtatgatattcttttgtaacattcttttctattctaatagtaagcatcaattaaaaaatgctaaaaatatattcatgtcatcatcatccttcatagcaatgcactcgcattagcttctttagttttacttttaaatattgtactattttttttttattttacctcacacttttacattacattatacatcatattctatatatttttctctacatcacttaaatattatatcttaacatttattttattaattaaaattaaaaaaaaaaaggccaaacaaatttttttaaaaaaattatttaaagagtgaaagaggaaagaaaacataaaatatatttagctcaccactatttattgagctatatgtagaaatattttttcgagtttaagatgagcaataatagctaagctttaagggcatttgatagagataaattttaatcattaactatttttgtagcttttaactattacaaagcacttgataagagtgctcttaaattaacaattattaattactcaaaatatttctatacattatttccttaattcttttttttttttattaggttttagaaattcttctatccattctcttattcttttttaattttttattagggttcaaatatctatacatcaatacatcacattaataaaataaaaaatatatttttattaataatttttccgaaatcatatgtggaaattttaaactaaaaaaaaaattgcactaatatctatttacattataaacttaaatagagcattgttattaggcactagtagtgcctagtaccttctcgacatgtcacgttgcgattggctagcaatactccctaaaatttattatattaaattatatgggacccgataattagttggaccaatagcgatactggcacataggagggtgctaagcaccattggtaccctttagcatttttcactcaaatatacatatagaacaatttttaagggatattacttattgatagttactaaaataatttaattataaatattaaatcattaaattttgatctaatgacgaataataaaagaaggattttaatttttatacttagtttagttactttattaaaaatttatatataaaaaaatatatatattttttacaatttattaaagatatgattatataaaaaatattttaatcaaactcaattttttttcgctaataatagaacaatctcagtctatataatgtaaaaataagattttttttaattatataaaaaaaaaattaagtaaaaaaactcaaattttcctaataatacccattcacaagcaatactcggtgaaatatatataaatataattatatgcacatatattttttatttgatagaatatttttaataaatttctcttttatatttcaaaatacaagcacatatatactcctaaataagagtaggttgtttgataaagcagttgttatgtacatatagttagttacatttctgttactgttttactatatctctaactatattcacttaggctcatagcttagtctaaccaatcttcagcttgtatataaaagcactctcctctaatcaatgattttctacttctcaacatggtactgttgattttttcttcactgcttccaccattcttgctttgtcaatgtcattctctcttattcgttatcgctcacaaagtctagtcttgaatttttcttcactgcttctgccattcttgcttcgtcgtcaagatcactctgttcttcgttatcgctcacaaagtctctgtttaacttgatgagctctgcctttcattttttctttcccataaaatttgttaataattctatagaatattttaaaaagttttattacaacttctataaagataaacaacttagaaattttctaagcacattggacatttttttttccttcaaagactaactgatttttgtgttgctaatcttactttagttaaggaaatttgtgtcataaaatactaattaatctaaaataactgctttacaaatattgtatttactgcaaaaataaaaataaggtaaatattattttggaccctgtgttttataaaaatgactaattagaccctattttgttaaatgacaaaatagagccaatattttccaaaatgataaaaataagaccccaaatttaatttttaacaattttattttttaatataaccaacacaacttttaacacaaacagatacaaaaaatataactagtttcgttataatatctttaaattaaattattgttaagttttattttatcaaaaaatcaattcaagatcctaacaattttaaaaaataacaattttaaaaaatacaagattcattttgtcatttaaaaaaaacagaaaatctaattgataatttttacaaatggtccaaaatggtatctaccctaaaactaacatatgtagctccagcaaaatatcaaattattcttagttttggcaaaagtatattactgtatgtatttttttcagcattatattatacacaaacaacaaggcgtataaagaataataatagaaccaaacaagaaagttcaagatttttctataatctcagaaataaataactacacaaattacaattatacattccaaattcccaattgagatgttacctttctttttcaagtagctgaaagataacagtattaggacaaaaatttgcactaatttacaaccaaaaaagaaaacttgcaacatgaagcacaaaggaccaaaaatttagcattgatcaacaaaaagaagaggtcctactactactactacttcttgcagcatcacgatcttcaagacccctaaaaaatgccctaattgcaagatgctcagatgcataggtcatgaaagatgctaacactaaacccccagctaccattaatgctaacctggttttatgagaacacaaacaaaataaaaagattctcaaaagttgtcaaacaatacaggctttaaaaccaattacaaaacttgaacatatttaccttgcaaatagagcagtaattcctagaaaacatggcaacgatggggcaatgatggccaaaaacgccattacaagtccataataccaattagcaaaatcacatgatgatgtgagacgatgatgacctatattatcaagtgcaagcttagttaaggagagaaatttctattccatttcacatatacacaaatgataatgtaagaaaaggttgtcaaaccttttccggaatcatcatcacgagaatcagaatgagaggaaggggatcctgcttgcaatgctgctgtcgatccccattgatatattagacgaagataacctccaaataacaaaaagaagatcgtgaatgtccattcatacatcaaaagtagaccagtccatggcataacttgtcgtggcacaattgcaagagcaagggcaagggccactagagcggccataaaacagatgacgactgagatcccacctaaatagacaggtatcttagcctgcataccatcatagatcgatttaaggaacaaactttcaacaaaaacgttaaaaatttgaagttcaccatacaagatttttaaggaaaactgacctggtaatttaaattattggtggatgatgtggaaacactagaataagaaattgttccaaaagatctaatcttatagtaaagatgcctgatatggttacataatgagtttaagtgttcacgagtctacacacataaataaacaagaaaagggtgagaagatccaatatagttgaagtttcaggcttaaactttcttgtaactggttacctttaaaaatgatcgatagtaacaaaagccaagagccaaaaatggtagcaagaacaggaatttgacaagaaaactatcatttggattactgcctcctccagttccaggaagtgtttctgcaagttgctccctaacattctgcaacagaagaaaaagagagagagagagtggcggcttcagagtgtttgagaaataatcagtaaagtgtct

SEQ ID NO: 113557 - DNA, 3134 bp, Cannabis sativa
aaggaaaattttatcccacgcttttaagtaaatcccgtgattgtctttctcaaaaccccaccagaagtcacgcaccatattgtcgattttggtagctagacggttggagagtttaataatttgcattgcgtacatcggcatcgacaggcccacagatttgatgagagtagcctggcccgctttagacaaggttttcactttccacccctgcagcttagctgagaggttgtccaaaatgaaattgaaatcagcatccttctgtcttgatctgaacaggaggaggcctaagtacttcacatttccttctggggagccaattcctagagcctcctggatctcccgcttcaggccactgggagtatttttatagaaaaaaattgaggtcataagtttattaacttgttggccagaccaagaatagaacctctcaagacactgccagtaacctctggcttcgctcaaattagctttgcccacaagaattaagtcatcaggaaagaagatatgagacagaaccggaccttctctactcagcctaatacctttaataatgttcttgcagagggcatcatgaaggagccttgataaagttttggcagtccagatgaataagtaaggggacagaggatccccttgccgaagaccacaggagggtttaatcgtgcccacaggccccccattgagacagatgttgagggttgttgtcgtaatacactgggagacccaattgcgaaacttcataggtatgccataacaagacatcacttggtcaatggaatcccaattcagcctatcttaggctttcatgaggtcaatttttacggcaaaataaccttccttgcctcttttccggttgaatgaatggataatctcctgcactatcacattgttgtcttgaatattccttcccagcacaaaagcggcttgagtggggcaaataagattaggcaataaaggcttaattctattagcaataatcttagaaatgaccttatacataacattacaaagagaaattggcctaaaatggttggttctttttggattttggacttttgggataagcacaatattcgtagcattgacacctttgtgcatttcgtcagtcctgaagaaatccaaaactgcttcacaaaagtcaccgcccaccgactcccaatagtgcttaaagaacaaaacagacataccatcaggactggggactttaagattgttcatggcaaagagagtgtttctgatctcctcatgagtaggagtcaagatgagcacctccttgtcctcacaagaaatgctctcatggatcaattgatgacaattaagcgcttggccaccaactgacccagagaaagtacctcggaaaaaatcaatgaattccttaccaattaagtcccgagaagtgatccaaatattgtctttgttcaagatactctcgatagcatttctccttcctctaatagttgctaataagaaaaagaacttagaacacttgaccccctccttaatccaggaaatcatagccatttgcctccaatatagagttttcctttccattgcctcattaagggatttccggatgctacattcagttttccaatctcggtcacccgcaggtaagctttgaatctggttcagtctttcttccagccctttgatacttgtgtccaacttaccaaattgggacctagttacacaaggccactcgagtggccccaatctttttgaagaccctagcaggggcccatgggtgagaaacagagctccaggcatgggcaactactagcttacttctgtcatccagcgtccaaccttcttcaaacttagaacatcttttgaacttggtatccagaccaccagtgaaaagacatagaggtttgtgatctgagttacttgtctgataagagcaaataatagctttcgggaataaattgagccacgctacattagctaagcctttatccagagcaaactcaatatgtttcataccagaccggtgattgtcccatgtcatcatgtctccctgaataggcatattaatgagaccccgtgaatccaccagatcagagatgaaagggatgaactggtccctaccagtggccccttcccgctccgattctttgagaacaaaattagtatcacccataattaaccaaggcccaccaaacctatccccaaccttcattaactcagtccaaaataccttctttgcatggaaatagggagggccatacacacaagagagtaaccaagggttggacgggggttttaataaacaagcccagtgatatgattttgggtacaagaaatgcactcaaaactaaaactatttttccaagccaagataataccattggcgaccccaatacccggaacataaatatgaaagtaaaaatgaagggattttaggatacgtaccagtggagcagcatccactttcaactcagacagaaaaacaaaatccagggaacgcgatcttaccagggacttcagctcgagaactatagaggtctgctctaaccctctacagttccaaacaacacctctcatggctcctgtggaggagatatgacattctcctccatagggatatgacagtgagtagacacactagagccagaatcttcaagaacaatgtcacctcctaaggccctaatctcataaacaaccatctctctaaaaatttttggaatatttacacaggatactgctttttccataaaactttcttttttactgttatacgcatatattttcttttttactatataatttacatactgtatactgaattagtataaaaaactttctcttttatgttttttgtcacttgaagatgtgttttttttttttttaaaaaaaaaaataaaagttaatggaaaaattaattgtcagtgacatatgtataaaactaattatgaaattttttattgtatttaatataaaacttttttccttttatgttttttgtcacttcaagatgtgttttttttttttttaaattaataaaagttgatgggaaaattgattgttacgtcagtaacatatatatattaaaaaaaaaattatgaaagtttttattgtatttaatagtaaaaaagttttgatgtgatggtgttgtcattttgtgaatttttttt

SEQ ID NO: 113558 - DNA, 1799 bp, Cannabis sativa
atgaacaaaagaagggcacccaccaccaacaactactctttcctatcaattctccttaaccgccttgtcaattgtctcgacgtgatctcgaaaaattttccactgcaagagaatattaaaaatgagtattgtaacactctccaagtcaatgtttgcagaaacagaaaataaaggaaaattacctgatccatggtaagtgagattcctgaaaacaaaggaaaacatgttataacctgaactacattttataaagatgagtatccgcgcgtccaaagaaaccaagatgtgctaaaaattcccctcttttgaagtagcaaagataaaatgaaatggtgttcaaccaaaactcatagcatagcattttgcacaaactaggcatattgcggtctagatgcatattgagtaatgtgccaaataattaaggttgactttaagctgaaaaaaatgtggagatgaatacaatcatatcaccaaactctttggtaagtggtagttgattatgactaaagcagacctaagatttgatttcatcttttctatgaaacagatgatactattaaaatcaataagtaggcaatggtggacgacaaaatagtggcagaggcttgtatggatcataaactaatgatggcaagattctatccctaccattgaaattcaattcttacaaggatttagggagggagttgggaaatctaaagagtatgaaagcatacttcagcaagtgaatgcacacacagaagaaaaaaatcatctcatagtatttcatctcaatcaaacctaataatacagattgttccacacaaggacaaggccaaaagagagcaggtactataagtacaactagcaaaagtttacaactagtttaggtgagaatctggaattactagaatttatggagcagaaataacacaaaccctaatgtccatacagagaaataaacggctatctctgtctccatacatcatttggggctttattcggtttctatacattagaatagaacccaaaaacttattccgaaactcgggtgaaatccaaaaccaaaaggaatttaattattgattcgaaaggagttatctagttcatttctcttcttggttcaacttgtaagcatagataagtagagaaataaaagaaagaaagaagtggatagataaagcatgggaagatcatcaaatagaataaaaccctaaaaagcataaaaacgtaatgaagaaggagaacctttcttgccaggcatttgcttgccatccttgaggtagtactcgcgaatgtcgatgaagatcttgccctgccaatggcgtacagaaaccctacggttcttggagatctcgcaaacgacaacgtcgtcgttcgagtcatcagcagagtcttctttcttgagggtcttcttggggggaccctgagcatgatgaacatggctgccggccaaggcttcggaggccaagtcctggtcctgatcctcctcctcctcctttctctttcccaagcatgacattttcactcactttgactcttctctaatctcttctctgtttctgctctgtgtggttatactaaaataaacgagggaagctatgccttttcacactttcagttacgccgcttcaaagcttttcaaaaatttaagtttaacccctcttttctcatataattaacacaaaattcttctcctctagatggaaattgggcggttaatgtacggggaatgcaattcatacccccattcccgctacctatttatacctccattcccgtctaataaccagcgcattcggggtagggaaatacccatc

SEQ ID NO: 113559 - DNA, 7014 bp, Cannabis sativa
aaggctggggggcatatagatgatctggacgaatgctttaaagtcctcatgaagtacaacatgaaactcaatcccctaaagtgctctttcggagttagcttgggtaaatttctaggcttcatcgtgaacgcctgaggaattgaagtcaatccagagaagattcaagcccttctgaatatgaaatcgccaataagaaccaatgaagttcaaagtttgactagtcggattcaagccctagattttaagtttttacgtatttttttatcaattgtttttatatattttaagtttgattctattttattcctattcttattttcattctcattcttattcctatgtttttatttcctccaaccaaataccacctaaattaaattgtatacaaaaaaaaatgttcggttttattttatgagattatatttttcttatatataaaaatataatatacatttgatataataaaatttaaaatatatttatattatatgtcttagactttcaaattacaatttttttactttaaaatgttaattatatatataaatatgtctcatttaaattggataaaaataattgaaccaagtgcaaatcttaaatttttcaatcctatccaatctgtacacatatccaaacttttcaatttaaattaaattgaatcgtacaaattagattaaattgagtattttattatcactcccgacttcttccaaacaataaattctctccattatctatctttactaccctacaataaacatcaaatatcaatttattttttcttccggtaaaataagcaaacaaaagaaaaggtttattctacaaacttcagaattggtcagatgcatgtggaatggaagagctcagactcaatgagccaacagggctgaacccataatgaggtttttgtcggtttcatatgtcctggggttcacaaggacaacaagagctggtcagagttcagtcccacaacaaccaaaggggagagcccacttggaccatcgacgtgctgtccttgcaacaatggaagggaggagtttccaacaatacttcgaaagtgagaagaaagaaccaagaaaattcatctaaagggttaatcagaagaaacaaaactaaggcttaagaggagaacaaagcatcatgtgattacatgtaaacaaaggaacaagaagctttgtcttcaatgtggtcaaacaatttagtctgctttcgaggaaacttggggttgatgggagttccactgaagaagcatccatactatagatgtgcctgatcaaatcatagacatcaaatttagtcaactttaatccagctcaactaggatgaggcaaggcaagtgtacatgttggggatccttttgtttcaagattaagcaataagcaacggagcaatcattaaatgggattaaattagtccccactttgtgttaaaaatacataagaaataaacaatgaataaggtaagaaaataatttatacctgcgaaaaaacagacggttgagagattagcaatagccatggtgtggtagataatgtattcagttaagaaatgaccaagtgcataaacaaatgataagaaggtggccaagtaaagtggcttgttttcaaggttaaatgcgcacaggtagcagagagtgcaagtgagaagagtccacacaccgaatgttctaccatgaacctcagtcactgttgacaagaataaaaaaaaaaaaaactacataagaaaacacacacaagtataagtagcatatcataattcttaaccatgttattattatttagttcaaatgaaccatagaaaagcaggaccactaatcagaaaactagtttacacttcttagtatcccagatatctacactacacaggtaggttttggtgtcaatatagagctcagcaataaattggcacattattattatgacaataaaattcaattcttactaaaatgaccatggagctgtgacttataactgcatgtgaacaatgccaatcgatccgttggcattaagaaatttaaccaagttgaataagaatctcctaattacataaccaaataaacaaagtgcaggtttcaaattccacaaacagctatcttcctttccttacctaaatgagtcttttttggactcaaacaaaatatgctaaatacaccacaacaagaagtatgaaaattttctaagtttcgaacataaaatttgttgatttgaactcaaaacaatcaattgttgagaaataaaaaataataataataattaaaaatcaggatagttgacatacttggagattgagaaaatacagctagccggagagcccaaatgttaaaaaacccgaaccaaacggaggccaagcgaagagaccccactagcaataaccacatactcaaaggcttcatgtttgtatatgatttagctgaaaccaagggtaaatcacagatcatcaacttcctaagtttcaaaatcggcagatgctattaacatttaaagaaaaaccatagcaaggattccaagtaaatccccaaataaaataaacttaagatccgattgatttgtcaagtgttattggaaatatgcttagatgcatcgtttaatgtaatagaattcgaaataatcaaacctgagtgtgaccggaaaatgagcagcgactgggatggcgaataggtagtagcaattgaaaccctaaaatgaagattgaagtgacgaagaggaatagatgatagtacctgaaaatatatcttatatgttctgcaactgaaaaccagcgccagtgactactgagggtgaggaaagagagggcttgtttgaaaattttaattttaaaatttttccattcaaatttctaaaattaaattatggacaaatttattttattttggaaaataagtgtggtacacttttattgttttagcctccaaaatagtaagggtaaaaatcgatcggttatggtcggtttttacaattttataaccgactagtcggttacgatttttattttacgaaaactgtaaccgaccgtaggatttttggcagtttttcggtttggcatttttggcgattttgggcgatttattacggttttttatagttttggcgttttttggtttaaccctttttttatttcaaaaaccgaaactgaccgccatgtcaaaaaaaccaaaaccgaaatcgaaaccaaccgccaaattcggtgatgacgtggaaccgaaaattcggttacggtctggtcgcctggttgctgctttatgttagttagggatgatgcttcaggtcgcctatctctgacagcttgaaattgtttcttaaagtccttggatagatgttcccaagaagttatcgaatggtgactgaatttatcgaaccagctactcgctggcccagtcaatgaggttgggaataaaatgcatcgcaaattattcgagacattgctcgctcgcattatggtattgaagttatacagatgagaaactgggttcgtagtcccatcatattgcgagacgtgtggatttttgaatccttgtgggaattaaaaattcataatatcaagatgaaaaagctcagtttccttatccgagtcatagccaggtaatttcccatgctccccattctgatattttctaaacatatccttcaactcaatgattcgcaactggattgggtccatttgatgttggttagaattaagttgatggcgtaagtcaggtgcattctgatttaatcgctcgcggagatcgagttgtcttcgattcaaatgctcacaaagatcaggttgtcttcgttcataattacttacggatccttggtatccgagtaactctcagattgataacttctcgtattactcatgctttcttgattagcataacgtcaagatcttcttccttctcgcgttcaccttcctaatcgactgttccctcgagacctcaagtgtcccaagctagaacttgcctcgtcttgtaccggccttctcctttggaagaggtttgatacacgtcctctatttagatacgtgtatataccttccctctcggatcgagaaggatgttgggggtgctttggtggtagcccacttgtcctaggttgagtcccaggatttctctcgttattacgagggatttcctatgtcctagtttggggctgccttgtgtcctcattcttgcgagaagcctttggtacatcattacgttcattcccctgattcataaatccattggatctttgaggaacttctcggcgttgttcttggttattttgttgttcatccattgaaacatccctagttttgcttcctgcctcctggtccttgaaccgtgaggtctacctcgtggccttcttaccctaagatcaggttgattcggtgtatcagttccttgagtcgcccttgtcactgtagcctctctttccaactcagtgtttcgtcggttggattcggctaagcgttgtcggagttgtcaattttctaattccactaatggaacatacttacttggatcataagcatcctcacttctaggtttataccctgcagaagtattagtttcttcgttccttccttctgggttttgattaacaccaccatagtttcttcttaagcgtgttgttctagaagtatggggtctttgagaacccattggttatttcccagggtgatgtgtagtttcctcaagacgacttccattattttgattgttatcagccatggatatatttttgtttgtaaggagggatttttctgagttttatcacgtaggctctcaataaaagcaccaaactattgacgcagattttcgttaaccaataataagccttttcgtagtaaatatcacacagaaataaataatgtataattaataccagatatttttacgtggttttgcagttaaatctgcatactcttcgagtctatcttatttgagatattttctgattacaagatgcaatatacaattgatcgtaactatttttctctctagaattctctgtctttatttataggaatataggttagcaaataattaccattcaattcaaaatatgtaattgttgatgaaatgtgatcaatttccacgtttcatttaaattgtatgtggataatactttataaccgcttaattttttgttattctcatccttaaagatgatcaatgctgatttggacaactgtatcttgcttatctctgagttattatttttagctattataatgtagaaaaaatgctaagtgttagcaaatgattcgcctagccaagtttattacgaataacgaggtgatggtctcgctatacataatctgagattgctttgcataaccaattcattccttcaaataaatgaattatctccttagatttgtgtactccgaggcaggcatgtgtctcgtcaatataggtctttatagtcctctatctttgtctcgtttaagactgcatagtcggcgagttatgaatattttctattaatcttttacttaacgagttattctttttctttggattaaatgatataattttattatatcaagtggttcatattccattgtatgacacgtgtcaccttctaaagtgaagctgaattttggatataacacatccaaaagactcttgaaataggcaatggagttaagccagtttgacatccattaccaacctagaatatccattaaaggtcaagctttggcataatttattgttgaatgcacaaggatgtacaacaaccctgaagaacccatctcgaagctataagtctggaagatatatgtagacggagcatcgaatgagaaaagttctaaagctggaatcatcctcatctcactgcaaaattatcaacttcagagtgcactccgttttgagtttgaagcttctaggaatgaagcaaaacacgaagcaatgatagctggcctacaattagctaaagaagtcaaagcccagaacattgagctctaaagcgattcacagttggtaatcaaccaaatttttggagaatattaaactaaaagggagaatatggctaattacgtagcaaaatttagagatttattgcaacattttaagcattattctgttaaggaaattcctagagatcagaatgcctcgcgaatatgctagcaaagttggcaacagacctagagatagaaaattacggattagtccccatcgccatctttcttctccaagcacaaaaatactgggggtaataattattgatccttccacttcctcgatggctccaacccaaaagtatatggaatctggaacacttccagatgacaaagccatttcacttaaggtttaatatcaagccccacaatacgtgctcatggacggagagttatacagaagagagttgtcaatgccctaattaaggtgcatagctagaatagaaataagtgttgtcatgcacaaaatacatgaaggatgtcaatttgggggctcggacttgaacttcctacagtaaaataaccataactcacttaattgttatatgattgacgtgattcaacttgcatgtctcacaccctagacataattatgaagctatcgttgtcaaaatttaccccaagagagttacgaaaataagctccgagttacccgcagtggaacccactgggcactaaaaattggccatcaccaccagattttaattttcactgtttaatcatcatcaatggttaaaaatatcttttttttttatttattttatttttgtgggtctccttcacctataaaagaacagcttagtttatttttcacattcagaaaactactcataaagtcaaaacttctttctctctagacttaaaattttttgatacttagtctattgttataattatcatcttgtgagaaataaaaaattgaagtaggcgtagccccatcactatcgcaatatatggggtgaactactataaattagttgtttatttaaattacttaattacttttatttatgggaaaaaacagaaaaatacaaaaaaaggaaaaaaaaattacaaaaatactttgggccggcccattaaacattt

SEQ ID NO: 113560 - DNA, 5227 bp, Cannabis sativa
  modified_base (1515)..(1520): a, c, t, g, unknown or other
atgcttacgaaaacaaaaaaaaaataaaataagagatatagatgtaaacaccattaaatacgagtagctatatgagcagtcctcaaattctccggtgaagcccaaaaagaagctagacaacataacaatcacaaaaagttacaactggtagaactcactcctgaaaagactgccaaagagaggagggtgtccaagtagttataaaccaccaactaatcccacacttaggtgaattcgtttgcacttaatttgggaatgaattttaaccctcttaactccatttgttatattttttttcccaaaactcttattacctcttaactcctcttcccgattcagacataaatttgtgtcataatttttttagacaatatacatatatagctctaaattatcaaaagaaaatcaaatcaatgctctctttctttttttcaaaaaattcctaccttccccttttatttatatataatattacaaaaccttctcacataatattatatatatattctttttttacgtgaattataatttttttaggtgtatatatatgtgagaaagtatatagcatactcctaaataggtatttcagtagactctttatctaattcagcatttaagaaaactttttagttttatttttttttataattgtgtacattgtagttatttagggctagtattaaattttccatttttttgaatagcttaaatagtcaaaataagtttcaaatattttgttgtacacgtgactatttttttcttatacgtgtagtaaacaactgtttgaactttatttttaacattgtaaactatttcgaattttttgaaaatttacagatgatcctaaataattagtgcactcgatttggaaaaaattggacttaaaagctcttctaagtctaccaaaacacccttttaggggttgcagaacatattttccctatataaatttatatagcatcttttcgatgttatgttgttagaatttgggataagatgcatgaggttccatctcaaaaccaattagctacaagaggagtaactcattcatcttatatataacaagttgtttctacacattagcaatgtgagactaatttaatacaccctcctagcgtgggcctggaatgtgtaggtataacgaacggcctttaagagaccacagtgccgaacgtgacatttgaaagaatcacaaaaggcaaaatatcgggaaatttatgggtgtacacgtcgggaaatttgtagattttgaaacaggtcaaaaactccaacactagaaactggcacacattggccaaaaggtcccaaatggagattaaaggggaaacaacgaaaggttttagtttggctcgtctttttagaccagcgacattttgggctcacaacgaatcattaatggctctgatacaatgttaaaatttaggataagatgcatggggttccatctcaaaaccaataggctatgagaggagtagtccattcatcttttatatgaaaatttatttccacacattnnnnnngtgggactaactctaatatatatgtagtattatataatattatgtttatagtacagtttttttaacaatatatatgaattatatttcatatttaagtatttttcaaaaaaataaatacactttaacaacttcatttattaactaatgtaattaatttgttaatattattaaattaaaaatattaaataattcagacgttaaaaaaacagtctaaatatttaagtattcagatttagatatgatattttattattcagatgtgcattcaaattcaaatgtcttgatcttaaaaaaaaaacaaacaaacaaacaaatacacccttagtagatgtgggattataacaatacaccccgcttaactcttaaaaatcaaataaataaattgtccttctatgtgctgtaccctacaatctttggattggaaggatggaaatttaacataagaaaaaaaaaagtacttgaaggtattattagtctcataaggtgtcaaatcccagacctagcaaggtattacattattataacacacttttactagctccattatccaaatcataatcaaaaaaattctaccctttaaactcttcaagcaaataaagctaaaaacaagaggattgtggaattgttaatactactaacctcaggtagcataaccacttctctcccagctgctatttcaaaagcatatactttcatgattgctgtgatagcataagcctaaaagaaaacaaaatttccaatattagtaatcagtttttatttgcacaaaaaaaaaagtaacacgcacacaacttcacatatacacacaaggacaaatacacagataaaaataccagcacaggcaatgcatgtgtagacacacatgttgtacacacaaagaagacacatctgcataagaatatgaaatggatggaaacatatgcaatatttttctatgaatccctccgagagtctgagcgaggatatttgcaattatcacaaaattaatataataataatgaagctctacggaaaagaaaatattgatactttgattgcaaggatgaagttaagtgcaatggggttgtaatttgtaatgaaaatgcccataacattttaacaccatgtataaaggcaacctatgtaactatatgccccattaatgacctataatataacaatctaaacaccagcaggttagtgggtttccgatcaagatcacaatctgcctgtttacccactaatgattagttagcaagcaagtttgagaaagtcagaaagatctaaccagctcatcctgcaaaacgtgcttacaaacaatttgaagattgctgatcagctcattgtaataacgtcactgcagtgagcagctatccaaaaacaaaaacatgaatgtccatttataatggtactttttctttcttatccaattagcaaacacacggtaataattggtaattgaaaaggaaaagaaacatagaaatgtgagtgaaacaagcacaaatcatgtctttaaattccaattcccaattaaacaatatttatatagcaaaacataaacagtagaatgagatttaaggataccttcacagtttcatcaccggaatatgcctctgcgatgtcacataattttcccgtgatatacgcagcatcatacttcccatcagcagttccatattcccccaatacccaacaaatgacctaccacgtgaaaaccacaatcttttattatactttgtcgaactatttcaggcttcctcattttgttgacaagtggaaaaagtagaacaaaatcacaaatatacctgaagaaacactgatggcagtttgggctcattaagaatatacaaatacgactgtacctgcatgattacaagcaacttatataaatatataattaaaactagggagcattaatgacaagtttgcgcaaggataacagggctataagtaatgagtgttggggtggcagttaatgctttaaaagatgtaaataagaccacagctacaaatagatagaaaatgtatcaccaatcaaaaaagcctcacacatcatgtgggctcttcctcagcaaacacaagataatcccagtgaacaaagcattttacaatgtagctccagcaaatccaattttaggtataagaacaatgacaataagacctataatagcgcagatgtcctcagttttacactttaaaagatgcatcacaacatacacatatttccaagagcaaggcaacaaaaaaaaattctcaaactcgttcttggtaaaggcatataatatatatttatatagatggatagataaacaccccatgacttggaattcaaaccacacagaatcctggataagttaccaccatataatacaacactaaaatggaacctgatattactaacaaatcatcataaggcacaatctaaaagttatcaaaatagccctagtacatcaacaaaacccttaaatcaaaatcataccagacttatatatcagtatttttaagaaggtgactgcaaatatatactgggggaaagagaaagagggactattatataataagactcgtcaaggtaccaaggaaatataatggaatagcatgcttaaaagttcactatttttgtaaagcatatgtatacaacatgatattgtctctaaacttgtgatttgatacaaaactcacagagaatataagtacagctggtggaatagaagaaaaagaagctaatcttgtagaaagtaacaggcaaatcaacacttcaaaaattatattccaacaaagtccatcttgtagaaagtatagaaaatgtcaaataatatccttacacatggtcacaaaccgtttcattcaggtgatccgtgattcccataattgttgggtcttgcacctcgcattcaactataatttttttgctaaaggcacattcaactacttgagcatggaaaaatgcaatagccacattttgtggataattgaaagtataaactaagtttagctattcgactgttagacccttggtagcatccatttgtgatgcactaaagggtcgggccccaatcgatcccaacttcccatgccctaatcgatgatgacatctcactgaagtttgattggcttctataatttcagcaagcaccatagtttggacaagcccagtgggtttcataattggccttggatctccatttgaaaccctttaaggaaagtccattccaacatagcctctccaatcgttctgactgaagcaaccaaactctcgaattgtctacgatattcttggacaattgaatcttgccggagacgaaggaaacgatcgtaaacagtccctcatgcgctggacgaaatcgtcgaaggagcaaggcttttaattcttcccaagtttgtataggttatcgcgagctctcccgtcgaaaccaatgcagagccaatccttccaaacacaacacaccggcttcaagctattctgctaccgacaattgctgtaggccaaaataacgatcagccctatgtccagtcgtttgggtcagcccctaaattcatgggcagttcaattttttaagctcagaactcttgtcgtcttccaccagcttcgttctcgtgtataccaaattgcacctggggttgatgagttctcaccaacattacgccgaagaggggtttgggaagtcccagaagcttcacagatgctagcgagttcattggcgatacgagcttgaccattcatcaac

SEQ ID NO: 113561 - DNA, 4327 bp, Cannabis sativa
caatccgtaaaagtacaataacgggacaaaatcatatccttatatttctaaatatgcaactaaaacagaataaacgataaaaaaaaatcatttaagagaagaaagtgataatgaatacaatttcaagttaattcagatttttttattttattttttttaatccaactttgttttttatttaacaagaaaaagagaatcattagataaaacaaattatatttcaatttgaaactataaaataatctattactaaaatacttaataaataataataattatattataaaaacaaaattacaagctatacatattagtttttctaatcaattttttttactttccttttataaaattatatagattaaattaaggttagtttgaaaaatgatattatttcaattatttcctgaattcaattttatatctttataatataaattttcaaataattttttataatgaaaatatttatatattatttattgaataaattttaaattatttcttaaaacatttcgtaagttaaaactaagtcaccctaagaatagtaggttatataatttttaaattgaaaatgatttttgttgtctagagattaatgttaagaaaaaaaaaatatcatattaaaattagttaagttagcacacttaaaaagacgtgagatgagctttctcttttccaatggcgaagatgaaaaaagcttcatcaaaagcctctatccactccacaaaaaaatgatttgcaatcaactattgaggctatggctcaagaagagaagaattaggaggatgcataaacagaattcacatatcggtttgatggggaacttccttcaatttaggaagtgcaagagtatttgaaccaagacatgatttggagatcgtctactctctatagagcgggttgagacaagggatctagaataaagttacaagaacactctcaaaaaatgtgggctcatctatcttcgaaggtgaattatgtgttgagatttatgcctgaaaagcttataaagatatttttaattattaataaagagttgaatatcttgatatatgcttgaatgttaaattattaatatttatcattgaataatttatattaaatatctaacacgaatcctcttcaagccccttttgctgtttacctctgttagtaatggtcagtcgtgaccattattttagttattatgtcaggtgtattcagttgttcattaggggtatttttatccttaggttggttcgttatttccgttatttgctctgttgagctctgtatatatacgtttgtttcttgtatcatttcatcaatcaataaactcaagactttcttttctgtcataatgtcttttcgtgttatggtatcagagcgaggaagaggagcttccccttgatcttgatcttgttcttgtcttctccttcgctgtgtcttcttctccagcgaagcttcttttgttcttctgaagttctgtcctgaacttcctcttcttgttttcttttttttttctcgattagtgttttcttttcctaatctgatctggctctgtttccaccatggaaactgataatcaaactgaaactcaagggactgccaatgatggtgtttctgctactgttgaagaaggaataggaccaaatgtgcagaataatcatgtgcagcaaaggaatccccttgaggatccctcgaatccttactatttacaccacaaagataacctaggtaacattcttgtatcgtaacctctaactgggcaagacaattatatgtcctggagtagagctatgcaattagctatatctgttaaaaataaaattagattcttggatggtagtatcactaaacttcattcttctaattctgttatgtacaatgcttgctataaaaacaacaatttcctggatcttgaatttagtttttaaagaaatttcctctagtcttttatatgatgaatctgcaactactatttgggctgatcttaaagttagattccatcaaaagaatggaactcacatatacaatttaaggaaaaaattgaagaacctgaagcaagaaaaccaaactgtcagcatgtactttacaagactcaaaacagtttgggagcaactgtcgaattacagacccaattgtgtctgcaatggatgtacatgtggtggtgttaagaggctccaagaacatcactacatggagtacataatgtcctttttgatgggggctttcagattccttttctcaggtcagaagtaaaatccttattatggatcccctgccagaagtcgacaaggtgtttcatttgttgacctaggaagaaaaccagaaaggcaacatcaatcctgctactgatcctaatttgaacatggcttttgccttccaaggagataggagtaataacaagccgaatcctcaaggcaacaagtctcactctcctagaagaaatcgagctttttgcactcattgaaacatacttggacacaccatcgagtaaatgttacaagattcatggttatcctcctggatttcacaaaaatgacaagggaaaagaagcctctgcaaatcaaatacaaacgaatggtgacacaaatactggaaatgaaggacaagcaatattaccacaactgacagcagcacaatatcaacaattactgaacctcctggctgtccaacaatcgaacatgaccaatacagacactgacaacaacacaggtaacctaggtattgttctttcgagtatgttcaatatacatttgaaagattcttggatactcgattctgaggctacccaacacatatgttatgacaaaaatctatttcaatgcatatgttatgttaattccactagattattttacctaacaatgaaagtcttattgtcaatcagagtggcaccatagttctccctaatgatttaatcctaagtaatgttctttatgttccaaactttagatacaatatcatttctgttagatgtcttgctgatgacaacaatttttgtgttcaattcttttctaatcactttgtcatataggaccatgccagcaggaagaagattggaagaggtgaatccaagaatgggctgtacattttggattctaagcctcttgcatctcctattcttgctatcaaagctgatgtctggcactcaagacttggacatccctcaaataaatgcctaagactcttagatagcaaaataaattgtaatacttctaatctacataaagatgctccttgttacatttgtcctatggaaaaacaaaggaaacttccctttaaaaataacattacttttgctgataacaattttgatttgattcattatgatataaggggtccttaccatgttatatcccactcgggttttagattctttcttaccattgttgatgatcgatctagatttacttggatatatcttttgaaacacaaatccgatgtttatgctatcattcctcaattttttgcttatgttgaaactcaattcagttgtaaaataaagaaattttgatatgataattctcctgagcttgtatttaaagatctattttcaaaatatggaatcatgcatgcttttacatgtgttgaaatgccttaacaaaatgctattgccgaaatgaaacaccaacatttattgaatgttgcgcgtgctctttgttttcaagcacacacaccacttaaattttggtctgaatgtataatgacatctgcttatcttattaatcacatccttctcctaacttagataataaaactccctttgaattattgtttcaaaaaccacctgattatgctcacctaaaaacttttggatgcctcgccgttgcctctactctcactgctaacaaaactaagtttgctcctagagcaaaagcttgtgtttttctaggctatccccaaggagtgaagggatacaagttgtacgatatcaatactaaacaaatatttttgtcaacaaatgtgatctttcatgaacacattttcccattcttaaaattgaatgaggatgctggtaacgttgatccatttactactattgttttgccttctactgatgttactaacactcataatgactaccctcctaataacattgttgttcctagtcacaatgatcccttgcaggaaaataattcagatgcaccagactcaatgaatgagtctgctgagatttccaacacactagaaactgctactgaaacactagcaataattcctcgaagaacaggaagaaccacgaggctccttgcttacctaagagattttgagtgctactccgttctacaagacaaacacactactctgttggaaatattttactaggatcttagattta

SEQ ID NO: 113562 - DNA, 5335 bp, Cannabis sativa
tggtttgtattgaattgtaggatcacttgtgtttttggttgtattttatgatgatgcttagagtattgaaagatttaattgggtgtataaaagcgaacttgcagagtttcattttttttttgttattagtgttaggctaataactttaatatttattttgttgaaattatcatctatcaatctacattggccaaaaggggttcccttcatccttgcaataatctactgaagagatagcaaaagtttcagccttccgaaattggccaaaagaggttcccttatcctttcaattaatccttcatgttttttaaatttttgaacgattgaagtgaatattccactccctctatatgtcacacggcttgaaaagtgggctgaagtgggaataataagttttggagccatctgtaaaagataaacaatacaataattaaaaaaaaaaacgtaagagaaaacatgataaaaaacactaaatcttatcgagaatctaccgagaacccatcgataatcagtaaacactaaccaaacatgacaactaaaagactaactaatactatcaagaacctatcaataataaagcctacataaattgaaagaaattaccattaatctccacaatctttgaacaactgcaattaatatttatagagaacctgtcgtgaacccatcgatcatcagtaaacactcaccaaccatgacaattaaaaatctaattaatactatcgagaacctattgaaaatctattgagaatatgtcaataatcaagcatacataacttaaaagaaattatcatcaaaatgaagtgtatttcaatacaaataatatataatcgatctaaattaaacacaaaaaaaaaaattaaaaagcaaacttttttaacaacatcttgtcgataacctatcgagaatttttcgataaataatcgagaacatacataaccaccaccacccactagatcgaaaaataccataaccactaaatcctataaagaacctgccgagaacccagcgataatctgtacagacaccaaacatgacaactaaaagactaattaagactatcgagaaccaatcgacaatatgtcgataatcaaacatacgtaaattaaaaggaattatcatcaaaatgaagtgtatttcaatacaaataatatataatcgatctaaattaaccaaaaaaaaaaactaaaaacaaacttctttttaacaacatcttgtcgataacctatcgagaatcttttaataaataatcgagaagatacataacaccaccaccacactagatcgaaaaacaccataatcaccatataaaaccgaccatgaattcaaaaaagttcatcaaaataaagtttattacagcacaaataatatataatcgctctaaattaaccaaaaaaaaaaaactaaaaacaaattttttttaacaacactttgtcgataacctatcgagaatctttcgacaaataatcaataacatatttcattttattttcctcaaccaccaccacactagatcgaaaaataccataaccactatttatattatttctactccacctaacaagtaagtatcaaccattgtcacatttttctttcttaattattattcttttctttaaaaatgcattttttgaatccattcattgatcaataccggtaatgtaaatttttcttttaatttggattacaaaaaagaaacatttttcttgatttcttcaatgattactaattctattttgttttaattttatagattttgtttccaataattgtattcaaatgatttcacaagaaagtaagaagtaataagaagaattgaagaaattaattaaaactatgatatgtaaagcttaccaaagacgtgaagagccgaaacgaagtcgatgaagcaggatgatagttgggccaatcttgtaatcgggagcatcttcggacgtgggcagtggctcggggacgcgactgggggaggtgaaagtgggagccggaagtgggggaggcgacagtgagggaggcggtagtgggggacgcggctgaaggagggagctggctagaggaagaagatgaaaggggcggctgactgttatggttagggttggagagagaattggttttaggtttatttaggttttaaaaataaagaaataataagggtattttaggtaaagaaggaagctaatagaatagtattgtataaaatatttaattagatattttttgaaataggaattttttgaaataggaattttttgtatgtatattaaatgaaatttctcttttgaaattgacaataaaagattgtgcatggtaacataaaatagcataagacattgtaagatagcatcaaataaaattcttatcttgatttgatctctttaattataaaccgaagatagactagaacaattatgtttgtattatctcctagtgataattttattttttattttacatgcgcacaatttttcttagacctgtttggagaggctgagtcagtaaggacttttaaatacgtgtttccaaattatccaagactttgtttggcacatggatagttgggcttgttgtataactatggtgtgatctattgcttatttgatattgcctttactatagattttggtacgtcgtctcctcacacgttcttgtaagttagtaaacttactaatagtctgcttacttatgagaattgaggggaggtgctactggaacttttacaaaaaaggaaacaatcataagaggatagattgtacaatatatattacaaacctgaatggaatttttacacttccacatttttgactttgttttgaacttccactttttatactatgtagaaatatggtgagcgacgaaaactggatgactttgaacaaacgttctacaaagttttgtaggggtgtggatgagtttattggagttgttcgaatgtaaataaattctgctagagttactcgatgccattgcatgagatgtatgaatgtgaacttcgagactcccgataatattagggtacattcatttgtgcatggcatccaaccatcgtacatgacctggcatttttatgggaagtcgttcatgcaactggctgtagaaatagtagacaacgaggaagaagaaattgcggatggctgatattttaagagaagatcctagttttgatgattcaaatgctaccactgcttctttcaacaagcccccactgaatggtagtagtaagtacgacgatttgtttaaggatatggaaattgaactgtacccaagctataaaaaattagtgctcaatggtttgatgaagctaatgcactgaaaagttatcaataagtggagtaaccattctttcaatatgttactcttcatattgattgagttatttctgaagggtgaaaaattacccaagtaccattgcgagtaaaagatgaagttatataaccttgctttaggttatgactcaattgatgtatgcaagtatcactgtgccttgttttggaaggagaatgagaaaaaagatttttgtcctatttgtggcaaagtcattagaaaaagagaaagggagacaaaaaaaagttgcccaaaaagttatgtagtactttcccctaactctgagactaaagaggttatatagttaaggcattcagtcgaggacatgcggtggcattactctaagagacccaaagaggacgacgtgcataggcatcctgaaaatgcagaggagttgaagcagtttgataggcacaatccatcattcgcacttgaacctacaaatgtgaggttggatttggccactgatgggttcaatctgtttggtaacatgagcaactcttacagtatgtggccggttatcttagttgtgtataacttacgcctttagaagtgcatgaaagcagagtcattgatgttgtctgtattgattccagggtgcaccgcccctaggaaagacaatttttttgaattcttaattcactttccttcactcacgaccttgtcttacaaaaatctatttatttgtagtgagcatatgaacgagctacaacttaggggtgatcaaaatcttgacacatttcacgagaacgaatttttcgattggttcaagtctcatgtaagtattgttttgtactaattttatcattcaaaatgatttatgctagtattgattacatttttcactcaatgagagatcaatcaactctgagtggataaccttaggaaagtatcagatgagttgtatgccattacaaatccctctaatcccgttgtttattgttttcctagatgtattattaacagtgataaattcctaattaaggatcgggatggaaatcgtaacacccaaaacactagtattttggtgcctagtgaaggtggtcaagatttttatggcctactccaacaattctacgagttgacttacttgaaggattgtagtacaacttccacaactagacaatgtcgaatatgtccgagatgatataaaataagactcattactaagaggttcattttaaagaaagaatcaattacaaggacattaacattctcacttgtctttataaaagattctattatagtaacctttgcttttgttactcgtttcaattcattcatcaattctaaaaccgtaaactagaggagaaggtatacagacaaccatattaatttttctctaatggtagtgaacatgtgcaagcattaaaagtctacttatagattaaacaaatttttcacgattggtattcattatgtcatcattttttaatgtttgaaaagagcattatagaattaattatataccagaaggtcagtgaaagtaatatttttttttatataaagacaatatgttatttgcaagtgatgataaaagtttccgatataatgtaaaataattcatatatgaaattattattttgagataaagaataaaaataatgtatataattttaattaataagagagtagtcacaatatctctgataaaataaagttatgaattattcatcacacgatacttttatctttaagtgtaataaattaaactcaaaccagcatttataaaatgatctggaatgagtataaattaagaacattctttttgcttctatttttagaagtctaatatatgcttaagagtctagattagactttgcatttatttcaagaatgttatgtagtatcagaataactaaagttaagatcaccactttattttctcatactaagtgatgagttattttgaagatactaaatacaatattcataatatattttattaagatcaactaatatttgattacatctttaagattgaaattccgtattttaatattcccagtttgattat

SEQ ID NO: 113563 - DNA, 4695 bp, Cannabis sativa
  modified_base (178)..(181): a, c, t, g, unknown or other
attcaattttactatttcagtgattatttatgtactaaaccatgcttcccagactttaatatctaccaaatcatgcctctcgaactttgacatgtactaattcatgcccctgaagttttatccatgttggactttttttttttacaaaaattagataaaagtctttaaattcaacaannnnaatagttcaagaggcatttttaacgaacttaaaagttcagggacatgatttagtacatgtcaaaattaaggagataattttttttttttttttttagaatattgtacataagtagttttgaaattattttttcaacaaaagatgatcatgggccaatagagtggccaactatatatgggccacaagcccaataaacttaatacgtaccttcatcaacggtcttgatcaaccgctggttttagagcatgatgataacactaagcaaaaaggatcatcttctccgaccaaatgtccagtttctgtccacaacgatttcttcaactcctacattgttcttcttcctcctttcaccactgaaaaagtccaaaacttttctctatgactacttgtattcattcattttgtaaagctcccacctttatttttcctcctacttctttgggctcatcctcatttttctcaaaaccccaccaagcaaaaccattggggaagaacaaggattcccatattctgggacaaagaggactgttgtgtaagaaaataaaaagagggactccctgtggagcacttcttccagttgatccatgggcacccaccattgattcccagagcatagcttcacagttgtttgcagcttctctattcccttacattggttttctctattttctcaccaaatctaagtctgccccaaagctcactttgtttggattctacttcttgctcacctttgttggggctactagtaagttttctcatattactttttagctcagtttagttggatgattataattctctttcttctttctgatgtgaaaatactatgtttttctctattacaaatttaagcttttatcagattgtgtggagattcagatacccttttgatcattaatctatttatttagtgtcaaaacagttaccataacttctttctttgatccctcaaaacgtctttggaatagttcttgttcttaactttctccaattttcatatacatgtataaatatagggatatttgtggggtaagtactcaaattttaaatttataatcgttataatcaatgattttcaatgattttttttgctgcataattacataatgttattaaaactgtcctttttatctaagttagttagtacagattctattagtgtttggacgtagtatcagttacatctaaatcttttttagcaaattcaaaaactatgtctggttacaaatttaagacactagcaaattcgttctggactaaattatagctttactaacattgcttaaaaaaacttatgccgtaaatattcgaaactatatgtgaatatataattttgtcttgaatttttctgacatttttaagtttgatctttggtgtcctgaatccattgaacagttcctgctggaatttatggtaagttctcacagttttagagttctctaattcaattactttattatgctttcatacattttgtatagatggactaactatgtttactctcctttgagacagcaaaagtacactatggaacttctttgtctaatgtggactggttacatggtggagctgaatctcttctaactctgaccaatatattcattgtgattggattaagagaagctctgaggaaagctaaagatacacaagaagatacaccaagtactgtgtcaaggttaaaggaggagaagaaaactcaactttaagtggttttaatgtatgtatgtaatttggtcttgtgttcatgtcttcttgtcacaatagctttaactattttgtcttgtcttcttcaactttctcaaataagcttaattttccaatatttctgacataagcttatattgtgatatgggatgaatccattgcaagaattggggtgatggggttggtatgttaaattgtagaagcttgtatgttgttcaatctcatgtgtgctgtaaaatgatttcattttcaggtgtaaatatacagattgaattgatatctgaattagaatgcccttttctggtattttctagcatttttatttgagtgtttatacttttctagaaactctgctttaaaattgaacttcaaaggaagaacctttgaaacttgttagtctcaacatacacctatttagtacgaaaaaggcacttaatgaattttacaaactattaatcttaaacttgttctcttaaactacacacttaattcaacaggtaaagatagctacctaattgagctgcaatatcttttttgttttgttttgttttcttttcgaaaacatttaaattgaatcaagagtaaagtccaggagtgtcaatgggaaattcgggtcattgttcattggatcaagtgagaaattcatttctggaataggagaattggttactgaattgttggctgagataatctcggtatgatcagattcagaccgttgttgttgcacgttatgaaaagctgtaggactgtttatctggaacggcgaaatctggtagtagtttgattcaggagttgctggagatataaatgattgagagaagcctcccaagaaagtttcattgtctaacatcaaaggtgtaaagctatcttcattcttcacattcatacatccaaatgaacttgaaggaaaagagaaaggagattccatcacttctctgtgtcccaattcatctgttattaccctcaagttagattgaaacttggggttgaattgttcaaactgttgctgttgaggaatcatgttttgattgttcggtttctgatctttcttttcaggtgatttaggtggctgaaccgagttactcgcctgtgaacaactgtgtgttcctctgtatgtgatctcgaaaaggaaaggatcttcatctgttctttgcacttgctttgtggcccaacaactctgtgtgttgcgaaaagtacatctgtagtagcttctgcaaaataaaggtaacatttttatgttagaattttcagctaatcacttggggcagatttcttccccatcccttcaatagtttagataatctcagagaccacgtgtcagttatagggaacttatatctcatcctctctttattgggtcatcggtatacaccttgagggttctcatcccattaaggatgacaccaccaccacaagctagccttccaaatggccaagcataattcctctcatcagggactgtggtgggattcgaacccttcacccaaacaagaaagaatgccaataaagacatttctaccactacaccacacaacacgtgggtactattatactattattagttgatggtttttgcctactttttttggacaatatggtttgtatatgacaatgactgtttacctaggatacttggctcctaggatgtccttttgtccatactttctccaactatagccatcatcttgaggtccctccaaaccattttcagagctaactctcacttggtctgtccatctaggcaatgtctttctgcaaaaccgaaatccataaatagtaagacacacaatcataagtagtcaaacaatcatgaaaagagtagaagttcaattcaattcaattcaccttttcttagagctatcttgatgatgatccttgaatggcctatcaaagttttcactctgaggactttcattattcgaaatgggagactcgggcaaactcacactagtcgccaccctaagaggctgctgctgctgctgctgctgatgttgctgaccgccaccccatttaagaatcgaaagagccttttcatacgaagataatatcctctgcactagaaattctctattctccggcaaagcttgagaacatatattttgcttaagctgtttcgctaattccatcccttgaacgagctcgctgataagtatcttctgctcccagctccaattaccctccattgttcttttactcaaaattgtaatcaaatgaattcaacaaaaaccaacccaatacagctcttcttttctgatctcaaaacttgttacttttcattactaattaaaacactattcctcacaatatggagagtgagttgtaattggaaatttgtgaagaagatgtatttaaagggtggtatgtttgagtttgaaatggtggggtttgtttaatttgagatttgaagtaagaaagtttgaagtttgactaagaaaccgagttattcagctctgactagtctttggtcattgagaaccaatagaaagaaagagtttttatttgagtgagtgaagaaagtctatgctgaccaattcctcttcttctattactactctcacttatttgttggttcaattactctcaaaagttcttttttttttttgtttttatataataatttatttaattttttttttatcaaattatttttagagtattattatcagggaattatcccatatactatttttttttcaaatttacagtttgggttcctgaagtggttgcaactctagttgcaataggtatttctatgcgattttttgttgcaatttaggttgcagcgctagttgcaatttaggttgcagcgc

SEQ ID NO: 113564 - DNA, 2001 bp, Cannabis sativa
atcgatagatacaaccatttttgagcatattacatcctatatcttatataaatatgaacgaataattcaaaaatcaaatttatactttactttcaatatcttactataaaaaatacacaagcctataataaaattagcacacaaaacctataactatctttacacacaatttcttaatttgttacatgtctacaaaaccattttaggtaattaaacattacgagacacaaaaagtgctaattctggtgtttcaaccttggaaggttcccatgtcatgtgaccactttgttggctaattttaccacatttattcacttgctcctccttcaaacgaatatcacaaccactaccttgttgaactacaagaatccatgcattaggggcaaaagtagagcaaaccaaagtatctcctaaaatacctaattcaggataatcactccattcgatttctgtttgatcctctaacatcttccaaagtgatcctttactagtacctctttttgatgatccttttccaactatgatcaaatcatactctttttcggtcatagtcccaatagctttcacaatatcctctacactactcacaacctcttgtgtaatgttcactagtggattcccatatgtcttgtgtcgaaactcttcaaagtattgctcatctaacaatctatctcttttttctttttcgttatagataataccactgtcttcgtcgtcattgttgttattattagcagtgacaaaacgcagtactgttagggctacattttgactcccagacattctttgcgcgtaagccaaggcctcacggtcatcatgtccacctaaaaataacatcatgaagttatggccagttggttgtgtaattcttgcatctgcgagaggcctgtggccacggtccacaagtatagcaaccgagcatgaggatttttctagtacttttttgttaatatttctaaaatcgagatttgttgttgaattattattggcattagttcctcctcctactacattttttatcgtctttaaatgaaatggcaaaattatgatgttggcacgattctcctcagcgaaatcgcatatgtgctcgtgcatggttgcgtatgatgacactgcagtcgatggctgtatgaagagaccttctttctcgctgttgaagcccttaaaggcatcaaaagccgcttgttgatcattgtcgtatcttcctccttctcctcccatgttgactaccgtgcaagtaccatggacaatgttcatggcggtggttcgaccaatattctcaataaggtttatgacaaatacggatattggagagtctcttgtagggttggatgcgtctagaaggttgatgatgccagtgacctcgtacgaggagtgaaaacatgtcaaaactcgaagctctgagcttggttgtaagcttgtcaaagacctttgcatgcgcttcacaaattgcttaatagatttgtaagtcaaatttagaataggaaaaacagcaacagtcatccaccaaagggtcacaatgatcattgtaaatgtttggttcgtgagcacctgaaatatgtaaatatgactaataattatatatccttaataaataatataaaaattgttaactattcataatgtgacacattagtctgatgttaggcaacttaaagtaccacctaattaaagtgtttaactattgttatattaaatatgactataaaatagaaaatattactctttttttaaaacattacaattcaaatttaaatttattaattccacatatctaaataaaatataaaaaattatttatgtttcttaaaaaattactattgtgatgtcgttacttattacacttactaaaaaattatcttttaaaaaaataaaaaaaaagtgtataatatttaaaaaatatattacgattaaattaaaattataatttatatatatattttttaatattattatatttttttatataaataacacttaaattaaatatttttttttact

SEQ ID NO: 113565 - DNA, 3426 bp, Cannabis sativa
  modified_base (3275)..(3279): a, c, t, g, unknown or other
aaaaggccagagctgaagaactgaggtttaaggaaaagcagaaacatatacataaaggtgagcaggaaaataattatttttgaaaaaagtaataagataacatagaactataaaagatggcaactaatttaagtggctttgcattttttaatttcttgacacattcattttcgtattgaataaatattgattgctaaagttgtaaggcatcagcattcttgtttaagatatttaatttaaaaatattctgccaaaaaatatgatatgaaaattaatatcaaaattaatatcacacataccatagataataatatgaagtttaactttaaagtgcaaacatatttttaatttgaggataattcttagtaccacacctataatatatgactaacgaaccttttaaaatggcaacccttgttttagcattagatattggaaacctgtgaccaagccaatggaactcagtcaatgatgcagcttgttgagatctcgtttccgccataacagcctacaaacaaataatgcgcaagacatgagctcacatagtaccactttagaagtcacaaaattatcttacaaaaaacgacatgcacctttatttttttaactcatttttatttcaaaatatcatatacatgcacttaaactccaaagcactcatcaaacaacaaacaaggacagctcattaacactccaaaacactcatcaaacactcacttaaccaacaactcgagctagcttcaagtaacaaggaacacacaccattaataacaaataaggacagcccagtaatgaagaagaaattcaaaaagataactacagtaaataattcaaaacccataacaaagcaaagtactaccaacaagagaaatgttacacaagcaacagtcacaactcaattttgatattttcacactaacctccagtttagccttaaagaggtcaagtgctggaccttccatctcaccaatgtttagaagttcagaggcttgcagatttgactcgccaatcttatgtaggcagtatcggatgctaggttctagttcctcaacacgttcacgacacaaaacttggttttctaggtctccatacttcccaagttcctcatacacagccctagtgtgtcagcaataaagtaaaaaacctcgttacaaactgaagtagcctattaaactaaaatccactcataccatcagtaacaccatccaaaatcaacgtactttgcaaaaggtttaattttcaacgggaaaatcactaacagcgttgatggagaaagatgtaacaaaaataaacatacattttcagtgaggacaccaaattatgtttctatctgaaatccagtttcttactatgaattgtatgcaacacttataaaaaaactgacatgtttcattcaagatgaaggattcacctggcacttttgaagtttttcaaggctatctcccaattttggtcttgttcaaataacaaattccctttcataaaggaggcatacgcctgaaaattcaaattcaatgattaagcatataaaaatatgtgtacacctgaatatattccatatttttgtcctaccatgtacgcaacagttatgtcaacacatatcatgctaacaatcatagctatagacatagagaacaatgctaaaactctataaatttagccattatgctcattcacaaacctcagcttctaaagaagttctcgagtctcctttagttgcacacaactgtgcaaaaagtgtagcccacttaactgccttcctaagcctaccaatcaaatagattctctggcgtgcatttggaccatctggcagctgtctcttttccatggcatggctccaagctctctccgccgtataaagaactagatgaagaaatctatttaaattcagaaaaccagaaccattaagcaaaggaaaattccaaacatctccaagttatgagtttgctacataaaccataaaaccagaagaaaacacaaaattttaaagaccagccggcctaaagtaatacgcctcacattatgtacattttaaagaaaaaaattaagggaattgaataaaatctttaatccaagccttagaatgcatcacaaattttaaccaagagcttaatcattccaacaaaaaaaaaaaaaaattgaatgcattatcaaatatgggggaaagaaacatcacaagatatcataactacatttattcttatcttggcttagccataaatacctaaatgaccaatatcttaaacgaaaagataattcatttgaacatatttggtcaaagatttaaacagcaagacacacctcacttcagttacagtggattcagttaacagtcgccggttgtatttcccacggccatgagtgaacttcaacgatttatacagcctcctcagccgagccgtacaatacctcctatgaataatcaatgccattcaccccattacacaattataccaacatcaaattggaagcataccaagtctaaagatgacgctgatgacaaattacaagtaatagtaacaagaaattacactccaaatactaaaatctttcaacggaacaataaagtgaaactaaaagctcatatataccgatagcgtgtgtagtctccatgcctcaatccatgctgcatctgagcagatttcaatagctgcaacactgtaaacataaaaaaaaaaaaataaacaatacacaaatcaattgaattataatttgcaaaagcatttcgttactctaagcaaaaagggggaaattccgaaatgtaagcaattagtacattgaaaaagaaactgagaaagaaggaggacaaagagaaaagggaaatgagatttgagaacgaaccattgatagagaatttaggggttatctgatcagaggagttggatttgggatcgtcaatttccataatcgacgaatgagtgaagcgcagcgcaggtggtaatgataacccaatgacctacgctcaccaaccggaatgctcttctccgatcagttagtgacggagaaacccaaaagagccggtggagagatttgagtgagtaacggaatcggagaaggagagaaaggttgtggtatgagagagaaacaaagaaagaaatgagatttagaagctttgctatcataattgggcttttcatgttgggctaagtcaaacaatatgattgtttgggctaagtcaaactgcagtgtatactgttttgggcctacctggaaaatttacatcaagatacaggaataactacctaaggcaccatttttttttgtaaaatatttannnnnttacgttcaaagaatatttttttatatttttacgattttccaaaagttaacacgaaaacaacataaaagtaacatgaaaataacaataaaaaataacatacatataacaaaaaattaacaacaaataaacaaaatttcaacataaaa

SEQ ID NO: 113566 - DNA, 7019 bp, Cannabis sativa
  modified_base (1139)..(1139): a, c, t, g, unknown or other
aaaaaaaaaattttttttccaaaaattaaaaaaaaaaaaaaaaaaaaaaaaaactctaatgcttaacaacccacaagcatattccattaataatgttataaatatataaatgttcacattattcttctatgttgggtaatgagatacaaatacaaaaattagattagatggtagatatatctataataatgattgattaataaatcctataaataaattcctatcctagtaagaacactctatcatctacctcaataatgtgtcaacatatattatttttttcaatcaccatatttcctaaatatcatcatcaactattttttttttatatatatatatttatattaatatatcaaataaaggaagggaaaaattagctaggaaagcacaaatgtcaccaaccaaaacttcactatgtgccattacaaatgcacatgtcaccccccaaaatgacttaataattcaagtgatgataagcactagttgatgcattgtaatgtcaatcaacagtgtatatatatttatatatatatattgaataatataaaaattgtatagagttattgtacaagggacaaaacaatgactacctatccatcatctattctctatcactatcaatattcatcatcatcaattaattactatcatttttttttctcttaaaatttaataaaatggcattggccatgcttctcccaccttataattatgcatttaaatatctaaacttttcaattatgtaatagatacaagttgactacactttatttttttcttagtagcatttgaataccaataccattgtttttcttctttttttttttagtgttatttaatcattattattttgataattattattattattattttgctatagtctacatagtaatgaaatcacctctgtctctccatctcattcataatgggtcggcagaaaccaccatcagattctgaagtagccttattatgatttttgtttttaattttgacaaaaacgaaaatgggcccaataaagcaacaaaacagaagtggaattaatatattgggcctgagaaatgggctccactatgaactgtaattgtgaatgcaaagtactctcttcttcttcacatataaatatatatatatttatntatatatatatatacatttattatatgtatagcataatcaatctgacttttaagttcataatgaattggatagtgatggcacaggctagacatgtcccctccatgtcttacaatataagaaacatggtcccttcttactgcatttattttccttctatgtatgtatatatatatttatgtatatatatgctttgtgtattgaattaaagtggtagctcaagatatatatatattttacataattaacaattattaatcattttttttctaaaattactctaaatgtatgataatacaatgtttggtaggttttaaaatgtacttctattggtataataatatgataaaaaccataatttaaaggctctaatattgtgttaaagatgatatttttatcgttattggtacaattattatgattactctatcgatttacgatggtaagaacatacatggattaaaaataaattttggactagttctctcgaggtcgattcgatgcctgggcggtttaataggaaggaactgtaaattcaaatcctaacgacctgatttttttatacagggttctcgactttattttatttttgttgaagacccaaaataacatgagagaaattgaagaatacatttttttttttttttatacattaaccaaatttatatttaaataaaatttaattcaaatatacttttttttatgagtattgtacttaaattacctccacaccctcacataaccgagatataattctaaacataatagattgtattctttagagatggatgtgtaagtttgtggaaaaattgaggtaaaaatttagttaaagaaaaatggagactatcgtgaaatgatatgagtaaaattggtagaataattaaaaaaagaagtaaagataataaattttgagaaggggaataaaaattaaaggtatcaatctaaaaaagacatgtaataacattgtaatatacttgttgtaattatcattcaaaaacaaattcatttcacattgtaatatatttattattattattcattgattgataaatagtatacataaacacaagataaatatagatatcactttcacaattattaacaatgtttatctatagtacctttggttgaattgtatgtattgtctcatatccaaccaagtccacctacatagaaaaagaaagaaataaagaaattattttccttagtaataatttcatgatggtcctagtgttttcattttcttatgctatatagtcatgttatgtggctatagtggtgaagtagtaatgtgaataagttgtttggttacagaacagtagtactagtgtactaatactaatacaaaactcatgagagtcatcgaaagtgacaacatatatatatatatatatataaattaaatattttacaccaaaacaaacacagaagaagccaaagatggtggctattatatttgacacatacaactaaagtacaaagaaaaaaaaaaagaaagattttttagtacaagaaaacgtgttaaacccacagacaaattgagggtcaccatacttaaacccactagaaagtgtccccccacaatgaaaaaataaaaagggtctattttcatttcaattacagagacgtattgctaccaaatgcatcatattaataatgtgactattgattagattggcttcgaataactttaatatggatggaagatacaataattaaggggtgttatgagaaatctaatctatatctattattgttatatctatctttggacttaaagagacacattaagttagtatttgtctgagaaatttgacttgatacctggtaaagagttgacacttgagtgggttacaactaggcctgcatacaaatatgttaaaagagaataataaagaaagaaacacaaaacttattttctgcttctgttcttcactttattcatgtttgtataattaaagttagatttgggatataaagggagaatagaatagtaagtaattatatatacaatgtgacatgactaatatcaatcatatacagctgggatttggtttaaatcatatattattataagtaattaaagtctattataggatactactaagataacccacctcatgaaaaagtcatccaaaaacacctaatttgccataattatgtgagccaatgaaatctgagtttgttttttgagttttgatgatgcttcatgcctcttaaatgtgcactataataagtgggtgtcaacttttttttttctttccccaacttgtgattcctaactaattttctattcctttttaacccttttgaaaccctaccaatatagtccactgtccaatagctataccatatctattatctaatttatcactgctcaaaatcatgagtttaaggataatatatcagatttcattagtgcaccatattggaagatcagctttaaatcatgaaaattgagaaaaacaaatcaaaagggtcctcatgctaatacttaacttatatttatattagtgtaaatcccacttctcttaacatataataaaattagcttattaagtttatgtaaatcagaaaaggaatttttactttttgaaagaaaaataagagtagctattcaagtgaagttcttacctttgtgcagaggatggaattactggttctttacaatcaaataacaagtgagacctcaacataataaggagaaaaaagagagattagtatcatcataaagaagcaatgtaatgaacttaacatttatattttcacataaacaaggtcaatgtcattaaacttgcagatattaataactgcctgctaaattgtatgtgatttaaacaataattctttagtttgtgcaaaaaccaatttgaatgaatttcaggccttcaaacagaaacagattgggcctgggaatacctacataaaagttgattgggccaagaccctattagttttgacccatgtgtaattggaagtgtcaaatacagttgaaatcattgctgtcctcctttttttgccacttcaaaacatttcttctctgtgttcctatccaaggaatatttctggttctcaacaattttaaagtgggcttcttctctgtcttcttgaaccaaattcatttcatgttctaagggatggtctcaaaatctcacccttttgaaagatgatgtcaaaaaactacccaaaagataagttttttttagtaaccatgctgtgtagaagccatgtcttttgatgagctgatcccaccagttctaccacaaagtgttaaaaatttatcataatgcatcaaaatggggcatttctcaatcagatttgacccatcataagcttctttaagaaacacagtactccttgcacctttattagtgatgtaaaagataccatgatgttttatcaaacaaaggagtaacttagatggtaataagtactctgaatgaaatgcatccaattgagcagatgtcaatctcttctccacagtcaaacttagaagctcatgaagcacacccaccactctcttccttgcttttggatcagcaatttcaaatctcctagcgtttagataaggagatgggaactccattttctgccacttctcaaattgctcaaggtaacttgtgtttggtctaaaaccagctgggaaatttattttaaatgcatgttgaccaacaaaattaccatcttttgatattctaaccttccttggatacacaccagaagagaccagaattccttgacttgaaaatctttcctctcttgcagtgactgctaatgaagagtcccaattctccaaatgaagataagcttttccattgaaatccttgactgaaaagaattctgggtactttggaatcaatgacttgtcaaaatcatcaggcaaacacaactctgattcaataagtttaaccttttctagtggtactctacaatcaactgacaacatcaacaacttcctcaagttcttaaccaaaatgggttccattaactcccttgctttagcttcttcactagcaattctttcagctttctcagtcaaactaacaaatgggggtgtttgattaccaccaccaacataaaatattgaagggtatttctcaataacagacataaagttccatttttggacaaacccaacttctttttcaaggttacggagaagcagacactgctgtttttgagattggataatggatttcagccttaagattaaagatggcttcttctgcaagtccatagctttgtccaattcatggactctgtggtaaattttcttcttgggtctacttcctccactgtttttgtacttcacaggaaccaacatataagctgaattgcgagaattgttaaagcccaacaccatgaatctcctctgcatgtttggttttgccaaatatttcttcactgggaactaaaatcaaacacttggggtgcaatttaatcaaccataataagtaaacacatctataatatatccgtagcaataaaccacattaaaatcaatgcaaacaagaatagataactaaaatataatcagtaaatgaatctcctcacctctgtgacaaagcattggtttttatttctcactttcaatcaatattccaggaatataaagagaagtcaagaaaggcacaaatgtataaataatattaaataaattaatgaaacttgtttttgtttgggtctccataagggcccaattctacttggacagcccaattaaactagagagtgagcgaggcctgtttggtttcatgggtcaaagagttatattatggggagaagttgaaaatagccatttttttatacattaattaaatttacttctaaataaaatttaattcaaatatatctctttttatgagcattatacccaaattattcttacaccctcacataattaagacataatttcaaacataatagattgtgtttttggtgacggatgtataagtttgtagaaaagttgggacaaaattttgattacaaaagaatagagactatcgtgaagtgatatgggtaaaattagtagaatgattaaaaaaaaaaggtaaacataataaattttgaaagaggtggtaaaaattaaagacatcaatttaaaagaagtatgtagtataatggggtatttacataaatatggtaaggaaacttaatagaaaaaaaatatggtacttaaataaaaacttaacttatataggatatgcgattttaaattaccataaaatatattaaaattccctttatatttttcttttttaaaaaataaaacaaatgaaactacagtgatcgtcggagttgtcactggtgccgaaatagttgtcgaaatttgttgtcggcgccggaaaagtcgccaatgtagctgtcggtgccggaaaagtcattgaagttactgtcagcgctggatggcattgttgtcggaataattaccaagaaactggtttcttgatttcttggtgatttttccggcgacaatgccaatttcgacgactttttctagagtttgctgttagtgtcaaaaaaatcgtcggagttgctgccggtgccgaaaaaaccgccagaattggcattgtctttggcaaattcaccggaaaaatcaccaagaaagtaatttcttcatcaagaaaccagattcttggtgattttttagtgataataccaattctgacgattttttcggcgccagcaacaactctgacgactttttcggcactgataactactcctgtgacttttcctgcaccggcagcaaactctagcgacttttccagcaccagtaacaaataaaacagcctaaacaaataaaaacattaaatatggactttgtaaacttaatttacatatatgacatatcaaatatcataaaaatacaaaaaaaaaaa

SEQ ID NO: 113567 - DNA, 1377 bp, Cannabis sativa
tatttatgaaaaactaaataaaaccaaataaaagttactaaaataaactaaaaattcttgagaacaaagctaatttaatgcccaaaaagatataaataactctattttcatagagttatcagcctcagagctacctatggagacctagacttcctgcagcagtggggatgctttcgtgctgtcccactctaccaagcagcaggcagttggggtaaggcctcaagacattttattccacttttctctctctttttattattcttctccctatttcgatactttggcctctctaacttggcccattcagacacgtggccttgctggcgaagagggccgccaaggaagctggcatgctagtagctgaactggagctagtcaaggcaaacaaccacgacctgcgtgccaccaatgagaccctttgggctaagcttactgaggccaggttctaggttgggggtttgcagtaggagaaccaactgttggatgagggcaatgcccatcaggcccgcttcatacggagtatgaaagtcgttcatgatctgtacatggagactgtggggtggatgtttggtgaaggctcttcctcccggtcaggcggcgcacagccttgaaccttcagcaggcctccttgaattactgttgttgtttattttccctggcttcagggtttgttgtaatggtaaataggattttccccaccatttttctctagagactttttttgatagacttcttaggggctggctgtgtcatcgaaatagccgattccaatgactagtgtttcaacctttacccgttattcttgatcatctcttcatcggtccaaggatgatttcttggttttaccctggcgttcccaaagctgcaacacttcttggcccaccgctcaaactcttacttggaaaaaaattgctcgcttagggttagcccagagattgtttcctttcacgatagagaagccttcactcttttacacatcttcttcagggtttagttctttcacgaggttgagtctcaagagtaatgtctgcaactgccttagacttaggcatctttcttactttggtccttgtcaggctaacattttggcaaatttatgcaacctgatgggctaaacttatgtgaagtccacggagatgtgtaagaaggaatttgggtgtattatttcttttcaagaattttggttgaatatgcatcttatctccagatttgtgcttaagtttagcccttgaagaaagaattcaagtgcctttctcttagggagatttagttgaaaatgcttcctgattttggttgcatgtgtatgttgggtatttattttaccaggatcttagatctactcagaagtatgtttattaacatcctaaataagaactt

SEQ ID NO: 113568 - DNA, 5396 bp, Cannabis sativa
actcaaactcaactctcttgttaagaataatgcttttaagaaagataatggaatttattattattatctaatataatactaaacatatcacacgtttaaatgcttaatcaacattcaagaccaacttcaatacatagtcaaaataaataaactatactaaaaaaacttcaaacattcaggcatgtgattgattctttcaatatatatataatgaaatccacagtcatcacactcatcagtgttgtgacataattattaagcatagtataaaatcaagtttggcatttactactaattcaagcccaccatcaacccaaccacctctgcagatttcttactcaaatacagaaacaaaaagactacttttttatctttgtgagttgggttttcaagcaatttcaatggctttctagatctttcttcccatcttttcaaaagggtaagtgtcttttttcccattaaacctcaaaagcttgtaactttgaactttgaagccattaaaaacaagttttttaggtatggagtttggggttttgagtttcttgctattgttgttcttaaccttttctttttcaactcacaatgttttttgctcactaaactctgatggggtcactttactttcactcatgaaggaatgggattatgttccttcttcattaaattcaacatggaatgattctcattccactccttgttcatgggttggtgttcaatgtgataatacaagaacttatgttaaatccttaaatttctctaattttggcatttctggcaaaattggacctcaaattgggaacttgagccatttacaaactattgattttaacttaaatagcttctctggttcaatcccccaagaattgggtaacattccttttcttgaaaccctaactcttgagtccaacttactcactggtgaaatacccaaaaacctaaacaagctgagaaatttaaggtatcttagcttttttgataattctctgtttggtgaaatacctgaatcattgtttgagataccaagtttggaagaagtgtatttaatgcataataatttgaatggttcgattccttcaaatgttgggaatttgactaatcttgttaagctttatttgcatagtaacaagttatctggttcaatcccatcttcaattgggaactgttttatgttaaaggagcttactttaaatgataatcagttatttggggttttaccagatagtttgggaaacctaaaaagacttgaatatttacatgttgggatgaatggtcttgtgggtagaattccttctagtttgggtaattgtaagagtttgtcttttttagacatttcatggaatagttttaatggaaatcttccttcaagtttgggaaattgtactgagttaaatgtcattgctgctactcatagtaatatagtgggaactattccttcttcattagggaaacttcataagcttaataatctcttgctttccgaaaaccatttttcggggaatataccacccgagcttgggaaccttagagtgttgacactgttagaattgtacacaaaccaactcgagggtgaaattcccgacgagttagggttgctaacagggttgcagtatctcggtttgtttgacaatagattaaccggcgaaatcccacttagtgtatggaagattcctacacttcaacatgtccttgtttataataacagtctttctggggagttgcctttggagattactcatctgaagcaactccaaaacttgacattattcgacaacaaattctcgggaaccattcctagagagttggggattaacagcagcttagtgttattagatgttactaataatgatttcagtggtgaaatgccttcaaatctttgctatgggaagaaattgagggtgttgaatatgggtggtaatcgatttcatggtagcataccgtctcaagtgggaagttgttcgagtctcgagagactgattctcgggaagaataacttcagtggggttcttcccgagtttgcaatgaattcaaagcttttgttcttggatatcagaatgaacagattatcaggagctattccagcaagcttgggaaactgtcacaacatcagttccattaatctttcgatgaacatgttaagtgggttcattccaatagagcttggaaagttgacactccttcaaagcttgagtctttcacacaacaatttggtggggtctttgccatctcagctttcggcttgtactcagttgagtgtgttcgatgttggattcaattcgttgaacggtttcattccatcgagttttaagagctggacagggctattcactttgacattaagtgaaaatcgtttcactggcggtattccaaagttcttgtctgaatttaaaaagctttcagtactagaactcggtggaaatcgtctcgggggagagattccttctgttcttggagcattcgaaaatccattttacttgttgaacctcagcaataacggtttgacaggagaacttccatcagaaataggaaaaatgaggcttgaaaatttcgatatatctcataacaacttgacaggaagtttaacagctcttcaaaacatggtttcattgctcaaactcgatatctcatacaacgatttcaccggtgaagtcccacaaaatttgatgaagctgctgcaatcctctccaacttcatttgcaggcaattcaggtctttgtgctcgttgtctcgaatcaaacatctcaacctgcaaccgaaacaacattttacagctttgtgagtctcaatcaagcaaaagaaatagcttaagcattgtagaaatagcaatgatttcgcttggctcggttgttggttttgttatgttgggattgtcttgcttgtttttcttatgcaaaaggcgatcgaagcagcaaacaacaaggatctcttcaccaggaccatcttcattactaacccgagtaatggaagccacagaaaatctaagtgacaagtacataataggcagaggagcacatggaactgtttacaaagcttcaatgagttcagatgaagttttcgctgcaaagaagcttctcaatgttggttacaaagaaggaagtgttggtatggttagagaaaccgaaacactagggaaaatcagacaccgaaatcttgttaaaatcgaagatttctggttaagaaaagactatggcttgatactctatcggtacatggaaaatggtagcctttatgatgttttacacgaaaacaagccaccggtcgctctaaactggagcgttcgttataacatagcggttggaactgcacatggattggcttatcttcatttcgactgtgatcctgtcattgttcatcgcgatatcaaaccgagcaacatacttttggatgctgatatggagccacatattgctgattttggtattgccaagcttttggataagccttcaaacttagcaacagcttccatttcaattgctggtaccattggctacattgcaccaggtataaatcctaatttcttttcttgaataaatatgtattttgttttatgagtgttcaatattcattatcaactttgaatgttaaataattagcaattttactctctaaaatattactaaactatttattgctgccaaatttatttgctttagtaaaaaagcgcgatttggcagtagtaaaaagttggatggcaacaaatggtagttggcatagctcgggagtaaaattactaattatttaatgaaagttctatatttcactaacaatattagtttagagggtgtgatttttttcggtcaaagttcaaggagcaaaattcttatttatttttctatttttgtttgtctcaaagttcatgtttttcactttaatcgactccttttactaataagagtgtgcccctcgaattgttagtaatgttaaatattctatgttgttgaaatatgagatttttgttagatttcgttacacttctattaaataattagtaatttttcccttttctgatttaataaaaagacaccatttggtgcgctaaatatgatagtgtcataattcgagtgtaaaattactaattattttacataaattcggggaaaaaatatttagcatcgtaatagtttaaggtgaaaacaccggtttattctttttctttttgatttcggtctcaaagttcatgtttttaacttgtttcttacactaactcattttgcttattttgatcatgacagaaaatgcatacacaaggagcaagagcatggaatcagatgtatacagttatggggtagttttgctcgagattttaacccgaaaacaggcattggatccatgttttcgagaagaaaccgacattgtaggttgggttagagagttatggagcaaaggtggaaaagaaatggtgaatgagataattgatccaagccttgagaaggaagtttttgataatgatttgggtattaaagaacaagtgattgaagttcttatggtggctttgagatgcactgaatatgatcctaacaagagaccttcaatgagagatgttgtcaagcaactcttagatgtcaattcgcgccgaacacaaagcttgaaaatttagcctaagtttatttttcagtaacaatcaaatattaagttttttttttgtatgacattaatatcttttgttagacttttagaacttctgtaagtatttgactgttatcaaactctgccagaagatattaatgtcatcaaggaaaaaaatttaagtattatgactgcaattgcaaaataggtttttttgggttttttttttttggtctcgttctattgtggagtaatttatagtattgttgaagtaatcgagaaataatattatctcgataatactattctggagattggtgttgtagttggagtataattgggttttatatataatgtaataatgtttctaattgtattagtaactaattttgtttaagcaaatgattaatcatacctcttctttccccaactctatgattcatttggagctagaaaagttttcaagagttctttatcaagctaaatttgcttaccaattaaagaagactttaatcatggtttaaggcttggagaataattaaattagtgcaatatttttaggaaaaaaaacatttttcagatttttagaaaaagaaaaaagaaaataaatcattaatttatagtaaaggcataggtattattaattgttagcatacgaaagtgtatagttgattaactaagaatagatgaatatatagtaaggtgtatgagttccatcttaaaattaattgacaatgggaagagtagctcatgctgtaaatatgatttaaatttaagtatttatgccacaaattacttaattaataaatatcaattacaaaaaaaaaaaaaaa

SEQ ID NO: 113569 - DNA, 3026 bp, Cannabis sativa
ggggggggggggggtgttgcgacagagggggctcacgatctgccctctttctcttctcttttacttttcttttatttcttttatttttttagtaataagattgttttataatttatttagtttttataatttttaatttatttatttaaaaaaattaaaaataatgatctaagctaataatatttcaacacgtggtggttctcatttagtaaacggagcagtttaaaaaaggactaacagacttacaaaaaacgtgacgttggggactattaccgctatttctcgaagttggagactaatctgcatcaaagtaaatattttggagacttttaccgcaaattttctttttttttttaattgcttccataaaattaatttaagcatattagctagccatgaaattaatttaaattaattaatatttaatttaaataaattaaatttgtgaattatattaagttttaaaactgaaaaaataaattgatttttataccctatggcatcagttattgtacctatgacgtcggttattataccctatggtgtcagttatttaatattaaatgacgccatagggtacactatggcgtcagttatttaataataattgacgccatagggctcatctatggcgtcgttgtgtttgacccaacagcgtctcctaaatcagtgtcgttagtgaattttgccaaaagcgacgttaaaaggatttaaaattgcctttaaagcctaagattgaagtagtgagcagtagtcacatatatagaatctatagcttctataagtacttagaagtgaaacaatagttttcttagagcttggctaaatgagtttaaatgattgaggcctcattttgataattatattagtttctcgaattatgatttacaagtagctaagtattttaaggataaattgaaggataaaacgataatttagtccctattcaatatagaccatctatagatgatcaatgattatttagattgaaataatagataactaatagcatatctattctttgagaatagagcgttcgacgtaatcaggagtgcaattttgaatctatagtagaatcaagaggaattaataagatagaaaatttacttgataaattttgaatctacttattaggagtttggttacataggcccatggtaccacattgtatgagataatatcatcttgtagactcaactaatttatttaataagtcaattagaattcaaaaatagaccatatcttatttgagaattttcaccaaatttggacaattttgagaagaaaagagaattagtagagatttatttgttacttagtaccctttatgggtataattaatggatatatttaaattatattttaaaatttattttaataattagatgagataagtggtaaaatatgaaaacacactttatgatcattagttaaaataaagtggcaaaaatctaactctaaagcccataatatatgtggccttaatatgagccaaagtccttattttagtcatattcatctaaacctagccctatgtgaatgcgtatataaagaaagaaaagagaattgaaaaaagttaatgtcacttcttcttcttctttctctttattttttgaaattcacaagaaataactctctcaaatttcttccaatggtgtttgagtatgagcccacactattcaaggtgatactcaaacctttatggaagattatgataaatacttatgaaagaggaaaaatccaagttttgttcatgattacagtctgcggcataaaggaaacaagagtgagagaacatataatagaagaagacatttaattttgctgcaatcactataaagttttcttaaacttttatgtgattaagttaaattgttttaagaatctatgtttagtatgttagattagttaacatacttatttagtaaaagtaagatcctagttaaatatactctgtaacacacttaacatgcctaacaaaaaaaactgtaagtgactctctccctcaatcttaactctcactttttttttaattactaagattgttgaatttatgagtattcacttaattataataattttactaataaacgtttaaagtggtagttgttcatatattgaatcgtgtcttctaaattgtaacatgtattaaattattatgttttgtaaactttaatctatgttaagtacatattaataagataaaatgaaattaaatattttttttaatctagtaaccttaattattcaaaataaataaataaataagtaaaaattagaagcaaaagtaaatatgaaagattgaaaattttaatcagctgctaagtaaacatttgcaatattgatattcagttataataatattatttctcttttgtagcaaagaaaaatatattaatctctctttgttattatcgtgatgaatggggaaatattttattaccccagtggggtccgcccagtggtgcagactcagtaattatggataacaatgaaccatgcaaacgattaagaaaaggaaaagagtattgctattgatacgggtataatctagaggtggcaagaatttttgttttatatgattggttatcaatataaaaattattaaaaattttcatacttaattatactaatttagtaattgtaatatgatagtgaacaaaatactttatcaatagagaaatgctcaaaaaaggagaatgagttctctacttatcccttcggggtcaaatatggaattggagcattgggtgaaaccagttatggggaagattaagataactgtcgatggtgcaatctttgcaagagacggaaaatttggagcggctggggtggctcgggattatcagggccggttcgtggaagggttcacagtcttgtgggttggacaagtggattcggctttggctgaattgataggtgttaaggaggccttgagttggataaagcgtaagcaatggggtccggttgaggttgaaactgattctttggttgttgttcaagcaattcaaagtacggttactatt

SEQ ID NO: 113570 - DNA, 3289 bp, Cannabis sativa
  modified_base (35)..(46): a, c, t, g, unknown or other
gcaacgagctgcacagtatgtttgaaaatcacgtnnnnnnnnnnnnttagttagggtgttacaccctccctgtagaaaactttacacaactttcaggaattagggtaacgttttgttggaaggaatgaaaatgtaaacataaaaatgagaataagaataggaataaaatgatattgagtttaaaatgtataaaaaaattaataatttttttttaaatattttattatcttgcattgaaatgatttttctttccaattcaaaatagtatagtcattccactaaaataatggaaaagtcattttattggaatgatattttaatactttaaaatgcaaccaaacaatagaataaaacaaaaacgatttttttctatttcattccatttcattatttctaacccaaattccatattttaaagattgaattgccaaccatacaatctgaatgtatgggaaatgaagctctgcttctaagccatacacgccctttcctctcacagtatgaaagctccaatatgaacttaaattttgaagggaaaatgtcgccaccaccaaatggccttatttaaatgatccacccaccaacattagagaaaaagttgaaattatcaaatccaactataaactgtcacaactaacttacagtacaagaacttaaaatatctcaggcccaaaggcttgcctcaccaaactctcaaatagacactattacaaaaatgtcctatcatggagatcaaatttggatggaaaaactattttttgtcacttagttgtttgacatgatatctagcaccataaaatgggtatttttatgttcaacaatgttgaacatgaaaaaaaacatcatgttcaatattattggacctgataatgggatccacaacaatgctcatttcatgtccaataaagttggatatgaaatgtgataatttatattattatatttcacgtcaggcaaagttggacagacatgaatctttgtttttttaaaaaaataaaataataattaataaatagttcaaagaactaaccatgacaaacaccaactcccgcaagaaaccccaaccctagcaagacaccaccctcagaaacatcaaataaaaaaaatagtagcaaacttaataaaaaatctactaacaatagtagtactatcaaacttaatcaactagaaaatacaaatatcccttacaaaataatcaataacaaaaattagacaaagagaaaaaataaaattagtaacaaaatccctaaacaccctaatcactatacaaaattgaatcctcaaaaacttctaataataatatatatgtgttcgatgaaatgaaagagagaacaggaaacctacacgatcggtgccaccaatggttaacttaaaaaaaattatgagcacaatcttagcaaaagagaatgagatgagagagagagagaagagaaatgagatagtgagattgggggagggactttccattttacgagtaatctctagtaactagttatcggggttgggctaccaggatcggtgctgcattctcgaagttgggcttccacgatcggaaaatggttattgggttgagtggggctttgtcatgagagagaatgagcaggtgagagggggtttcaccggttatggctccaatggaggttgtttagggttaaagagagatgaagataatgaaaagaaatgagagagaaagagagaccatgttcagacattagaggcaatttaattttcttttacgggtttttgactttccaatgaataccccattttattatgtgatatattttatataagataatttatttactaatgttaatgatcattaagaacttgttaacaaagttaaggctagaaatttaaactaaagaactgaatatgataattcataagaatttagaaaaacataagaaaatgaagaaatatttaatggagagtatgaaaattgtattacattgagtgttcttcataccaataattttctaatcacattacaagtgttagagtggtgctatttatatttgagctctattggctctaggttacatgttgtctaaaaggaatcgaacacactctaactatacatccaaggtcaacatgggtaatgaaggtagcgttggtaaggtatcagtttgtactgacacctgcgtatttcgtctccaccactatttgtacaatcactattgttttaggttttttagaggcgcaagctcacccaggtggcatttcggtcgtaccccctttgtaccttgtaccctgtaaattgtacttcaggcctttatgccttggagtataaggaccgcttagttttaatttagaattaggagataattagggtttaattatgatttatctttttatggagatttatttcagggtgtatcatttatgccatatatgaaattttacattttttcatattttgtgcccgacaatattagaacgcgtcatttggccaatagaatcacattttagtattttagttatagcggagtaatttagttagacattaagaatttagggaatgatattcaagttttagttgattaattatgttagaaatgcatttcttttattcattatgtaaggactcggttgaccaatcaagaagtgaatatatatgtaatgaataaataaataataataaaataatatgatatatatgtataaaaaaatttcaaataagatccccctctctctcttccaaccataaccaaagaaaaaccacaaaccccatcaccggcggacgccggcgaccaatctccggccatcgtccggccccacacaccaaacacttcgaaaccccaggtgccggcaacctcacacccaaccggtgctgcttctttcaccgccgttagctcgagatcgtaagtcaaagtttggctgttcaaactttgaacggattttctggccaccttcggtgtccgtttgacgagctgtcttcaccactagactcaactcgtcgagaaaaacaacctacactaagctatttttgttgggttttatgctctaaataaaactctatttcaatgtaatatttattagttaaatatcaataaagaaatagaagtattttcatcacttattgtgtcatttggttcatgttataatttatttgtttattttatttataaattcatccaaatccttatcatatgtatgttcatgtttattgtgtcatcaacacactggaatgtaataaagattgtgagattaaatatatattcctagatttatcagaacacagggtttaagtgatatgacaatctacaacatagtttacttgcacatt

SEQ ID NO: 113571 - DNA, 2182 bp, Cannabis sativa
  modified_base (47)..(67): a, c, t, g, unknown or other
taacaaaaaattaacaacaaacaaaaagaccgtattttatgtaaatnnnnnnnnnnnnnnnnnnnnnatatttaaaattccgtgaaactgtatttttgttgtttttgtgcatttgtaaaactaaccctaattttaaattaaagagttaagcgtgccaatatgtatgtgaagattggagtattttatcacaaaatatgccttaagataaataaaatgaaaagatccaacacctcaatatcaatatctctgttcaaaattttaacaatgttttccaaatggtgattaaaagggaaaattagaagataatttaacaaaaaattcaacttaaaccaattcaaaatttgaatctcactgatcaaaatccaaccctcatttgggagggtttggaatttttttcttaaattcaaaaaatatccaaacctaataaacttgttcaatttcctacctaatgaatgggctctactctctagattaatatgcaaaattaataactttaaataaatttttctgtaactaataaaatttaatgataacatgattatcaacaaaaattcaaaactatgtatgacttgaaatttagtagggaaccaatgatttaagattgttaaaagttagttagtctgttagttggtgagttgtcatgagtggttagtttgttattgtaactagcttcattcatgaacattgtatatattaattctcagctggtttagttcatcattgtatggatcatttcttagatttatctctctgttgtctatctctttctctttttactctctttgatttttgattaatctttgaacttaatctatggctagaaactttaatatggtatcagagttgttcttgctgttaatggtgaatgtagtctccaccactatttattagacagttcactatctttttcaaccataatctttctgttaatctcaacgatcactatttcttgctttaaaaacaacaactgatcaatcagagggaatcgattacttcttttcatttaaggtgctctaccaccaccgaaatttctctacgatgaagattgagcctcaaacacgatgaaccctgcgtatgtggagtgagatgtccaaaattaattgcttgtgtcttggcttctctcttctatgtctgtgagcttgctaacatgcatggttaggtgataagccgatattttgtcttataaatatggacaatttatgtattaatattcttatattgattttttaaattattgattagtgtgattttaatttgttaggttattttgaagactaatcatgtatttggacttatttggagaaattttaacacattttggtaaaaaatagtagaagttcgcgagctcggttttagaagacagaacttaattgcaaattttgaagaccttggtagtagaattggacttggaactaaacatgaaagttttagatctcgttctcaactttttggaacagcttgaatcgtcaaattctgagttgtattgaaaaagctatggccaaaatactaatctgaacatgtgacaaaaaaattcggtagcaagtcatggtcgtggcgagcacttaatcccttcgccagagcaagagcacgattccagattttttcattttttttttattttaaatcagaggatttttaaggagtaattataggacttttagagtttgtttttagcaatttttagactgtatttttgagagacaaactcatagaaagtggagaagaaggagagtacatcatcaattattcatcattttagctcttttcttctccctaatctctttaattttcaattataattatgcttatgattatagttgtgattatggagtagtttttttcttagttaagggttatttcaaacccaaaaaatataaattcttgattgttaataatgaatgttattcttaatttttctcatattaaattgtttctatttttctatttaaatgctatgaatattttgaattcttattaggtgtacaactaattgaggttttgcgttgttctattattaatagtttaggattctaagtatagtgataatttgcaattaataataatgtcaaaagtattattgattgtgataaaaaaatataacctaaattaaatgaattatgtaacgccctaaataattaggcacgctacccaaaatgcttatgaaaccctaatcccctaaccg

SEQ ID NO: 113572 - DNA, 1724 bp, Cannabis sativa
  modified_base (1697)..(1698): a, c, t, g, unknown or other
aaggatgatgatacgtggcacgagtatattagaactgagttaatgaagaacatgtaaactaacaaccgttaaatttgatgatcaaccctccccctaatgtgaataaggtgactatccccagagaggatagataagtattctcacaacgggttaaacaatcactacaccctgagggtgtcgaattagtttggggggtatacatttctagtcctaccccaaaggaaacttactatccaatggtgatggattggtctaaggatgtaccccttaccccctacgctcctatgggccaagtatcgcactatagctacatataagataattgatacaatacatcttcccattatcaaggctacatattgctaagtattaaacacaaaataagaattaaaggatgtgacccaaaccgattaatcatttaagggggtcacatcccaagaggtaccctcaccgtaaccaactcattcaacattcaaatcctacaaaatctcaatagtggttgcaaacccacaaaaatagcaggatattaccataagaatcgaacttcaaccacctttaagaataaatgagatggttgagatattttcgtagcggtcacgtctcctaaagagataagcaatgaccattcccctatataaggggtcacacatgacctgggaagggatccgaaaattcataacttatagagcagaaactctgccaaatttcattcttgcattcaagagcccgttcttgattttacaactccaattaataaaatacaaagggagtaggatattaccggcatctgggtataaccctctttaatttttggtgtactttattagcatttattacgattttagttaatttcttatttattacgactccgtgtcggttggctaaaaattcactcaatattttggtactttcattgagagctttaacaaaaatcttgaagttttttgccaaaaaaatagtgtttaccagaagatcatctcaagaaagactcgatgaagaggtgaacaatgcccatgaagttcaattaccgagaaatcttgtcagctttaatggagaatgacccctgcatcctggtaacggtggtacaactactactcaggccaccactagccatggaacaattgggaaagccatcgcccagactgctgttggtaattggacaactagccaaattgtcactgttggacagaaaatggctgggataccaccaacactgccaccatcagaggaggcgttattgatgaaatgtcaaaaaatttgtcctaactaatgaaagcatgagccaaacccaaaccacttggggtactatcgtctttaggcctaagaggtgttggaaagcttatttaaccaagaccttattttacaattcaagtatgttagattaaactaatctaaaatcctaacatgaatttctaaaaacaaaataaataaacacataaaaacaatatatcacatgtctctaatttttaagtgttttgtcatgtctctcattttgtgagtgtttggtctgttgtgttttgtcctgactgcatagtttgtcttagttcatggcgtcaagtagtatcaacataaaggatgttgaggaacgttggaaagacatccaactcgaagaagaggaggcagaagagaccttttataaagaaaatgaggctgaagaagacctgggcatcgagaccagtgttgggttttatgccctnnataaaactctttacaatctgattagt

SEQ ID NO: 113573 - DNA, 4820 bp, Cannabis sativa
tttttttttttttttgtattttagcgataatttgcaatttctagcgatataacgtaatattagagtatgttaaaggttatggatgacttttaacgatattttgcgacattaagcgactaagtttacgacatgtgccaatttatgcttaccatggacaatttttgtgatgtttgtcgacattgtttgcgacatgtgtcgatagtttagacttagagtattgtgttggtttagtgagggggaattttatcgacattttagcgatatttatcgacatagtttttattaactaatgtttttccttttttttttcgcagattcaactatattttgttgacatgttagcgacatacgtttaattaataagcaactttggtgttctgcagaatttagcgatatctggcgatactgttaacgacgtctgatgacaacatgttgttatggaacatgtcgtcaaacgtcgcaaaacgtatcgttatatgtcgctagttgtcataatgcgtaaaaccataacaacaaatatcgcgagacatcgcacaattcatataaactgataaaaatgaacaaaccatagacgccattggggacgatatcgctaaatatcgttatcattgtcgaaaatgtcgaacttaaaaattggaagaatcactcgtgggtcgtcttgggtgcttctcgtgggtcgtcgtggattgtcatgggttgtcgtggtcgtgggtcgtcttagtcttgggcggtggttcgagctcgcgatgagagagagggtcggggatttgatgcttctcgtggattttgatgttgggaattttggggttaagagagagagagagagagagatgggggaagttagataagagtgggagaagagggtgttctgaattgtaagggtaattttgggtttaagagtgtttggagaatatttagtgtatttgtttataggtggtatattaaaagaatagtctaaatttttaagtatgcttttccaaatttcccttgtgaaattatcccattgttcaatggtatggtgtctccaaaggtggctaaagctattggcatccgtgaggcccttaactggataaaagaacaaccgtggcctgcagttatccttgaaatcgattgcctttccctagttcaagtcttacgtagctccatagttatgcttttcttatttggtcaagttgttaacgattataaggctttaattagtactatgagaaatgtctttatttattttgtcaaaagttcagatgggggctcataattttgctagagcctctattttttaccctaattgctttttcagtttggaatctgttccaactgatttattaacttgtttggtaaccgaaattgattgctaataaagtttgatctttttcttaaaaaaaagtattaacaaacaaaaaatattagttgatttcactaagaattttctttgtaagaaaatgatgtgttaagaaaaaaatggtgtgattttttttttttttttttggcatgagattcacatgtgtagaagaaattgccctattaaaaggcataattgtgttttcataaagaaaaaaaaaaggtggaattgaaaataaaatgatgagcaagttaaaatgtaaaataaaaacaaataaatgagaaaattaaaaacgtgagagaaaaaatgggttgttttgaacatttctccgacttttattttattttatttttatttttatttttttaatatttattttgcgccaaaaaaaaagacgtcaccatgttttcttctctttttttctccacttctcttttacaggacaacttactagggtttcatcaccaatcttcaagttcaggtttttctttttcttattttccctgttcaactattctctcccgattgtttctatgtttattgattttatgaaaaaaaaaagttcagttatttatttatatttttcatttttgggatggaatatgtgagatgttggtagattttagttttgggttaatataagagtagttcaatcttttctggattatccattagattgtatgcataatttggtaataggcagatctgagacctcgtctttgattgctgataatatatgtgaaattagattaattgaatactgagatatctctttgactttcctctgtactgtttttgctgagttttgcattctgggtttcaagttacgtgatgttttggattgaatgatatgatatcttttaaacttttcatcctcttagtcccagattgagtattagatctactgtaagtaagtgtactgtacctttattagcatgaactattatggcccttccatttctgccttctgtttgttacaacaagatttgagtgtttaatcatgggattttgagtttccagttatataataatctaaagttagatttgaatgctttctttattgctcacgggctctggttactcgttttggcacacttcaaaataatagtagtaaacatgtaatcattaaatctaaacatgaaatggttatgtgtagttcaataactaaatttctttgtcactcaatatgtttatatattgaatgagtcagtttacaaaagccatgatgatatttcttctcatttttttttttgtggcaatgctgtctgtacgtgtgagattcattttgttttgaaatttttgtgaaaaagaatgagctttgttgcaggtgaatattcttaaaggggtcacttgttgttatgtgaaataactgagctgtgtaatctcttcaatgaagaggactggagaagattatgcttaagtgataccaacattaataatttgattctaaaaatggaggacgatagtggacttgagcttagtttgggtctatcttttggggggttgtctggcaaacctaaggctaaaagtagcagctccacagatcttagaatcgaaaaaggtgataaaggaaataaattagtggacgattttaaaagttttctacatcctgggacccagaaacaagactcaagtacttcctcccaaagaagcgagccggtgaaacctaaggaaaacttctttagtgacctctccaaggccaatgttgatgcagatgcttcagtggatttgaatggaaaaggagtctgggagagcaataataaatctgctgagttcgaatcagaaaaacgagcagaatctggcagcaaacgtaggatgttttttgaggagatgcaccaacaaaagaagcatgagagggaggctaattatggcgatttaaatgagaagacaagaacatcacgtatctctgttacaacagaagatggctcaacagctgaaaatgaagacgtagcagagtctgaggtagagggttcaacctcaaggttggttttgcagcaggatgatggctcgaaaagattcatgggaaatggtggttcgtctgatgttcaaaaggaggctcgtgggatttctgattcgaaggctgtggaccaaaatggacaaaaaagattcaatggatcattggaaaatggatttaagcttgggaacatgtcatttggtagtcccttcactggacaaccgataaacataatgaacatgcctttctccttacctctgaaggactctaacagcactgctgcgcccaacacttctgctcctatgatgcctggagtgatgcaggtaattactaccgcaaatagtgaaggaccagggactcatcccggaaacttgcctgtaatgtttgggtattcacctgtccaaatgcctatgttggataaagataattcttggggtttggtctctcagtcgcaacagtttcaaccttcctatgctggcagaggcccgccaaattcaggtaatcagaataatggaattgaagaaaaacttctcaagccacgactcattgtagctttgtttcccatctcactattccactgatcttttttcatcgtcatttttgtgtttctaatttttagcattgctttctcttatctttcataaacgaagtcttaaaatggaataatggatgtttaaatggcttttattgatgtagctgcaatgcaagtaatatcacacaattcatctgaggctgcacaacatgaggggaggacttcagaacggcccaagggcgacatcaaacagcataccactgaaggaggctcctcttcacaggcagaagatggaaaaggaagcagcactaacctcaggggaaaagatgctcctgaccgctcttcggcagatggttctactcttgaattttcaactataaagcccgggattcatgcagatgtgaaatttggaggatctggttccctcccaaatctgccatgggtatctaccacagctccaggaccaaatggtaggacgatttctggtgttacttacaaatataacgcaaaccaaattcgtattgtctgtgcctgccatggttcccacatgtcccctgaagagtttgttcggcatgccagtgaggatcccggaaattcagagagtggcactggtttgacaacatttccaaacaacaaccctgcagcctctgctcaaagctgattctgtacaatgcatgtaatgtttaagcaaaactgttgttaatttacaaatagtcgctgttaaagctggctttgtttagtcataagtcttcttctcactcactctttgttccactggacctgctttattgaatctcttttatggtatcagttccctcagttgctgcaaaattagcaaggcttcatgttatatatcttttaccaagatctaatacccaaattaagtcatggtaaaaatagaagacttgaaagttgaaaggctgaaaatgtgttttttttttggtaaataccatttcagatcttgtgttttgttaaatgacaaaatgaatcttgta

SEQ ID NO: 113574 - DNA, 3206 bp, Cannabis sativa
ggatcctcattagagtccttaacatcagttaatgaacaactaactaactagattggggattcaaagaataacaccacacactttaatacaattttcttatggatttggttttattattacctgttgagcattctgaaaactgagttcaacactggggcattggcgatcagttatattagaattgaatggattacaaaggataggaaccaatggaccagattgattgtagtaaatggttggtccagcctgaggtggagcatcaaagtttgatactttggtgatgaacaggttaacgatactgaccaattgaaaggtgacatctttgctttcgtatagtgtttgttgggctgtggcattatcaacgcaggtgagaatatcatccaaagctgaccgggatgttgggtttcttacccattcatccattgcaacacaagtgtctcccactacactgaattcatattatagaacacataagagaataaagaagtcaagttatttggaatacttgattacgttattcattattacattattaatgtaaaacttacttgtgaagaagaagaaataccccacctagaatcaaagttactgttacaaggatccacccaataactaccaatctgtaaagcggaaaacatgagaaggaaagagtaagatgatttttgttttttataagtaaaaaatagcattgtactacttatttactcaacctcctaattaaacatggtgtaaacaattaagggagataaaaatgattatcactcacacatgtaggagacaacgaatacccagaactgaaagcactgtagtaatcacaatcaaattatgagatcaagatcaaacatatacaatatatatatggtcaacattttttattgagtagtacaagcttaccaaaaccaaacaaaacaaacaacagcagcacagctgagaatataataagagccactctcctgtattgcacatcataaaatatacctttaaaattaacatgtaaaaacacaagagtgtattgcaaaaacttgtaaaacatgtaatacattatgtatagatagattttactgacacagaatctagaaaatgttgaatcctatttgcattgtcccctgttccttgttggagaatagtagaagaagcattaatcttgttctcaacactgtcgattctttgtttgatattagcagggagtgagaactgagctattcccacattcttagaagcatttagataagttgacacattctcaagactctccacaactgactctgcttcctctacaacgtactccaatgtctttgttgtctcattgtggaacttcccttgccccaaatacagtacaacacatccaattctgacccaaatttaattattattattggttatagcatgaaaaaagatatatatatgtggcaaatgatagtaacttacattgctgtaatggtaaacactgcgagaaatgtgagggagagtaagtaggtagttcgagaatagtgagaataatgttggtattggcagaagcattggcaaagaccaatgaccaacatgcacaaaccgaagcccacaaaccaaattgcccctattatgaacaaaggagcagcactgaacccaactgactgttaatcatttgttcatgaaaccagttagattaccagccaaacaaacgaacaagaatattggtaatgggactttttaaggtgccaaatagaatggctcgctaaacattgattatgatgacatgataaaattgacgtttgacaatttcatagctgtaggaaaattaacttcaatatattttaaaagacttacagaaaagtagtgcttttcactaatattccatccaccattgtaatagttaaaaccattactagggtcttttctatgtgttctctcggcagccaatatcagaggcgagttctgtgaaattggtttagcatttgttgcctcaagaagatgcttttgagtactccatgaaaccatgccgttattcttctcttctgtcatcattatcattatcaattcttatagttttgaaaagaaaaagaaaacatagaaaaaaatattaataccataatgacttggagttgcccaacccagtgaagagactgctgagaaaataaagagcagaataaagggctgtaacttggtatatagcatcgtggtattagtaatgtacttaatcagctctaacaatattctcttattgcgttttcattagagcattaaaaaaagtttcctgtaatctgtatttttgagaagaagaaggtgcaaattgatgcagggattccattattcttttattacatgtttatagatgtttccaatgttaatcttctatgtccggccttaactactatacctcattttgtccttagcagaatgacttatgaattggtccaatttgaccagcaatcacctgctatgaataatggcttatagtctcctcactcttgtccttagcttgtttgtctcctacaaataaaattggcaatttctacttggaataatgagatgacaactagtctctgtacaatcactagtcactagtgtaaaaagagttagttgtatttaatattagaaagaacattataagaaaaaacttactcctatattaaatgaaaaaaaaaaacctttaaattcctgtaaattctgattaatgatttcactcacaactcacaacttgtggcagtggcaatggttgtcatgctgattaaatttttttatctaaattgtaataattattcaaataaaatttaaaggctattgatactttttttcttttttgaataaaccagtgctcaatttttttcaccacaccaatcagcttaaagcaaagaacacagctaaggagtaacaagctaaccaaattgtgattaaaataaaatttattagcctccgaagaaaatgctaataatttaatttaattagaaaaatgaatgattagtcagagagagaggccaagcaaaggattactgatgaatggtgatgaagaactttaatttataaaaataaaaaaacattgctattaaacacatgttgtttagtattaggattagtcagtaatatttttttaaaaattatttatacaaactacataaaatttagggaaaaaaacaaaaaaatacaaaaaaggaaaaaaaattacaaaaatactttgggccggcccattaaacatttatacagtccacatacaaatatttataaaaata

SEQ ID NO: 113575 - DNA, 5888 bp, Cannabis sativa
  modified_base (79)..(80): a, c, t, g, unknown or other
  modified_base (4257)..(4263): a, c, t, g, unknown or other
  modified_base (5828)..(5852): a, c, t, g, unknown or other
gcgtttatatattacaaccatgttttacctgggacccgaacccaggacctccaagacacacacacccacctatggccanntgagctagcctcaagtggttaatgttctttttcttcttcaacctaagtaataatttcatttcattccctttcaatataataataataatttcattttcatcaaagcaaaaactttttaaacttagtgattaaaatgaaatttccggatactaaagggactaacagttaaaataaaacaaaaacggaccttctctttccctttccatctgcagctcacacatctcaataaactagttttcttcacattcatcaaagatcaaaaagctaaggtcacactgtaacagcaattgcaacttgtaacccaaaaatcatctctattgggttgttcagtaaccctcataacccaaccttcgctttctccttttagcttagtgcacagatctgagcccagatatcattggttttatgagtaatcaaccgtaaagcctgctcttttttgcagctgaattttaatgcatatttacgaatgaacaagggtttttgggtttattcttctcttcctgaagtggaaatgacaaatgggctcttcgtttttctgtgaaaagttatttcctttattcttatgggattgatctctcaagtgggtttccgaaaatttaaagcctaagttgagattaaaagtgaaagttgttttttgttttttttttctttcactcatctttctattgttagaattatacaatcgaaaaagatgatgcagctgctgttcttagttcttttttctgagggtcttgtggcatttcttcttttggtaaagattggccctttaagggagcttgtgattaagagtttggatcagctcaaaatgaaaaggggcactgtattaaccatcgcaggcactatgtttgccattttcatgtcaagcttttttagcattgttaagattcagaacagaggtgcaaaactaggttccatgtcacccatggatcaggttctttggagaacccacttgctcgaggcttcactcatgggtatgtctttgttattccccctttttctttctttcctttttttttttcctctaaggtctatgtaattgtttgtcaaccgatctttggaatttgcttctcttttttgtattctatatgtttctattcattgatttgtttcctataaaatattttcatactcttataattgttcactgaaaagtttgaaatcataggaactttagtaaaattgggaaaccgggacttgcataattttagttgtttattgtttgaattctttggaagatcccaatgcaattagtttggtttttatactggtttgacttgatgaaacaatatatgatgggtatataagacacttaatctgcatggaagcgatgggatgggagtaatagaatcttttaagaacatatatagatatgttgagttttgaatttggacggatcaaaatgaggcaacatgatggccatactcagttctctttctcttttatggatggttcggatgaaagtaggtgtagttgatgttggtcatcttattatatggaaagtagaattacattgtagaagtgaaagagaatgaaggaaaaaagaaaacaagaatttaggtgtgttagagagtcccacattgctaatgtgtggacagataatagaatatataagaggaatggattactcttctcactaccaattggttttgtcttttgagatggaacccattcaccttatcccaaattctaacaaacatcttgaggggatgttttgagatggaaccccattaaacaactgcataaatttatattttatattatatctttatatagtatgtgtatgtataactgaatgcatatacaagaacaagattgttgggatattagtttatgaacggattgatcatatctgtgctttgatgtagaaataatttcagaagaatgtagctgataactccttttaagttgttggaatgcttatttaactctgccttttgaccctcatatatgtattgttgggctctcaaatgaaaaatttaaacccagctcatgatatgatgacttggtctatttgacaacattaataaacaaaaatccacatttcttgcacaaaatgaatgatagtgaagtaaatagttttcacaacattttgacggaagggttttgatgattattggctgagagcttgatagtaatcgtctaaacccttcattcaaaatgatgcagaacttgaaaccggcatggatattgtaggactaggagatttttcttacatagttcaaatgttgtggcattttggtcttgtttcctctcacttgtagttggcccttttcaagcattgttgtgactgataacatcaatcatcattctattagaactgactaatgcagtgtattatattttatgtaagtgtatattttggcaatagttagctaggttgttgtaattatattttctagactatagtttcaacatttgctttttttttttttttccaagttatgaattgtcaatttatcataatctttaaattggtatgttgacctcattggtcatataagatggtgcattgtaagggttattaattatgcagtggctatcataagggcattttaattatatatataaatatataaatatatatattctacttgtctatatctctgaaggctgagcttgatcgtacaggttttaccctatttcttggtttcattattgaccgaatgcatcattatcttcgaaagctcattgggttgaggagtaacgttggagcttcaaaggaagaacttgagaagcttcagaaagaaaagtcacaacttaaagaagaggaggagaaacattccaaggaagtaaagttgctgaaagaagaaatttcaacactaacgaaaagtttgaaaaagctcaagtcagagtctgatgagaaggataaaagagttgaaactgccgaagcacatgttgctgccctccagaaacaagctgcggatctattactcgaatacgatcgactcttagaagacaaccaaaatctccaaaaccaagctctaggatacaagagttaacagaaatttctaaagagaaccttaagtcacgcatcaaggattgttttaggttggctcgggtatttttgtcaaaccatctgctgccaagggtggtcaattgcttgtttgatgttaattttttggtagttctaatgaatgtagaattttgtcagtttgccaatctttgcattgttttaactgattaaattgcatttgcccatttgcatacatgatcctgagagtacttgtgtctaatattgaattagtttctaaaggaggatgctaacgcaactttttcttcagatactgaatgaatgttctcaaatatgtgttattaccatttgaacagttgctcactagctaatatctctgtatttttgtcaggcaaatggtgtaacaaactttgaggatagctcatcaattaaaaatgattagtgtgattgtgctgttaagatattctctttgtaattatctttatttttgtgccttgctggcagagatcacccatcctttttagaatattatttgaaatcattgtacggctatataatgaaaggtctagatctcaatctcattgagttgaggaaaattcaatttcactattagtttagaaactttaacttggtatcagagttattgtgatggctagttagatctcgatgggtaggaatggtaatcaaacaccagaggttacagttgaagttggctcagttgctacaagaggaattagtgcacaaaggactgctcaaaactctgctttgaatgtagttgcacaagaaaacatcaaccaaactcaaaccccaaacattgcagtgtctcaatttgaaagcacactcaaacaaccctttgtcctgaagttagattgaaataacttgatgttgggatttatgccctaaaagcaagtaactgatagataatatattatagaatatataaaatataattataaaataaatgaatacattaattacagaagtataattaataaatatctgaaaatttcttattcatatggagatagtataatcttgtaaagtcgtacaaaaaaattaaaattatacaatatgaataaaacaagttggtggtgtattaaagtaaggaacctttaatatggaattatcaagcatagtttactatactattctctagtgtgtgcgattttgatttgaatcacatatgtgaatagacatgtagtaaannnnnnntgtataatttgattgtacatgactagaccgatatggaataacatctttcattaacatgtcatttaccataaaagtgttattcatatcacagtgatgatctttagtagatcagtctgaatcttgggtatacatgaactcctatttgtgttcattgagtttgtcaactgaaaaaatagcgaactgactcggagtcaaataatcattggttaatcaccaacaaggagtcaggaataataaataaatataaagaacactaggctttatagaggttcgacccccttgtatatgggtaatgacttactccccttttagttgtattgattatgagataaaaccgagcaaatcactaaggaagacaaagtaaattctagctacggctctcaaattatttacgcagaatatctttcagcgatgtgctcttagatgggtgagtatgatttcagttctaggtcccctccccttgtgaattcattaaatatttataggggcaaggttgttacattttgctccgtaaaaggagtgagcaaaaaataaatatccctatgttctagggtgcagttacgatctattgaaactcctttattctcggatagatttgttggatccgagtttggaggattcagtttgagatatttgtggaagcttgttgaagaagaaatcaaggctcacgtagccttgtccggtattcttgaaaatattccttctgacatgcatattggtcacccggtcaggcctctctcaagacttgtcttcttttgtggaatcactctggcaaggggataggcttcacaagccaaacaggttgagaggcctgttgagcaggctgtgaggcttgttgagcaggctgagaggcctgctgagcttgaggaaagggctcaacctacctaaaggcccgtcaaagattgtgatgttatcacagataaccccttagggaggtatagtgaggcaagggagcctctgaatgaagatggactgccatcttgtgctgggactgatcatgctgaggaggaactggcaccctggagcctttgcctccaagaggggagccaaacgctacttgggtgtctccttataatgtcctactgattaggcacgctacagtgactttctaattactgtgctcacctttgctaatttaatgctttcttgcaaaatgtgtcaaatttaaacttttataactatacatatatatatatccaaataaaaaagtcgagatcctgcttttcaaatgaataatcatattcaaaatacatttcacaaaaatgtcgcatagtgactacaaaatgaagctcaaggcgtcccgagaccgaactctctaggtcaaaccatcttgacatgtacaatcatccccaagctctggactcattattactcagccttatctttttctttacctacacatgcaaacaatatctatgagtcgacaaactcagtaaaaaaagtatataacatctaatatattatcgacttgtatttaggcacccatacacttatccacaaggcttaacatatgatcaagaacattcttaacaacactacaagccattgttggaaattattttacnnnnnnnnnnnnnnnnnnnnnnnnnatgttgtttaaacatcctaaataagaactttctaaa

SEQ ID NO: 113576 - DNA, 4100 bp, Cannabis sativa
  modified_base (4059)..(4061): a, c, t, g, unknown or other
ctatattactgtgcagggaaagaagcaagctttacgagtagaatcgcttacagctttggaaaagatgatcagaaatgcactggaagttttaggattgatgccaactagttacaccaacgtatgtatatgaatttgtgatatgagctttctggttttccacatttatggactttcttctatggcaacagattttgcaggaactaggggaaaaagccttgaggcgcgccaaattaacagaagatcaagtgttgcgtaaaatcgaggaaaggaccgaggctaggagccaaaaagagtatgaaaaatcggatgcaatcagaaaagaattagctgctgtaggcattgctcttatggatagcccagatgggacgacaacttggagaccggccgtacctctcgtgcttcaagagcagtagctgtgttcaatctgatttgcgtaagtgtagatttcgtattttgaatttatttcaatttgcggtgaagacataaactgatttgatccaatctgcaatagtatagattggatttattatttatttgtttaatttttcccttttcttgaatttacaaaatttgttagaagttcgagtaattattaagtttgacgtatttgtttatttaaataattacacaataatttttgacagaaaagaaaaagtagttgcatagtattagtaactacatgtaattagagataatttaaggttcttgatttcattcttaaatttttgtaagttgtgagaattgagagtgtaattataaattaaaactataaaatacaattaattttacacaatgttatttagtgcattgtgtaattataatgttaattttttaggcacaattgagagtgtaatcatttttaaataattttacacaatgttaataattaattttaaataattatgctattttatatccaaacatagtttgaaatagtttattattttagtatttatatactttcaattctgtcttatatactattaatcttagataattttttggcataacttctatatattttgccaaacatgatatgtaataagaatttacatttattactatttgacatctaatcacacataatattataaatagggtaaatccattgtctaataattacatataatgtcttccatctaatcccaattatacaatacaactacatataaatgcttcattaatagaaagagtaaccttaattaagatcacttagttttcctcatcttccatgagtagtcttcattgttaaaccaatacctgtaaaaaaaaatgagatatgttaattaatatagtacattaagggaagcttaactataagatgggtattattacttactcattctagtgatggtagtttatgtttttttaggatgtatagagtaataagcttgaattccagttaacaaaagtccagctagtgcagccaaaacacctagggtagtccaaggatttcttaaatgttcttgacacaattgagcattccaagtagcgatttttctttcgtagtgcttttgtatgttgttttttacactcgcataagcatcataagtaaccaaaatgctacctatactgttgaacagttcagctacttgtgcgtcgctaccaagattatttttaagtatgtatgctgatcttaagtctttaacatcttgttcacaatcgatgagtgaatctaacaatctcaaataagaagtcacaacatagtctttgttaaggcacatttcataagcaaccaagttcaacaacttttgttttgttgtctcatccacaatcaagggtggaaggttaagttgaccgaaagtaaataatcgagatgagaaagatattgatcttaagccaatagagtagtcaggttttaactttatgccaacttctttaagatcttgaacattgcgaaaagatcgtttgtaagaagatctagagagaaaaattttagtacccttatcatcatcatctacattaacactactattatctttagaatcgacaaataagagttctgatctgagtaggtcaagaagatgaataggcacgttgttatcttcttgaaagagttgtctttgctgatcaggtaagataggtaaacgatctatgtttcgttgaagccttggcaaacaataaattaacggtgccataatgttcatagaacaaaaataatagatgctttttgcaaattcaatccctttttcgctcaatctcattaataccacaagtactttgaagggaatttggttttctaccaaaaataaatcatgacaaatctcatttgcttgaatattactaatctcatcagactcttttatgtcattattaacataactatctataaattgaagtattgcacacccatctacaaacaacatcctaattagtttgtcttcattattattcttaattaccttttccttgaagagcttctttagttcaacactagtgaaatttttcttgaactttaagagaagaatctccccaccttcaccactatttcgaataaatcttgctgccaatctatgcttgagttctttttgcgtcaacttatcgcgattaacataaaaaggaccaattgcaatcactttcggcatgatggaataatctttaaatatctctttttttaggatactttctagaaccttttgtatttttatttgtgatcgctcgtcgtgatcattttcaacttctctctttttggtcttttcagctttttttatttcattaatcaaatttctatcagcattggaagagctagagctgtatttcaatagaaaaaattttaaattagaaacttcttttgaaaataatttttttaatgaaaaatatatgttttagtgctaataattatgaatattaataattcatgattcaagtgcgtattaagaatataaaaaaaaaaataaccaaatcgagttaacttgatcggattagagatcggtaagtaacccttttttcaaaattagaaactcagaaacaaaatgaaaaaaaaactagggcttccctagctagacctaacaatcaatacctcggttttgttagagttgaagtttgtgtctcttgttgctcaccaatcgaaattcgcacatcttcctccttactagtactcccatccatgttctctatgatataaataattttcttagtttagatgagtttatatctatatatttatatagatatagttgtttcatagaattatgaagatgatcacaagataagattgaacaagaataggaagaattaaacatatggacattgacaattgagacacagtggagaattaatagagtgaaaaagaatataaaaaagaaagaaaactctataatatatattcttcgtattgattcattttggaccacggtttactttgttgtaacatataatatagggtaaatatgtgtttttgtaaaagtagttaattaaactctctctttttaaaatgataaaatagattgtattttttaaaattgtacagataggatcttaaattaaatttttgtcaaaataaaacttaatattgatctgatctaaagatgttatgataaaactggttacattttctgtatctgttcctgtttgtgtttgaaattatcttaaagttggttagattaaaaaataaaaattactgaaaattgagctcaaggtcctatttttaccattttagaaattatagagtctattttgtcatttaataaaataaagagtccaattagtaaattttacaaatacaaggtccaaaataatatttaccattataataaatagaaaaatttctagatatatatacacaagaattttacaatagggaatttaaaaaagacttgaattttttcttggtctttaatcagctacattagaatttgagtaatttacgatataaatacttaagtttaacttccagttgcaaataaatacttaagtttaatttttgacagtaataatacctaagttatataattttggaacttttataggtacctgacagttaagtgttaagtaaattaccatgcgtcaattattgattggtccaagtcattaaatttttaaaaaattaatttaaatatnnnaataagaaaataacacgtggataatgacttaatatttaa

SEQ ID NO: 113577 - DNA, 2694 bp, Cannabis sativa
ctctctctctctctatacaagacctagaaccagacccctcctccccctctccttctgtcctcgaccctctctgtttgatcggcgttgcgaccgaatcggccgtcgaaggcctagcccaccccctctctgttccattctggtatatatatatttatataatatattaatttctaattttaggaaaaagtctcagttctcaggcctttagaattttgtaaacaaactttgtattgtttatgtttgtaattttgtagtagagttgagtaatcataattgtgttctataattatgcttcggattgatttgaaggttacacccaaatcttcgttctttatttttctttgacagtaagtcatccatttctttgattttctttctatttttatatagattttttgctcaaaatgttgtatatatatgtgtgtttatgtatttatttttttcttgtttgaaatcttgatgtttgtaaataatgattttgagattttggaaagtttagatttgtgattgtattttttcagctcgtcattattaacttattatcaatcaatatatctatttggtattttttttctttctgtacaagggtgttagtgtaagatcgtttggtaggtgttgggatcttgagggtaggggacgatatagttgtatccactatattgtttttgtttgaattgagcttttgatgaccatatttcattacttttttctttcattttcccccaagtttcattttcgattgtattgtttagttgtcaaatactatatagacaaatgtaattaaaatttaatggtactttaatttatttgttgtagactttatctgtttatgatttttccttttaacacttgggaagtagttgtgtttttgctctcatttgttgagaaaataataccaatgtctcttccaatactctttttttttttttaagtttataaaatctgcataatgtcatagcagattaaaggagccattccatgagaagaaatggtaatatatgagaagaaatgatccatatagagaaacttattctttgttgttcaatttttactttctaataatatttttatacttaggactattttcattggcaattatatacaaattttatttagataccagacgaaatgttggttgctttatacatggagttatttttttgaacttgtttgtctcttttcagttttacttttagaagtgttaataaaatatttaaatgctctaaatataaactatataagtttgaatttttgcttcttcccattttgattatatgattgccttgatcaaattctaattatatctattattctcttcacaatagattttgatataacttttctgatttgattttgcttcttcccattttttgcttcttgtgtattttgatataacttttctgattatgatttcgcttgaagcttaatacactcacccactcacttcactgggtaattttagttattatgctaaaattatatattagaactagttaatttgctatattgattggttgccaaactttgtattttgtacatgttcctttgcaatctatggactgttggttagtttccttcataagataaatattgtaatctagttttgttcccttctcttccaagcaagggtaattgagaatcttgtttgaaaatgcagtgtcatcatggaatacggtcattataggtttccaagtggctgcagacacaggtagtagaatccttataaattttgagtgctatcttaatagttcagttgttatttacaagcctaaatttcttaattgggatcctaaactaaacttatatttaattagacttaattgaagattttgtcctctaatctattgctcaatactcagggttttaggagattattcaatgtgtcagcaggaattcatgcatatgctctcaaagctgattaaacaattcctacctattgatttgttgaagtggttgatgaaacttgtaaaatttggaatttatattttgcttgttctttattttcttgtgaaatgactaaaacttgtgtttgtgcatattctatgtgtaatgccatgtatggatcaattaatggtttatggaccatatattgatgtttatttaggtatctctaataggtttttggatgtaacttttaagtggacaataaattttggaatatgcatttttgttcttttatattttcatgtaaaatgattatataattaatggtataggttctatagtttggtaattttagaattgataaagcccattttttatattttttttcaaaaatacattttttagtgtcagttataaaacgacactaaaacccaatggtgtcggttttaaactgacactaaaagaaaaaacatatatgtgtattttaagtgtcgattgtaaaacgacaccaaaagtcaatagtgtcggttttgaaccgacaccaaaaattggactttttgtcgctgtggaataggtgtcggttctatgaactgacactaaaagtataagtgtcagtttaaaaccgacaccaaaagtgtagtttgtagtagtgggtgttcttcttcgggcatccatgacctagaagtccacacatacactctggaagagttatagaaaatatatgatcatagataatatacggtgatgttttgaaagtaataataataatcttatgagatatattatcaccaaaagaattatggatcatat

SEQ ID NO: 113578 - DNA, 6192 bp, Cannabis sativa
  modified_base (27)..(29): a, c, t, g, unknown or other
actaatcagattgtaaagagttttatnnngggcataaaacccaacagtacttctccttagggtgcaccagtttagtttttcaagaagaaggaaggatcactgcaaatgtgcatcgattaccgagagttaaacaaattgacgataaataataagtattatttatcaaggatagatgatctgtttgatcaacttcagggaaagaccatcttttctaagattgatcttcaatctggttatcactagctgaggattcaggaagagaatattcctaagactgcgatcatactcgatatgggcactatgagtttctagtgatgtcctttagtttgactaatgcactagtaacatttatggatttgatgaactcagtgttcaaggactttcttgaaaactttgtgattgtattcattgatgatatctagatttattttgagttggaggaagcacatgaacaacacctctgtactgtgttacaacgtctctaagaacaggagcttaatgctaagtttaagaaatatgaattttgattgtcaaagtatgtttcttaggacacgtggtaagtaaagatggaattctggttgatccagcaaaaattgaagttgttcgagattggccactacctaaaatagcaattgagatcaaaagtttcttagggttggctgggtactacagaagaattgtagaattttttgtcaagatctctactcctttgaccgagttgacctaaaagaattgtaagtttgtgtgggatgacaagtgtgaagacaacttttaggagttaaaagcaagattaattactgcaccagtgttgagtttgccaaccaatggtgagaaatttatgatatactgtgatgcctcaagattgggtttgggttgtgtgttaatgtaatctgggaaggttattgcatatgcctatagatagttgaaggattatgactagcgctatcctacatactcatgaaatagaattggcaacaatggtttttgctttaaaagtttggtgtcactacctgtattgtgagaagtacgagatttataataatcataagagtttaaaatacttcttccctcagaaggacttgaacatgagacagtcggtggttagagttagtcaaagattatgactgtgaaattctttaccatcttgacaaagcaaatgtagtggcagatgcgcttagttggagaggtctagggcaagtgtatgacttcaagcagttctctttgaagttagcagaagacatgaccaaagtgggaattgagttcatggtaggaaatttggccaatattacgttacaatatgatttgttggaaaggatgaagattggccaacaaagtgatccagaattaaatgagcacagaaagaaatttgaggtaggtactacaaagaatttctcagtgacaccaagtggattattcagatataaagatagagtttatgttccaatagatgataagattaggagaaaaattcttgatgaatttcactctaccccatattcactacactctgggacaatgaagatgtatcataatgttaaagcactatactagtggttgggaatgaaaagtaacatagctgagtatgtttcgaaatgtttgacttgtcaacaaataaaagctgaacattagaggccaacaggtttacttcagccagtgagagtaccctgaatggaagtgggaagacatatggactttgtggtaggtttacgtaacactatagggttatatgattctatatgggtaatagtggatagatttaccaagtcagctcactctctgcctatgcatacaacctatactgtggatcaatacgtttatttgtacatcaatgaaatagttcgaatccatggttccttgaagccaatcgttttagatcatgattccaaatttacttctaagtttgggagagtttacaaaaagccatgggagccaagttgaaattaagtacagcctttcatcctcaaatggatgcttagtctgagagaattattcagatacttaatgacattctgcaagcatgtgcgatagattttgaaggtttttggaataactttctacctttgattgagttctcgtacaataaaagttatcatagtaccatttgcatggcagcttataagatgttgtatggaagaaaatgtcgatcacctattcattaggatgaaggtggtgagggaagatatcttaggcctgaagcggttcaaaggactattgaagccattgaaaagatttgatctcgtatgcttgcttcataaagcagacaaaaaagctaccctgatccaaagcttagagatattgagttccaggtgaaagattctacatttttctgagtattgcctataaaaaggttaggtagatttgggaagaaagggaagctaagccctagatttattggtccttttgagatactggagcgggtaggccaggtagcctatcaggtagctttacctcttgcgttgtccagagtgtatgatgtgtttcatattttgagctatgacgatattgagcttcagacagacttatcatatgaggaaaaacttttccaggttttggaccacaaagaaaaagaactttggaataagacaatcacactagttgatgtgttgtggagaaacatcaaggttgaggaagcgacttgggagttagagttgcagatgtggaagcagtatcctgagttattcaagtaaattttgggatcaaaatttctataaggagagaatatgtgtaatatcttgaaaatgtaattatgaataattaggacttattatataaatatggagtaattaaagtacaatgagtaggattatgattctactaatctaattcactgtgaattaagaaatttttgccaaagtatataaataagtgtaatttattaattatggagattttattagaatggtatgatgtatgttattcaaggaataataatattttcaagttcgacaaccttggggactctatcggaggccaaaaatattacaacaattttagagtgtgattttaatggaattattatgataagttgattttagaatatcgggattcagcgggtaacaatattggactattttacctctatggttataaggttatttagcggggaagtaagggcatattagtctttttatcctttgattagtcaccttatttttgagtggagagtggttgtggctcaacaaatttgtggtgaccaaaagcttggaaatatttaagatagaaatcaaaagaaaagaaattcaaagtgaaaagaaaagtcaaaacgcacctttcttcctcatcctttctctccatttttgaaccctccaaaacaagaacaaaccaacaagatttccaccatttttgaagcttatttcagccaaggatagctagaagaaatatctcttccatcctcccaagaaatctaaggtaaaccctaacccgaattcattggttttctagggttttagttggttttaagtggattttttctgtaggaattgttgagggagtctatgaaggttaggaaaggcctcctagtgttatttagggctgattggaattggtttgacactcaaacttggctcatgcttgataacttgatttttattgggaattcttccaaggtttgttcatgaaaaatgctccttatgatgtgtataggtgctctacgaaatttggtaaggtttggctcaagattgagtcacatataaactttttaagataggacatgggaatttcgaactgtcctatttctaaaataggtcgacagttttaagaatggaccatccattttgagacttgtcccgggaccctaatttttattttctcaatatttagagtattttcatgctatctatcgatagggaaactttcagttatcaatttaagacctagaacgagttaggtcaagttgattaattagttctttttcattgttgttgcataggattcgggatcattgatcttttttaggtcgactaacatacttgaattggaaatagaggtaagaaagtacatttgtacatcatagcatgccaagatatgattattatcatttatgagttaattataattgaggtaaaaatacagtgattaccatcaagtaagagaaaatcatgacttcaatcaaaaccattgttaggtctcatacttgtcaattgttttattagacaatgacaaaagtatgtggatgccaggatatggcatcagggttgtcttattagacaacaagagatgtgtggatgtcgggttatagcataaggattatcttactagacaataataaaaatggttactttctgaagtatcgattatgacttgtcttattagacaagtacttgtatattataatttaattacagtagtctaaattggtcatctgattgatatgtgtttatgtttacttttctttatgagtttttgtgactcacgggtgctttgtggtgaaggtaagggcaaattaaaattagggtagccatgagatgatattctttggtaaatgtacatatagacttatctaggttgtatggtcgagttgtcaggagatgtttgtgagtcacctaatgtgtattttgacttacttttctatatatcctttttgtaaaacttttgtatcagggaatcctcgaaacaaatttttggcgatgtaattttgttcattgcttagttttattttagtgaagtgtttactattatcacagattttattaaattattaatctactattacaaatatattccaaaagcacacacgtggtgtccctaggagttagggcgctacacaatcttgtgtatgtaggtcagagtagtggttgcatggtgttgttggtcaggtgtaccaggtgctgtggagtggtggtaatgccactactcacccaggccttgtctccatgtgtgatctgacattgtggtccatgcttggttgccctggacttcgaaccttcgttccaccactcttatgttcgaccccttgtcttacatactctcttaccatggccaaagtttttaagttatacttataatagttgaaccgtttgagtattgtaaagacaaatggggcaatgaggatctctgaatgattgtgctcttgagaaatcaatgacgaatcaactccatgggggtcctcagatggaccctttctcataggtcatgtggggacccctcttcgcagctcgtggggtctttacaagggaccctttctcggatgtccagagatcttcgttcaatcatccttatgtaagcgggacatctaagctcgcatatttccttgtcatggactaagcaaattatgtttgtggtagtcgagtcatttgagcatcatcgagacttgggagacaatggaaaaactccaaattcccaaacaattgagataccaacaaagggtcgtaattggtgtgtccccaacacaaagaatcagcaccagaggtgtaatgaccacatactttaaacatgagaattagaaaataattacgaatttagttattattttatgattatatgctttttagtagaaaatatgacctattgttagaaacaggtattagagaaataatttctcattttattaaatctaggtgtactatatatgttatttatgaattttttatgatttttatattttatgcacagtaatagtggaatgtcataatttggccattagagtcacttagatacaccggagtatcttaaaattagtgggacaagttatttagacatctaaaatattagaattattcaggattataatttttattattttacccctaaattatgaaattacttcttggtgaagttaaagaacattatggtcttttaattttaagctggatcttatccttttaatgagtttttttctagaataatggttaagttagtaagttgcatataattaaaataaaacaagaattgttggtattatcttaaagtgagaatagtcaaacaaaattatctctctctttccctttctctctctttggttcggccattacaaggaagcaccaagaaactcaaccattttctctgtaaattcagactaaaattgttagagagtcccacattgctaatgtgtggaaagataatagaatatataagagtaatgggctactcctcccatagccaatttattttgagatggaaccgcattcatcttatccccaaattctaacatggtattagagcaaaaactaacaaaaaaaaaatctctagcgacta

SEQ ID NO: 113579 - DNA, 2563 bp, Cannabis sativa
tcttaaaccaaacacaggattactttaagcataattcaatcttatccagtccagtctaatccttttcagtcaaatccagtccaatactgcgcaccaaacaggccctaaaagaatcattaaaattctttcttaaaatttattttatatgtataattattttcaataatttttttaactttttttttatcaagaaaaaaaaaatcattaactaaccaaactaattacaatgaaacaaaacaacaaaggctaaaaaaaactctgaaatagaacaactcttaaccctcaatgtgagatttgagaaattagttgttgtttataggatttcatctgaagtcttctagtgagatactccatgataatcacaaagaacaagggagaagtatgatctccctgcctcagccccttctcccctttgaagttaccttgaaacctaccattcatcatgagagtgtaagaagtacattttaaacaaatcataacctaacaaataaacctagtagggaaacataaaccacttaataggtcctctaagaaacaccactccactgtatcgttgaccttgttgaggtctatcttaataacacatctaggagaagcatttttcctactataattctttacgaggtcttgaaaaattaaaatattatgagctatagatctattcttaacaaaggctctttgattttggttcaccaggaacggaagaacaacaaagagccttacacaaagcaactttgagatacatttataaattgtagaacaacagccaacgggacgatagtcaatagccttagtagaagaatctacctaggggatcaaaaaaataataacttcattgaattcgattggaatatttcctgtttccaagaaatgaagaatagacttgctaacctccatccctatttcagaccacatttcctaaaacaattcagagccgaaccctttaggacctggacttttagtactaggaatactaaaaaggtcagatctaatttctttgtgcgtaacatcttgatcaagagcagttgttgttcaagagaaagcttggttctgaaatctaagcaagtcagattaagtttagcagtaatgtactcttactacccataaaactttgaaagtgagaaacaaagtatccaccacctcagaatacttgtcaataacttgcccctgctcattcataaagctagcaattctgttctgttatcttctcttcctgatactagcaaagtaataagcatatttttcatcacctttattcaaccaagtgatcttgcttctttgagtaagaaatcgctaaaacattctcgcttgagtactaaaatttgtagcatcacaacctctactttttgaaagacaaatcccatagcctgagcctgaagtttagtaacttgataattgtcttttttcttgttggtaattaatctccacatcatctatcacatgtttattgaaaggcttaagaagatgttcaaccttattgttttaaggaagattgtttttgaacatgtacctccaattggtttcacccaactagccaacacaacctttttgaagtcttcgtggtttgtctagaaattaaaaaacctaaaaggtttaatcccaatattttgtatgacaaaagaggtaataatacaataacagtgatcgaaaatagtttcccattgaagagaagcagtagaagtagggaacatatccaaccaagccttatttttaaaggcatgatcaattcgagaatatattctatcagatccatcttgattattggtccaagtataatgagagtcagttttgttcagagaatctaccagcccaagctaagccaattattagaatcatccaactcactccttgaaactgagttacctccaactctatcctcatagtgaaaaatagcattgaagtcacacaagattacccaaggtttgataaagaacttgagcttagttaaatcaacccaaagagatttcctctcaaccagaaaattcaatccatagacaaaagtaacgcaataagcttcattgtgagcagccattttaacataacaatgcacatattgatcagactcagccaaagcaatcactttcacaaagcttttcctccaaataagaataattcagtaatgtcctaatgattagacaggctacagtgactttttaattgcagtgcacacctttactaatcaaagggttttaacaaaattcatgataaatttaaacttttgattagctttaaacttttataactataaatatataattgtacaaaaaggtcaggatcccacttttaaacttgtttacatgatcaaaataaactttacaattttgtcacacaatgactacaaaataagcctaagtcgtcccgagaccgaactctctaggtcgtattatcttgacatgtacaatcaccccaagatttggactcacttctgctcagctttagcctttccttatctgtacatgcaaacattaactgtgagtcgacagactcagtaagaaaagtatataatatacaatatatcatcgacttgtatctaggtgctcatacacctaatcacaaggcttaa

SEQ ID NO: 113580 - DNA, 1023 bp, Cannabis sativa
ttcactactcttctcacaatacttttagtttaaaagcataaaaataactctataccatagagttatcattaaggtaccaaataataatgctcatttacaaatgcaattcacacaaaaatataaaagtcattaattggaaactgaacatgaactaatatcattattagtggaacaattatatacaaaatgtcttttattgttgaatcttttgtagatatgtttattgtgaattagaaatctgtaaaaaaaatatttttctccactttgtaataataataataataataataataggagttatttttctacaagtagaattctataacaagaaaaagtaaaatcacataaaaacttaaatatgatccttttgtttataattttaatatgaaatacactcctccctaaataattaatctcaataaattaataaccatctatttaaaaagaggatttatacttatttgtgatgctgcaagttcggcgtatctctcctaaatatgtatctctcctagatacaaaagacataaacacataggtagagtcaaacacacttacacaataaaaataatctttttctaatgatatgaatttaattcaaagtaaataaaagagatactaaatctaactgttaatatgagtatttataagcattatatacccatattatacaatacatacacgatttaaacatgagtacaactcccaaaaaactttcctaaaatatatattcaatcagtctaaaaatttttgattatgtaagtggcagacccaggatataattttagggtgggctaactaaaatttttattaaaatataatttttttttttttaaaatacatattacattttttatttatattttggataaagttattatatagattggaacaaattttagcatctaaataataatatgagattttaaaatttttgttttagtttattttttatgtggaatctggtgttaattatagattaaatattattgaacataatttattaatataacaagttttttctaa

SEQ ID NO: 113581 - DNA, 3587 bp, Cannabis sativa
  modified_base (3504)..(3533): a, c, t, g, unknown or other
aactaaaagtttccctatcgataaatattatgaaaataccctaaatattgaggaaatacaaaaactaaggctcccaaaattactaaaatcggtaaaccaaactttcaaaatggtaaatcgttttctagcgttgctggccttcttggttgtgtttttattgttgttcttattgttgttggtggtggtggtggtggtgttgcttgccttcttgctagtgtcgttattgttgtccttgttgaagtttttgtagctagtcttgttgttgttgttgttagtttggtgttgataatggtgaattgggcaccgttggagtggtggatccctcgagatcaccatccccaccgggaaaaatttgcctaattggattggacttaggctttttgggatccctaccggacggttgggggggagtcttgcgctttgaggtcccaaaaatacctttcttgggaaatacgagcccatctaaactatcttctaaagcattggtgttctctggttcttctcgagcggatccctccacgatcggagtatccactagggcatgttatttgggatggcttccctagttcacgccattcccgaatgcgaccaagtctttggaagcccctcccatcgcgacaagagttttatcgagcgccgcgaaagcagtacgggtggggtctgcaatggttgccttcccatgaggagggatctcccaaacatccaaagaagaagagatagagggaggcttcggcttacaggactgggaagccctagtcttgccctttccttttcccttagttccccccaccttggccaaggatttagccaatttgtcattcaaagccttcaacattttcatcttgggagtatctataaaaacaacaagcacatgattagaaaaccgactcccaaacagcaaaaccaaaggcataagcaagattcaaacgatatattcctaaaagagtgtgcatgtgggtgcaaccattcagtgagcaactataaagctccccacaggtaaagagattcatgtcctcctaaccaacgaagttgccataatctctgaagaatggaaggacatggttgcaaaaggatccactataatgttgtcttgaggcaaccctggattactaggactcctaacaattttgtctactctatctatgaactcgctcagtggatatttagcaagatttaaattcaaaaagtaattgtcgaatcccccttgattcatctgagagaaatgatggaggttggggtacaaagaacaccgaagggcctattacctcttctggaagtgttagctcccaaagcgcctttatctgggaaggtcgaaccatacctctcctagatctccctagcttcgatcaaaagatttgggtgacagagcatccaactagctttcaggagttgatcatctttagcagcttttgtgataagtttggcaaagtcatgagacaattcctccttaatatccttaggagcttgactatggcccatgttgctaacattgtcaatgctttggaaagtcgcgatgagtctgtgctcccaaagtaatggtgttgtaactagatcttcgactttcagttggtcctcagtgaaagccttatattgagctgcttttttgatcaatttctcagtctcagcactctgaggaacaagatatgtcaaaagaaacaaaagagtatggaaattgactcaacacttgaaccaaagcagaagataagggagaaaataaatcaagacactaagtgcaaaaaatatttacctatgagttggaaactgagttagagagtaggtaacctcctcaccaagaagtcggtggagaaaaaccaatactccctgaggtcatgggagcctttggtaaaactggtgggacagtaagcatcaggatacttctcaagcttataaaaccccaacttcttgcaaattagtcctcatcgggtgagacttcagtgcgtagaaatacaaaatctctttcaggaagggcacctcgaacttgttcactttgcaaaaaatataccatcaagcaagaagcttgtaagatggaagtattagttggaaaggagctatcccaacgcatgcggtgaactctgcaaaataagttcttagtgggaggtgtacactactttgaatatgggaccagctccaggcactgaattcccccatgctcagggacgcagattcctctagggtggccctcctgtgccacatcaatctcagaattttgagtagtccagctccaatagcgtacgactcaagcctcccatacgaacggaagaaattctatttctgatccatctccgagatggaatcatttacctcctgggcaccaggcgaagccctagctttcatttttctcttagattttttgagggtactagatggagcctcctccagaatggtttccgaaaactctcctagagtaaccttcgaaatgacctccgggatggtagccagttgaatttcccctgcaggaactccctcctaagttccctcagtgatggttcctccggcgaggatgatggaagagttgtcttcgatctccactgcatcaagatgtgactcttcattcaaatccatcactggcgaaagaaagaaaagcaccaagcaattaaatatccactatccaaataacaaaatgggtattgaagaaagtctccctaaaaattgcttggagaggtccctgaagtctccctaaaaattgcttggagaggtccctgccggacccgtcgcttttaggaacaagtttttcacaagtaactcaaaacgaccggtcaggaactctagagaaacaaccaaaaacagcatcgatacaatcgatcccaaaaaacaaaggccattgcagagtcctaaaaactcctcacatgcataaaagaataaactttttcgggagtacattcaagaatccataaattactgttcaactctaatcctaaaatcctatcggcatgcaaaacttataggttattggtgattataccctaactgactacacgacaaggacactcatggcgcaagaaatttgcacacaacccaaccctggaaacatgtttctacaagcaacatctgatcattcaaacacacagtatgttctagacctagcttgaacttagcacttatatcctagatatgaaataatgtaaagtcaacatagcgtcagggaacttacttgatgtttggatggggaatggaaggttgtcgtgcaaatctgcccaaaagcgttgaacccagtcgatcaagtggtcatagccggcccaaatatcgaaattcttgtctagttgggggtggagcaagtctgaatttatgggttcggcttttggaaaataaaataaatggaagttaaggaaatactagatgagacactcaaaagcctcttgcattcactattaatggcgatggtgaaacaagagtctttggaaattaaaggctttggttcgaaaaattgtaagaaggcttaaaaatattgaaggtgatagaaaagggggaaatggattcttggaacctattgttgggttttatgcnnnnnnnnnnnnnnnnnnnnnnnnnnnnnnatttacttattaatatagatcaagatcggaagagcgtcgtgtagggaaagagtg

SEQ ID NO: 113582 - DNA, 2175 bp, Cannabis sativa
  modified_base (37)..(63): a, c, t, g, unknown or other
  modified_base (700)..(700): a, c, t, g, unknown or other
  modified_base (2124)..(2133): a, c, t, g, unknown or other
gttaaaccaagaaatgccgttagatagacacttttannnnnnnnnnnnnnnnnnnnnnnnnnntatatatatatatataattagagattatcaagaaaacgaaaacatgtgtataggccactttaatagcccaattggactggactgattattttcttaggcttgtctctatctcactttaaaagtccactacaagtgtacaaaggctcaaaccaaattgattgattcttgggattttcatcaaaagtttacaattttactatcatatcgaattttttgtaaaaatatcatctttttataaaataactacaaaacaataagaaaaaaataataattaaaacaacagtggaacaactgaaaaataaccgtaaaatattgtatttttaaaaaaaattccaccccacaataaaaaaattaaaaaattaaaaatttcagtatgtggtataaaaatcccttgattctttcataccttttgttgccacattccggtattgttattgtgagtattttgtgcatataaatataggataattacataagttaaaattttttataaaaaaattacatttttacgtctaaagaatttcttttttacatttttatagtttttcatagaaacaacacgaaaacaacaagaaaattacataaaagtaatatgaaaataacataaaaaaaagcatacaaataacaaaaaattaanaagagtacaacataaaaagactattttttgtaaataaaatcaaaaaatagtaaaaatatttaaaattctgtgaactcgaattttagtgtttttttttattgtttttgtgtatttgtgaaataatccctataaatatggggttttgacaccacacactaaaattttcaatttttttacttttattgtggggcaggatttttttaaaaaatattgtgtaaattttatactgtgtattgtgttaagttttcactgttgttctacgcgactgttttttatttgttcctctgttgttttaattattttgttttgttgttttacgattattttataaaaagacagtattttttttaaaaaaattcgtgtgacagcaaaattataaacttttgtccaaaatccagtattttttgtaaaaatccatataaatatatatacatgggctttaaaaaaattgtaaaatagaagaaagtttacaaaaatattgtgatacggagtttttttacatttttactgcaccaactttacaaaaatattgtgttttaataaaattaaaagaataactaaaaacaaccctaaaataacttaacaaacaacatgaaaataactataaaacaacaaaaatataactataaaacattaaaaaaataacaaaatattgacctaattaattgcaataagcaaaatatatcaactccccaatatatttttttgggattagttgcagcataatcctcaatatttttattttagttgcaattaaccttcaaaactcaaattttgatggcaaaatatccaaaacaagcaccattaaaaaaatgtattaaagttcttttattttaaaaatattaacatacatttttaatggtactaataataataaataaaatgtatatttttgtgttttttctaaaaatatatattaaatattattttatcaagttaacttatgttctaaaaatttatttattatataaaaataaaataattaaaattaatattgtatcaaaatttaattaatacttataaaaagaaaatatctcctttcaaattttataagtctgagtagagaatacatattacatcatcagacctagctagatatagatatatgtatatatttgtatattttggttttatatataaacatgcactggatctggacctataaagagacatatttgaatgttgaatcgtcttgttctaaagaaacaaaacatcaatttggtttcacatacaagaatgagtgatgactgatactctatactctatactctatactatatactacaaaatacaaaatacaaaaatcatgctaagcatgataataatatgtagctatatacatatatcaatatcatttgtatcaatcaataataaataggaataggaatagttacataagacactattttttgtaaaatatttannnnnnnnnnttcaaagaatgttttttttacatttttacgatttttcaaaaa

SEQ ID NO: 113583 - DNA, 2433 bp, Cannabis sativa
tccactccagactagactatgtacataaataatctactgtcaaccatctgaattctcatctactagcttagcttcttaactaactggtaatttagaaagaagttaggttgacttgatgttgctgctatgggaatgaaaacatatccacatcttctaatccgtacaaatcagcaagttcagacgatgctgctgctgctgctgcttcaatgtcctcatcaccacgttcggcctgcaggaaacattcatacaaaggggaccccattggggtaataatggaataagtttgtaaaatccaagattcctgtaaacagttacaatctactgataaaatgtgactcattaccttaacctggcaatacttctcaaacacgcgaatatattgttgacgtgcctctgaggacttcaccattgacattacacgtgagaaagcctctttaattgttccatcaactttctgcttgcggaacaccttaagaatgtcttcactttcatcaattgggtctatctcaggccggtaaccacgcaaaccagatccttttcgtcgccaccttagtacaaccttttctagaactcccacagcccagcagattactttgtaacttttcctaatttgataacctctaacatgagcctgcagaaaataagataatttgatgagttaacagactacttagaacgatagttaacactttatttccccctttttccatgaactacactcataaattgcaattcattttaataaataaataaatgaggttttgttctttgctcaaaacagtctagagttcaaaggaatgcaaggtttacaaactcgttggacagaagatcctcatttaaaaacatcttgcaaacaatactttttagccaatattacaaaaatgaaagtgaggtacctgtatcttgacaactttctggcgtagtgctaggaaatctttgcgccctttccacccacgatactttttctgaatagataatgcagctgaattgtaatcacgtgggttgcggaacttcatctttgacattgctgaaatatcgttcaaactgaaaccatactcatcttcatttatattagaatcaatggcttctttctgttgtttcctgaaggaatgtgccctgaaagcagactgtatgcgtgcagcagcctgtgctgcattccggacagcagccaaagtaggttcaagggaaagctgatcctcatgggcgataaggccatgctttgatatactatttatagtgttttcagcttcaatctcagcagaacctttataaagctcactttcttccagagtaagggatgacaggtggctagttaatgccacttctgcaagataaccagcaagacccttatgcccattggaggctgcaatagaggcagctgttttgcctattggatcttgtgaacatggatctgtcactgctccagctgatgcaccagaagctataagcgcagcaaccattttttccctgttacagatgaatagttaatagtaaaaaaacatgtacacattttacaggacaatagccacaaaatcaagctagtgtatgccagaaaacagttttaggcgttgaaggaactagttttgctttttagtgaaaatggcttctagtaccttccaaagcgagctgcccagtgtagagcagtccatccattgatgtcacggaaatttatactcactccggaactaagaattgggtttatggcccattcaaatcccaacccagcaatcatgtgtattattccttgctctttcttggataatgggcatcctgtctgatcttgttgctcctgggatctagaagatatccactgcagtaacttgtctttcagaagctcttcaagaatcaaattaatagtactagataaagtaccactaccatctaaaagagactctattagactatcccaagaatctacatcagctatcaatttttgaggggcatccaatactttattatctcttctcggcattgatgagtctgacaagagcaactgtacaaatctgacgagtaatagcaactcctctggactccttgttgattctgtcaaaggtggattaccttgaacacaactgctaggcttaagacagtactcaaactctttgacttcactgcacgattgtcgattaccagcagtaatgcagatagtcaccttcccggaagggtgaggaggagcttcacaacgtaatactccgtcttgaatgatttgagcgggaacttcaacatcaccaaacatacaatgccatgtagattctgatgaatcacaaagaaacgatccgacaatgattatctgcataaaaggatacaaaatacataatttaggctttgaaccctaactcataactaccagtatggtagctaagttgatatttctgcatttcagtgtatttatcatccagactccacccttacaaaaaaaaaacaaaaaaaaaa

SEQ ID NO: 113584 - DNA, 3791 bp, Cannabis sativa
gtgtttaatttttatcattttagagattcaatttttatcattttagagattcatttttaggatgttaaaaacttcatttttaggatgttaaaaacataatttttaggatgttaaaaacatacttgttagtaaatctaggtcctggtaaaatatattccaacaccatcctcctcacacacgatcatcggcgccacctactcttggctctcatgtcacatccgactcaagattgcatctcgatcttcttgcacgaatgtctcgagttccattcctgatcttcctcctccatcttctctcatcgacggcaccactgttcccgtggttcactccgtcgtccacacttccaccggcaccaccgatcccgtggagcgtctggttattcaagatccatcccctcgatacatcaagatccacatcctttgtccaatgctcatctggatccggttgaagtgcctccatcttgtcctccaatccatcaagatccaccatttgtcaccgttagtgacttctccgttgatgatcttcactatggatctgaacctcatagtccgtcctttacagctggcggtcctctaatcggtgcgattgcaactctccatgtattgcacactctactggatcggcaaaaccactctcctaatgaagacaatccctacttcttcagatccggagatcatcccggtctcatccttgtcactccaccgctttcggatcataattttcaacaatggaggtgggacttcaatcttactctcagagccaaaaataaatctagtttcattgacggtacccttctgcaaccgacatctacgagtcctctgtaccattcttgaatctagtgtaatctaatggtaatatcctggatcattcactgtgttccgctcgacatcaagagtagcatcatgtttcttgacaccgccaccgacatgtggaatgagctcactaaccgcttcagtcaaggcaatggacccgtctctttgaacttaatgaatcagtcactgacctacaccaaggagatgactccgtcacgacttatttcactaaactttgggccatttgggatgaaatcaaagaggtacgaccttggcttccgtgtacttgtcaagcttctgccgatatcatcaaattttaagaaccaataaaaagtcatgcatttcttgacaggactcaacgaatcataccatgctgtttgggcccaagttcttattctcgagccttttctgtctctttcgaaggtttttccaccatcattcaacatgaaagacaacaaaagattcgtgctcttcccaaacttggttgctgcagtatctttaaaccctctccgaaacaaacgacagtgccccttttgcactaattgtgagaaacttggccacttaaaggagaaatgctacattctttatggttttcctcttggttttggcgataaacgaaaaaatgatcccccaaactgttccaactcaaatcgaggtcagtcctctaagggtccttctcccaaggaacacgtggccaacactgcttctgccgctacttctccttagatctctgaaaagctagcctctctccaggacatgattgcccaaatcactcaacaaatccaccaaactcagtccaccaccgccatcaacactcctatggcgtcaaatcttaccggtaaaactgtatcatggatagttgatagtggggctacccaccatgtttgctttgatataacatgtttttcatcttttcataaaatccttattacatcctatatcacactgcctaatggacttaaaatacctgtggataaatctggcattgtacacacaaatgacaacttacaaatctccaatgtactttttgttccagatttccataacaattttctctctgtttcagctgttatagaagaccataaatacaatgttttgttcactcatgatgcttgttttttttcaggacatagctcgaaacgctcgaatttggactactaatcgcattgggcattttcttctcctctagcaagtctcagtctctactaatttcgtgttcaataatcatacttgtaattcaaatgtcatttctaattcttgtactgctgtccaaaaatgacatttacgcctaggacacccctctgtttgaattacaaaatattacatttttctaattcagattcttttatttctccatatcatgtttgtcacttagctaagcaaaagaaactcccttttaattcatctaacaatatagcacatgccaggttatcaatatagcacatttagacatatggggaccctttcacactattagcattgaggtttataaatattttctcactattattgatgattataccaggtttacttgggtgtatatgctcaaaagcaaggccgatgctcgaactattatcccacagatttttaccctcatattgaatcaattttttaacctccatcaaaggtattttatgtgataatgcttagaagctccacctccaatctttctttgcacttacatatgtatcttaccatatcattcatgcgttgagaggcctcaacaaaactctttagttgagcgtaagcaccaacacattttaaacattacaagagcacttgctttttcaatctcgcttgtcactcacttattggagttattttcttcatacagcagtatatctaatgaatcacacaccttctgttccactacatttaaaaatttcttttgagttgttatataataggttgccctcttatgatcatctacgggtcttcggttgtcttggctatgcttccaccttggatagcactcgacgtaagtttagcccctggtcttcagcttgtgtgtttattggataccccgcaagtatgaaagcttatacattacttgatcttgagtctcacaagatttttcaatctcgtgatgttatttcttatgaacatatctttctaatcaagaatacttattctagtgcgaccagggcttgttaatctcgagaatcaatgcttttaagtctcgtggttagtccacacaactcagaggtcaaccctgtaacaactcacgagtagagttagtaagatccactttctaagttgcaattgttggaagattttcataatgatgcgttcagaattagatcttgtcataaacataaaatccatagatctctttctcatctttccaatgcattttgaattgtccaattctgaattatttgagagagttatggctaaaacactaagactactgaattgtgacaactgggtgtgcgagcccatgttccattgtgcaaccccatgagctattgtgcgatcccatgaggcactgtgcaagcccatgagctattgttcgatcccatgaggcactgtgcaagcccatgagctgttaggcaagtcagggagtatttatcgttagtcatggagcatttgtgtgagctatgaagcctttatgcaagtgatggggcatccaagtgaatcctaggcttgtgatgtaagtactgattcgtgtgcgaagtgtacaatgaaggctcacatgaaaggatgcaaggggctcgcatgcaagggtgtgaggggctcacacgagagaccacgaagggctcgcacgcgagggtacaaggtgcttgcacgtgagactacaaggggctcatatgagaggtctcaaggggctcacttgtgagggtgcgaggggctcgcacgggaggctgtgaggggcttgcacgcgagggtgtgagggtttcacacaggaggtcacgaggggctcgcacgcaagggtgtgaggcactcccatgggaggtcgcgaggggctggcacttgagg

SEQ ID NO: 113585 - DNA, 7897 bp, Cannabis sativa
taacaaaatacagggtccaattaataacttttgcaaaacagagggtctaaaatagtatttagcttttgtaattagattgtattaaatgattcccttcaattagatgggatgttcctatgtgagatggtctaactcttggaaacaataatatcacatttatcttttcctttaaagaaataaacaatattaaacaatatctttatctaaaagacagaaaatgaattaaagctaattaaaaatagtggaaaataaaaaataaaattaagttgtcatgtaagaaaaataattaaaaaaaatccaacatcaattttattttcccacaaaacccaaaaaaatttctttctcttaccttattcagattctgagtagatatagtagatacccctcgtgtgctttcctacatcttccattaatgccttcttgaaaaactccaaaaactcacctttctttctctttcataaacattatttctatacactcacacacacacatatatatatatacgcataccacgtattcatatagaaaaagattatacaccaaaaaaaaaaaaaaaaaaccaatgtacaaataagaagaaaaagaaactcagcatggaatcccctgtttttctcctcctctgtttatcaatcatcaccgcctttttcttccttctgttcctccggtcatccaggcaccggcggctccggttaccgccggggaaccttggtttacccttaatcggagaaacccttcaactgatctcggcgtataagacggagaacccggagccctttatcgatgagagggtcaacaagtttgggtcgatattcactacccacgtgttcggtgaaccgacggttttctcggcggaactggaaactaaccggttcattttacagaacgaagggaagcttttcgagtgtagctacccgagctccatatcgaacttgcttggtaaacactctctgcttttgatgaaagggagcctccataaaagaatgcattctctcactatgagctttgctaactctaccatcatcagagaccatcttttggacgatattgaccgtttgatccgcctcaatatggattcctggaccgaccgtatctttctaatggaggaagccaagaaggtatatatataaatatataaatataatatatatgaatctgattactatttctggttgactcggttttgaatcgtccgagttgaggtgagttgtaattgaaaattggtaatgagtcagattccacggcgccgagtgggtggtatgtacacatgcataagctaagaagttacgacaaaataaagacaatcattctcaatgttgagagattttgttaacaaaatattatatatttataatcagaattaattatattatttattatttaatctttgttgttgttgttgttgggttattgtgaagataacatttgagctagcggtgaagcaactaatgagctttgatccaggagagtggactgagagtctaagaaaagagtatcttctgctaattgaaggcttttttaccataccttttccacttttctctaccacctatcgtcgtgccattaaagtaagatgagtttcatccccttttaataatcaattaattacctatatatattcatcatatgaaattaagtcatatatatatgtgtgtatgtgtgtgtaggctaggagtaaggtggcagaggcattgagcttgatagtgagggaaaggaggaaagagatgatgatgatgatgagtagaagtgatgaagatgatagaaaagtaataaagaaagacatgttaggagctctattgggaggagacgatggcttctctgacgaagagattgttgatttcttgcttgctttgctcgtggctggctatgaaactacatcaactattatgactcttgctgttaaattcctcactgaaacacctctcgctttggctcaacttaaggtaattaattaattaattaatgccctaattaatcaattcattgatttcctttttctttcattagttttcttaatgatgatcaacaactagctaataacaaataattataagagtagtggacctaatttttagaaccccacctcattttcgttatctatctaaatccatctcttacagtcttacaatatatatatatagatatgattttattgtaatgtactttcacggaatgtatttcgtgttgtattagatgggtctcagggtacattaaatgagtgtcactactttttaactctaattactcttatatcaatctcagctgtcagatgaaataaattcatcatctaacggctgccgtatatcacggattacactccgttacaataataaaacaaaattatatccccatatatatatcatgtgattgaagaaatttgttcttataattacttgttgatccatgttcgtgcacatgctgcactttatttttattttattttctttccttttacgttttaattgcttctgttttgtttttgttctattgttttattttctttcaatgatgtgattatttggtcacacgcaaggtttacaagtagaacattgaattgcttttttgttcatctttttctagacaataaaaataaaaggtcactagtagtcttttttaactgtataatttcttaccacactcatgagatagatgtcaaaataaacttttatatatattctaatgttgatttttatgtgaaatatagaaatgatgattacccacatgaaacaatgattgtaaaatatgctatatattgtgaaaaattggtgacatttttttcctaaaattattttaaattgttagataggcatggcataggtatgccctagaaaaaaaacatttaataaatagtacctagaattctgtgacacagccttacaggctacgaatgtttattgtgttgggaagtgttaagtgtacaaacactgtttattgtgtttttcttttattttttgagtttgtgttggaaagtggaaagaagatcgaggtggtggtagtggtagtggtggtggtcaaaaaagtcaaagaaaaagagtaaaatgagttttttatttgtaccgacggggacagtatgatgcctatattttccttctttcgaaactgcacgccttccttaaagctgttctttctgtagccctctctctatgcttggatgtgtcagattattctgaccccttttgactaaactacccttctgagtcacgtgctttcttctattgggaaggggtatttttgtccatttattcataattcttttttagatattcaacggttgagattcggccgatgatgtcatatgacaatttgaggttttccattaccacctgtgagaggagaagaagagagttggggtttggttaggagtgggagtaggaccactggtggtacagggctcataagaaaaccacatggatatggtccacttgatgggcccaaattactgctttggatatggacctaaaaaggcccatccaagttggttttctcatgaccctttctttttggttttggaactttgatagtagtattgggtgaggtgaggtgagaaaagaaaactaatttttattattgttaatggtaaaatgacaggaagagcatgaccaaattcaagctaaaaagaataagtcttcaaaggctctggagtggagtgattacaagtcaatgccatttactcagtgtgtaagtcctttaccttgagagactcaatactttctcatcaaatgtcttaacatcattttcctaaaatgcactttattattattaatcatatatatttatgcacatgatgtaggttgttaatgagactctgcgtctggcaaacataattagtggagtatttaggcgagccatgacagatgtcaatatcaaaggtaaagaaattgaaaaaaaaaaaaagtggctaattatttctaaagattgtattatattatattgtcacacaaacataggcttatgcaacaaaataataatattcttatgatatgggatgaaaacaggttatacaatcccaaaaggatggaaagtttttgcatcgtttcgagctgtacatttggatcaaaaaaactacaaggatgctcgatcttttaatccatggagatggcaggtaattatttcatttttattatggtaattttctgaaatttgtttgttctttttttttttggacaaactatataatttgctcattggtcattaaattttgacagaacaactcaggaacatcaacaagttccttgaatgtgtttaccccatttggaggagggccaaggctttgtcctggttatgaacttgctagagtagaactctctgtttttcttcatcatttaaccaccactttcaggtatcataccaaaattttaatatgagaaaatattggattttacatatttgaatttatatttaaaatagcctatattttatgtccttttgatgcataacaaaacaatattagagagctctactctatcctttttagaatacattatcaaaatttcactttctccattttatcttaaatttttacattacattaaaggttaacttattttaaatgtatcatcaaaattattttaaatatataatattagtgtacacataatgaatagtcttcaatttcatagagcatagagcatgaaagagttcaaagcatctaatatagtgtatttttttagtttggtttttcaaatattttgaatttgaatttgacagttgggttccagcagaagaagataagttggtgttctttccaactactaggactcagaaaaggtaccctatcattgtgaagcctaggaatcttgagtgcccatgtaaagagtagatccaaaacagagaatgaaagaaagaaagggaaaagaaaacaagataagatatgggcttcagggaatgtagctatagctatagctcggctatgcaatcttgtttgatctttgtgatcctaatgaaataaagctaatatctttttcttttattattatatgtaaatcaattaatttttgttcaattggttggtcttgagcttctctaggatagttaagtgggaatctcattgtttggtccaaaaaaatggaggagagttcattattgccctcatgataatctccataaagggcttcttattatatgatcattatcccttttgtaccttcactttacacatgtttttacttgagcatggaacaagaaccaacgataataataaataaaaataatattccacaatcgcctctcgtcagaattgagaagcattttgcatgtgcacgacatgtgaactacctgaaaccctattttttaattcataaagttgtaattgaaaattttgatgaagaaaaaaagagatctatcctcgagcccctcaaaattttactttcattttcttactttctgcaaatacttgagaatcaaatgttcctgacttttcatatactatattactcgtatcttatgctatatatgtgcttgtacttttcagcttgctaaatgttgaatacaagtgttaataatcattggcatcaagtaccacctttttactatatcatcatatccaaataatcattgttataaggtaaaacacttccgacattctcggtaaaaactaaggattcaatgatacaaaaaagggacaagttccttaccaactctcctgcacagcatagcctcaacttttcgtgagaagtaaaaacagaaaggcctctaaagaatctcgctgtaaacgcttttgtacagatttaagttaacatcttagaacaaggatatggcaatcagggtgatgagaatatgtaaatcttttgctcagattcatctataaagaagcttactatcttgcatggtacacaccatgtttgcctttctcagctgttcaaagagcaatgcacaaacccgaaattggcacaaggcccttcaccctagttatccaatcatataattcaaccaagagtagatatctatcacctgccgctctcccggcccttcaatacagactctacaatcataaccttttctgagttctcgctattaacaagtgaaagcttctcaagtgaagatttcagaagagagacttgattatcttgaatgtttttcctccctgaaatcaacttgcgttggtctgatgcattgcccttaagagattctgtgtgccttctcaacctggccgttaaagcagatattgaagaatgcaacgaatccagttcaactccacgaaactggtctgtagagacaaaagagggcatttaattgctgagaaggtactccagccatgcaaggaataatagtagaaaaatagataaatacatgtatattttgaggggtggcaatatgggtcagacacgataacacgattcgaaactagcaagaaataaacgggtttgagtttttcttaaatgggtttgtgtcatctccgggttaacacagctaaacgggtctttttcaagtcaacacgcctaatccgaaaatgacataacaattagctatgtaagaatatacactcttaaatttattatacttattacatgtaaactatattttttagttcaatgagacataaacatcctaaatttctcataaatgtgttataaaaagattgtaaacatgttagtaagaaaatatgttaaccaaataaagcatgattctttatataaacgagttaaacaggtcgagtcaggttaatccgcttataaacaggttgggcttgggttttagttttcgacaggattaataaatgaatcgggttcggctttgacatttcgacacggcatgaacatgacctattaacacaaattgccacccctaattaaatataaataaacacccagatatatacagacaaaggaaaactgaaggaaaaagctacaggggcggggatatgaaacccttgacaaatctcattattctccactttgataaagaatgaggatcatattcttatcaagctgatttaaatatttttccttgccttatttttctagaactactaatactatacaagaatgatttgctactggtaccgtagcaggtgaaatcagaatatgattggcacacgaatcccaaataaggaacactagcagcaaatctatcttcaaaattaaagtggacaaacaagtattccttggcattattttttagcatgtagtatagaaatgtttactacaaaagagagaaaagaaatagttatagaaatccttaccaagttcagacttgaaatcccgctcagctctagagagtggtttcctatgtgccccaggcaagttcctcaagcgattcaagcgttcctccaagagatcatgccgatgcattgcatgaacaagcttatcctccagcgttgactgcttctcctcaaccttcaaaattttatcatgtgcctcatctaaacgagtgtgctggttatcaataattctcttcaagtgaagcccgtgatgcttgagctcaaagtacacctaaacaagtggacaaacatttcataaaaaaacagcattgagattgcaaagtatggagatgtttatcagtttaacatcagatcaaattaccaatacacaagatcaatgctactcttacaagttaagttagaactgcttattagcaagataggtaaaagaaaacaaatgcatgggagtggcaaagtaactgacatcccatcaaaaatgaaagaagaagatacacatacaaaaataaaatgaaaacactgcaaaacatgttgccatctcatagactttgatatggtacctcacaagtttcatgcatcaattttttatccaagcttctgttttcttaacccatgcatagtgataagacccgagatcttccgctcaagaacacaacaaaacagtagcaataataggagtagaacaatagcaaaacaatagaaaatgtgtattgaaagtaggagaaactcaattacaaagtaagg

SEQ ID NO: 113586 - DNA, 2331 bp, Cannabis sativa
tttcaattttttaattgagaattaatttttttttaaaaaaaaaaaattcactttcgaaaatttttaaacaattttttttcttaatcaatattttagactccgactagtctcgaactctgactcggatacagacccagacttgaacgctgaccccaaacgccaaccccgaccctggccccagacctgaacctaaacccgaatttagaccccgattctagacacaggccgtaaacacggacgcagatccggaccccgacccttattcgaacttggataccaacctgaacgtggacccaagttaaataaaatttactaaaaatttactaaaaatacttttttcatgattttaaaattgaaaaacaaaagttgatataagttgatatagaacacattttttgtttttcaaaaataaaattttaaaaataaaaatattaccaaataccatctaatatatatataaatatataagtgtgataatttatattaaaatatttattaatgataatttatatattaaaaaatatattagaaggttactaaacactaatgataatttatatatgtgtgaattaaactattagaatctcacttaatgaaagacaatcacaaagtcgtacttggttcatcaggttcatgaatgttattggagtgttagtcaaccccaaggacatcgccagaaattcatagtgttcatattaagtacaaaaagctgtcttgggaatatcctcctcttgaatcatcaactggtgataaccagatcgtctatcattggcaaaggatcttcactgtcaatttattcaactctcggtaatcaatacacatccttagtggcccatttttttaacgaacaaaactaacgcaccccaaggcaaggtactcggcctagtaaactgcaaattcagcataccttgcaattgaaccttcagttcttttaattctgctggtgccatccaatacggggccttagaaataggctctacccccggtatcaattcaatctcaaaatcaatcttctattttggcagtaacccgggtaactcctctagaaagatatctaaaaattcccgtaccagtgggacgtgttcaagttccactggtatatcccttgtgatatccaccacgctagctaaatagacaatacatctatctcgtaataagtctcttgccttaagcatcaagatcattggaattcgagattcttgaacccttcccacaaacacagatgggtcctcaccatcgagtttaaatgttaccacctctttttacagtcaatggttgcattatactttgctagccaatccattccgagtattacatcaaaattttataagtctaatttgattatatccatcgacaattctctacccgccacatgcactggaagggacctaacccacctgttggagataactaactccccagtaggcaacaaagtacgtaccaaaattatttggtaaaacatcaatgggcttgttcaaactacagatcactctagtcaatatagagaattgcgtagcaccagaatcaataaaatatataacatactaccaccaataaaaatctgatctgtcaggatagaaggaccagcaacagcctctgcttgggtcaaagcaaataccatagcaagaataagagcatcctctttctattgttctggtttcaaaaattgtgagcaattcctcttcagatggcctactaccccacactggaagcaggcacaagcttgacagtcgccctaatggcgtctcttgcaccttgggcactcacgataagttctccaattcttgtttctacctcgattgaaaccttgattaccttgaaatttcttattgggacccgtggctggtggatcattgggtctttccttgcggtcattagggttaacacccctactcgaaccaacattagaagacaggctccaaaaatctcttctcatattgcacctcttttggatttgatcttcatcaccctcagctgtaaggactaactcaaccaattgagcataagttcgaacaaacccttgctgtttagcagctacaaccacatctcgagtaatatgttcttccaacccctaacaaacctggcctttctagcagcctcaatggccacttcatcaaaagaaaacttaaccaattggtcaaatttggtagctgtaatatccagtttaaaatagtatttaatttttttttttggatattaattgtgcgaggataattatctcatttattaatgttgttagtgagttaatattattgcttagagtagttgtaccaattttctaaagaaagttaaagttgtattaactacgaaagtaaaatattatgatatttt

SEQ ID NO: 113587 - DNA, 3443 bp, Cannabis sativa
  modified_base (3399)..(3401): a, c, t, g, unknown or other
ccctacagtggcaaaaatgatgatgctaacaaaaaaaaaatagtatttaatcaaaattactaattagaaattattaaatattgtgttcaataaacttgtatatttaaatttattgaatttaacatatatagtatatatactgtagagaattaataaatattttagaaaatgaattaaataatgataaaacaaagcaaacttttttttttaaaaaaaaataacactttttgttattcaaaatatcaataggtcattcaaataactttgtaaaaaaaatagatcaaatagctattaagaaaaagatatacatatataccaaaaatactagctatttgaatctaattgatgttttgaattagtaatttttttttaaaaaaatgaactataaaaaatctgtatgtgtttttttttttttttttaaatcttactgcatggtataatttttttaaaaaattgtatgtgtttttttttttcttaagaaaaattaaatttttgacaattaataattattttaatatataaaggaaaacaaacggagttaacaatattttggtggtttgtttaatgtctatttgacattttaaatgatgtggcaaaatataattagtggggataggagtggaacaggaaaaataggacaggtgatttttttccgttcattgtaccacacatccataagctactcttctaattgtcaattgatttcgaaataaaaccccatacaccttaatcacacaatcctaatttctaacaaccatcaaagtccataaccaggcatgtaaataatagtcatagaagttcatacatggtgaggatgcttgatttctataagaagaggaagcttgattttaagagtattgcacttcagcagagcataaagagtttttccaccaagagatggactgttggaagaaaaagcctgccccatacttagtggaccctttatcctgtgtaaataccaaccttatcttcactccaaattaactttgggagaatagttccacatttcatggatcctcaactagtttggcttccctgtttgagtatccacttgtccccacacacatttatctgcgattttaaatgttccatctagttgcacaccgaaacattttatctttcacaatatattatgcggaaaaatttgattcattcgaaaatacttcatgaccaaatttattcttaatttgacattttcatcctgagattcatcaacacaattgatctctatcatcaattgttgaaaaaaaaacaaataaagaatttccatgtgcaaagtactaaaacaaaatgaaaagaagcaacataaaggaatttttttcactatataataagtacatataattcatatgcacctaaaattacacacccctaccgaaaggggaaaaaaactgttaaaggaatgttaataaggtactgaaactcaaagacaactatgatctctatacataatttgttgaagaaaacaaaaattaataaataattaagccatggacatgttagaaagtcgactaggagttgaccggaaattccaccagcgaagcgtcatgcggcgtttgggcggcgtgagcgcccttcttatcaagacctcccctgctggcgccgcatatgatcggccaccactgtggcatcggacaaaattacgagctgattcgctaatgcttgcggaaaacgtacgtgctaggcgagacttaggactcggaaccacattattattataacttttttgccttatcataagactctgtcttagcctctccattttggatccaatctgaagcttttctcccatttgcttctgactcagtctttgcatgtttgcaattaaggccaatgaaggaatattgaggtgggtagagtagagcagagagagatcgagtggagtatatgtgttttattttatgcctatcgaaatgagaaatattaatggttaaattgtttggtttgcattggggtgttgtgaaactcttatatatatacgactttatgagctgcgttatattaattattgatatttgacgaagaacaattcttttgatagatatatttgatgaagaactttattagaataaaagtactaaaactaatgatttttctattcagaacgaaaacaatgtatataagacgacttgttcgttcagagactttcataaaggttgtgctttgactattgaattgttgactaataaagttattattttgctcaaaagggcaaagaaagaaatgaaaatcaacggccactagtagtggaattattattaggaagccgccgcatcgtttgacctgacaactaaactaattaaccactcggtaaaccggaagtttgacattgtaattcttcttcctacataatttcttttccctcactatactccattatttcaaattatccaccatcactattcttcaaattaaccaattagtatttattttccttttcattaccgtaggaacgaacgattataattaataagtaaaattctaagcttattaatttcgtcacatttttttttattatatataataataaaattaatggaaaattttaatttatattgcaagtattttgtttattatgacactcatatacacatataagtttcatattcgaactaattaagtgaagattatttctatggaatgacttgtatgactattatttttcatttattaattagtttctagtccactaatgaccacagcttaatgatacagaaatgacgtacgtgtatcgtatgtggtgggtggtagttaggtctagtaagtttattaatgtgatcgtgcactgcaggttgcccccttcgtatatctttatatgacgataactctatttttattttctttgaaatcatggttgttgaatttatatatatggcgattctcattaatgtataataatatttgtaaaggattatctaaaacccctcttaattaataatttctttttcgaaatcgctctccttaatctactctttttataatatttggtcactttttcaatagaattaaaatccttaatttattgatatatatcatgtaaattaaatcactaaaagctgctaaaaggagaatatatcacaaacgacaaaaacaagagactttcaaatctcttatatggtaaaaaattggaaatatgaatacaaaaaacttaattataatcataggaagaagtttacaatttttcttattttttcaacagttcctctcaaccatctatggtagcaagctaataataggccatcccccaaagatgacgagtatgaggaaatgtgattactaaaagagaaatactaattaattaaggagcacattatatattcaacaatataagacttcttatatattaggggttttttcataaatgtacaacaaaaacaaaataattacaaaaaatgtgcnnnaaaaaattattttaaaaatttatacattttgaaaacttataa

SEQ ID NO: 113588 - DNA, 2973 bp, Cannabis sativa
aaaacaaaaaaacttccaatcaaagtgaaaaaagtatcatttatcacaaaacactaaaaaggaattactacaagaacatagacttgggactgtgagcgaaataatgagtatcacacaacacaacaatacccgcagactgcagtgaccggtgttcagccttaaaacaggttaaaggaagatgtagtacttagattgcttgtgccttgttggtttgaggcactctgcaaacactaatgtttgagttagttggttttgaccaaattgttatttcagtttctggtactgattattgaatatatttcatggtctgtttcacatattgggtgattttgtcattctaccttatacagaatatgtggtttttgttttttcctgtaattttacaggtattgagcctttgaattttttctattcgtcccttttaactaattatacctttgttttcaaaatggtcctcggcaactttggcctttgaagaaaacaatttgtggttgtttgaaataaaataacatggagggcaagttcagaatcaaaaaagatgttactgaagtaatttttctttaccagaaattaattttatgaatttatttattttttgttgcttttatgccgttttactaatggtcttctcttttattttggttcgtgtagttgattggtaatacgccaatggtttatctcaacaatgttgtggatggctgtgtagccagaattgctgccaagctagaaatgatggagccttgctctagtattaaagacaggcacatacatatataaatcctcttctatttctttgaaactaatatcatatttctaggcaattggtcaattttagagttttctatagattgattaacaatgcatttgaccttattgttcttctggtattcagaattgcccacagcatgattcaagatgcagaggagaaaggtctaatcacaccaggaaaggttagtcgtgatagttttcaatgtctagagttatagttatatttttgaccatacatatttcatagcatggtattactgtccagcccatttgaaagcttttctagttcagcaattatgtttctgtaacatgatttctttctgaatttaaacaaattatctttgttctgattttgcttaatttattgggattggggtttgattgaagactgtcctcattgagcctacaagtggcaatactggtattggattagcattcatagcagcacttaagggttacaagcttaaacttaccatgccagcttcaatgagtcttgaaagaaaaattatacttcgagcttttggagctgaggtgtatcttacagatcctgcaaaggcctttaaagggggtctagataaggctttggagttgctaaagaacacaccaaacggttatatgcttcagcaatttgaaaatcctgctaatcctaaggtaccataatgtaattcttagtcttatgagtttaccatatttggtcagattttgagttgggttcttatgttttttctttctttcttccagattcattatgaaacaactggcccagaaatatggagggactcgggaggaaaagttgatgcattggtttcagggatagggactggaggtacagtaactggagcagggaagttccttaaggagcaaaactcagagatcaaggttgaattttaatttagttgtgaatgagaaaaatggtgttcaaagagagagagaagttaatgtactaatggtatattttcttgtttgtatgtagatttatggggtagagcctgtagaaagtgcagtcttgtctggtggattgcctggtaatttatcagtttaaatttatgtggcttaaatttattgttttagtttgtcctaatatagatatatctgttgttttcttataaggaaaacatctgatccaaggactgggtgctggtataattccagatattctagatgttagcctgctacatgaaattttccaagtaagttttggagctacttatactggttttgaatttgacatataatttgtatctgcctcatgagtcattgttccaatttcctaatgaaaacatcaccactatgagtgaagtgttgcaacctaagctaaatatgtcatttggtcatgaagttcaaatgggaatatctttaacttgattgttagaaacctaataatgaagtcatttcatattcttttcgatgctgtcaatgttttcagatatccagcgaggaagcgattgagatggccaagctgcttgccttgaaagaaggcttactggtgtgtcattcaatttcctaatgatattaaataaagaataaaaagctctagatttcttttgcttttaatatatccaattatgatgctcatttaggaagatgtatgttttacaggtaggaatttcatctggtgctgcagctgctgctgccattaagcttgcgaaaaggccagaaaatgctggaaagctcattgtggtaagtcatattcttctcttaaatttacttctatattgaaagattattgtgtgcgtaatccgattatattttcatggattaatatcatttaattttgtcaatgttcaggttgtcttccctagttttggagaacgttacctttctactgccctatttgactccatcaggcatgaggcagaaaacatgacttttgattgaagtttatttttttttttcgttaggactttgactgaagattttaaatacagttgtttgaagatagttattttgtaagatttaatggttaaattcataatagcaatcccatcaagttgactattttgtacgaaagaaacagttcgcacaactatatcattttgctttcacagttaaaattcaataactaaaattgcaaattaaaaactaaaatatggaacttaattggagaggggccgcgcgaacgcaggcccccgctgacacaaattatgacgttggctctcccacttggggagaccataagcaggcacccctcctaagtgcaatgga

SEQ ID NO: 113589 - DNA, 1812 bp, Cannabis sativa
atttagtctcttctacactgctaggggcgtgtagaagtgagagagggagagagagagagagggggagagagagagtaccaaatgaatccgagacattgatatgctagagaagatgaagttgcttttcactgagaaatgaatctgagagattgatctgtcggagaacacgaagttgctcttcaccgagaaatccaggccaaatcggccagagaatcggcgaagatggctgaacgggaaaatgaagaagtttgggtgagagggagagtacaatacagccttgtacactgtttttattcagcatagaataatacaggatagattgtattaaaaattggggttgtaatatctattacaatacaaggtcctacccaaacatggtactcttataatttaatacaatacggagcccttacacaggtatccaaacgagcccttagtgtactatttagtactattttgaaaaatacaagatccaatttctcatttaataaaacaaatgatccaatcggtaacttttacaaaatacaagtctcaaaaaagtatttacctttttttggaatactaaaagcacccgtggtgtctagcatcctctaaagtgtaatattgctatcactattgatgcacttaagtatcgagtctcatataatttaatgtaataaattttatagagtatcactaaccaatcgtaagatgacacctctagattgtgttaggcaccactaatacctaataacaatgatttttttgtgtgtgtgtggtcaaccattttctttttatttctttccaattttattttattttttaaaaaatatttggattgttgtcctttcttattattagttggggtcacatatacgtgtatgcaataatatgaattgtgtcgtgttaaccgataaaaaaatataagtcatgtcatattgtatctatattttaaagggtatttagcatgactagtaagcttatattttcatgtcatgcttaggttcatgtcgtgttttactcaagcgggctcgttttttcataaataagtcagcttcttttttttatacgggcttgaatttagacttcacttttccactacatttttttttacaattaatgagttcatctttatttttttgtattttttttatattttttcaataatattttacgtataattatataaaaattaattataatttaaatttatattaataaatatatatatatatgtattattattattattattttataggattttttaacctattgtatttttgagttagtttttttgtgcttatgtatcgtgcatttttatttgtcgtgtcgtgttgtgcttaaactcatttttttcttgtatcttgccgtgtcaatttgaagcatcgtatcatgttgtgtctaaacctatatttttttgtgttgcatcatacttgtgcctcccaaatttgtactaattttgtgacatgtcaaaaagaacactagtgggggttataatatttatttgtttttctattgaaaaacgacaatacataatataaacaattgtatatttatgaaaataaaaattatattgtatacaatatttgtttatatttgatttaggatgttcataaaatatctaaatcgcaaagtgtaaatatctatacttatgtagattaattaaattagattgagaaatttaaaatttacacttgtacggatgatgctcattcaaatataaaagcagtcgattcaatttaatctgcacttatttatatactaggcgattgttacgtgccaagccacgtagtgttagttttatttaatattttagttttttattttaat

SEQ ID NO: 113590 - DNA, 5106 bp, Cannabis sativa
  modified_base (727)..(744): a, c, t, g, unknown or other
ttttttttaaatttatctctttacttaatttacctactacagaactaagtaattttgagactattgttagtaattggatattacgaacaaataaccagtgttacctaattagaaccacatagcataagggttaacaaactatgataatcaatgaggaacaaggtttagtctaacctatgggtgtgtccttagattatcactcgcgataggatgtgaaatcctcatacttgtacatgatgttatatgtgtgaatcaaccatgggttacttatcttgttgagttgttgaaatctaagacaaagtccctgattttcatgtattttagaatgccaaataaaatagtagaaagtacccctgttgccataattcagaacgagatgaaatttattaaacacagtgtcggctaaaggaaataacagagtaactaatttgcttaaacgaaaaagttaagaatacataatactaggtaagtcaacttttgatatacatgtctacaatatgttgcaacttgtgcattgtttgctagattttggacacatagcataagcatacactatcgttgtggaataaccatgagacaataaattagtagaaatttgtggtaggcccagagccccaccaagcttgtttggtgttgtggaaagttaaagcagggctgactctgagttgaaatgggctataggcaaatttttttttaagctcttactataaagataaataatattttnnnnnnnnnnnnnnnnnntatgtatattttttaaaaggtaattttctgatttgggcccttaaaataagtaggccctaggcacgggcctagcccgcctatgtccagggccgaccctggttaaaggcataactattggtcatcaacattatgtgacgacttgtgtggtatccttagtgcaatgacatgttcagtttaagtaagtagtacaagctcaatgacgcagtacgattgggtcgagcccatagtacgtgttgttaattgtagaaagtggtcaactccatgtcgtatgataaatgatatttgttaatgaagaaagataattaaagagaaagagaacaccacgattttatagtagttcactctcttgtacgccggtaatagagctacggctatttgggattttattaatcacaagagagattacatgaaaaaaaaaaaaaatactaaggagagcttcaacttacaatttctagatagagaaacatgtgaggagagagaacctcttaccttataaagagaattatgaatatgaaaaatcaaccagatagcctcctatttagagggaagatggtccaataaaataataatataaaataatacgaaattcgtaggaaattcacttgaattttttgacctgcttgcaggtagatttttagggcaaaaaatttagaattgcgaggaaactattacccaagagtagatagagcttgaaaagagcttttcaatgcacttagaagcacatcatttcgagttggaacgattaagttatggccaaatcattgacaaatacgtggccatgttaatgttaacataaaacatcaacctacgcgcccataattctgtttcaagagttgtgggcatattttgagatgcctaaatggtgcaccacttagctaatttcttgtgtatggggaattttttgactatttttgtaatgaccacatgattaggcatgaaattaactgattattagcagtatattaatagctaattagttaattatggctatataaatatgaaatttgatatttccatgtgtttaccgaaattttttgaaacatagtataaataataagaactgaagaataaataatcaaaagagaaagagtaaaaagagacaaataattttttacatggttggggcgttaattagccttagtccacgagtcagtgttatttagtagttctttagcttgtaaatgccttcgagaatacaaataatgcatgttctcaagtttgcttgagcaaagtttgcaagagagctcaacccctaatccataggatttaaggggtattaatagtagtttaagaattatattaggtttcccttttccttctattagggagtttacagtaaataatacgcttaggctatcttatgaagtccaacccacaaagaagacgatttcctgactaggcaggttatctttggattaatttggtcaacaccgtgtgtactgattgtggacaattaatctgcgaattaattgcataatattcattataggaagtttccccattaatcttgataagatactctattgtgatttgacaactggaatttccttatttgtgcgtaggactaaaaaggaaaactggaaaggtcttgtagaaactcacggtctagtccctctgatctcgtggtagcagacatgcttccgggtatggctggctgagggcaaaaggttttacgattgtggagctaggatatgttctttgaaggacatatccaagtgggatcaacctactttacctttgctgagggtcccactgatgggtcttgggtgttgaactggaatccatgtatccaatgctaaaaacgcggataacatttacccccaagcttttagaatgctacgtatggtttgagcttgcatcactcttttagtttggaattttagaaactgaggaataaaatcgtgacattttgaatgatactcgagtgcggaaggtggcttccgtctgtgatgataatctgtccacatgtcaatcgcatgggagtagaagggcgcgaccatcgaggagtcattttcttgaaacgactatatttttgacagttgttcactttttggcacgaaaattaaaaatatgcattttcatcattgatctatgcctcagttttggagagtattaattgcgaggatacacgcagatcgttgaactctctaaccgttggatgaaacttgtatctctagaaatgggattgtggaccgtttatccccttttcatgttgattactttttgggtataaataccctttataacttcaaattgccacttttccccatttttcaaactttcaacccttcaaagcttataactttctctacacttttcaaaactaagaaccgtattcaaaacaaaattttcttctttaatttggaaaacaccgtagacttttgccttcgtctattgttgaggattatggcacgatagttctcacatcatcaacccctagtgatcaagacttttacattaggagaaattgcgagcctggatgtcaacacagaaatcgatttgctgattgctttagcatctcgtcttcgtgaatggtgtgatcaacttcccagccagacccaacaaatactagcttgacatctccgctatcaatatcaagtatgttgcttcttcatctatggattgtattttctgagttttgttgttataagaaatatttgcatgttctattctgggatgcgattacaactttttacttgtgtgattgctgtcttaagtagatttaagcaccacaagccatactatttttcaaattccctattggacgttcttggaatttgttgatttgcagcagaggtgctggccaaaattttccttcacccaaaatccttctagttttgggttctccgttaaaatctatcatctttctctctatgttgttcctaacttcctatttggaacgaatgactcttggaagttctcatttctcattagtatgtctagttgggacctctccaacagatccctttctatgttaggtagttagggtagctaattgcttgggttatcttcttttgtacataaattatgtctaggtaaaatcatcgagaggaagctgattcaaaggaagagataatggagcaagaaaatgctccaaaattggtcatgaataacagtctatgggagatggactagcatgtcaaaaaattcaggaattataataacctaaggaaatatgagacccaacgagggctcgaaagtgttccaggactactctggaataggcttttcgttcatagggagaggcccagtaagtgtctagaaggaggcttcggcatctggaactgggcccatattaagatgggtgcacacctacctttgagatgttacttttctaacttctgcaccgtggctggagtagcacctttataactcattccctaggcgcaccgcttgctgtcagggggtactttttttgtgttctacatggcaagcttatgccaatgttggaggagatcttgtagttctacaagatcaaatctcagcccatgaggggccataaagataaggtgggcttctacatgctggaatgctacactaggagtgttccttaccctaccagctttacgaagtacacgcacgacttcagagactactatttttacacctctagcttcccactaaagagggttcatacccttagtttggattttaacactgcaagtaagcgttgttcccttcattcgactttagtgttttgcttttcctcctgcttgatgtattctgatacctttgttgcatctactagactgccttccccaatcacctttgatctcgaagttggaagagagaatagctttttagaaatccttctcgtccaaagagttgcaagtggaggggcttgttaccactaagaaccttaaggaagtacgcctcatttccccgcatcaggacgtaacccacctttttgtgaaggaccaagttcaggatgctctctaaggggatccaaatgaggttaaggaggctattatagttatcactactgaggaggtttaaaggcagtaaaagtcgatgaacaatggttggcgattggaggagaaaattcacaaagaccctaagcgaggctgaagaactcattatcaaattcagggaggtagtgcagaatgaaggtgctccgggagcgagcacctccgacagtggtgagacacccttccatataattagggttgacttagaggttgtcgatcaatgtggattcaatctatatttatcaaatttagatcatcataaatatccatacagtaagtatatatataaaatagattggatcattaggagtcccaatcacttcgtttcacctatgcaccatcatttaagagtagatgtgtttagtaaaatttacttcccaggcttcttccaaca

SEQ ID NO: 113591 - DNA, 1777 bp, Cannabis sativa
tgtattttatgggccttaattaattaatattttaatatcaaaattaattaattacttaccagagagagaaagaggaagagggagagaaaaaacaacattttggacaccatatcgaaatcaccaacaatggattcccaagccaagctggccatgcttggcgccgcgaagaacaagaagaagacaggcctcagcatggccggtagccggtcacctcccgctaaacgctgataaagtgtcacaaaaagcaccaaataatggaccatacccagggaaaacagtcccaccgcgctctctctccaccccatccgagctgcagcctgtgccccgaccaagttcccgatcaccgacaactggcttgtaggattggccgccatggacaagtacctcttccctttggtgaaccattggccgtatattttcacgtcaagaagaaccacagggactgagaaaatccaccagagaatcaaataagtgggtgttgtaggggcgagaaacggtgccgtttggagcaagagtagccaagagatccaagggacgaaaaggtaatttactcctacgtggtgcaaaaactcggctttgaccatcttaaagttaaacaaacatttcaagaggtaaataagagaaagaaagattagtgtgaaaagagcaaaagaccacaggacaagaaaagtcgacgtcgagttgatcatcaggacaacagaatgagtagcattagttgttcttggtcccataaattttttccatagcaaagcttgaccacctagtgaaagactgattctgaaatatcctgcatgaaattttgttactatagatcttaaagaattaagtaatctatccactaagataatcatcgtagtggtcggcaaactttgttgatcataatttatatcattattattggtggaaattgtgacaggggacgatgatgaatattgaatcacttgctcgatttcggattgacaactttgggccgccattagatatatatgtatatagtatagcactaattatatatacttaagatatatgttttaagtaataaatgcacattttcatgtgttgcttattatttcgggcctcgtggggttttatagtgcaaagtcatcaagactgagacaaagggaaattcctaaaataatattgagaaatcttattgacgtgattcgatttgtacttggtgttgtttgtattacgatgagaacaactctacacaataatttattctacttacaatttacgtaaatatgttactatatatatttatattaaattggatggctagcgaaaataatttttataatggcaacatgcatgcatggcgtataacattcaaattagttttgtttagtataaagtaacggtatcacatgccaactaataacaacgtcttaagttcgaactcatgtattttgattttttttttcttatttttaatcaactgtctttctttggtaagtatttgtttgtgctttatttgaaatttttttgatgtgtttccctttataaatgatttattattaattgatattttaagattgttgacttagatttttatttcagcacttaattcaaatcattgagaaatcttgattaaatttctcatttgttttttttcttttaatttttggtgccttaataaaaaaaaggaaagacttctaaaaaaagggggcattttttatcaagagggaaaggttatttttttggcaaattaccccatatacttttttttttaacttttttttttcaaatttatagtttgagtttctaaaatggtttc

SEQ ID NO: 113592 - DNA, 5417 bp, Cannabis sativa
  modified_base (5387)..(5390): a, c, t, g, unknown or other
atatgtgtttatttatcgttttagcaagttcatatttagggtgttaaacaacatacttgtgattagatctaagatcctggtaaaataatttccaacaattggctcagccagtcgagtgatcttatatccatggagattacctaacatttcctcatgttgcagaagccgagagaagccttcagaacatagcaaaaaaaggtatggagataatgggcatccttgcctcagtcctcgggtacgagtgagtgaaccagttgtttccccatttagaaggatggtgaagtggtttgttgtgaggcaggtcatgataagagtaacccattcagagcagaatcccatcctttccataactcccttaacaaaaatccattcaacgcgatcgaaagccttagacatatccaatttcatagcagcaacacctttgcaaccagccgttctgattttgataccatggattagttcaaaagcaactaagatattatccgtgatgagacgattaggcagaaaagcactttggttctcagatatgacaagggggaggataggtttgaaccgagccacaagaactttagtgattagcttagagatgacattacaaagagcaatgggacgataatctttcacgaacattggttttttcttcttgggaatgagtgtgattattgttgaatttagtggtgaaggatcgactccatggttgagaacatttagtacagcagaaacaacagaatcaccaacaatatcccaatgtctttggtagaacatagccgacataccgtcaatcccggggcttttgtcagatcccattgaaaacagagcatctttaacctctgaaggagtgaaaggtttgattagattcatattcatttcaggagtgatggtggctggtatacaattcaaagtggcttgtagagcatcctcatctacagtttggctgtgaaaaatattggcaaaataatcttgtatagcttcggccatatcatgttttgatgttacacgagctcctgattcagtttggagaaatttaatcttattgttggctttccttgcagaagcttttgagtgaaaaaactttgtgtttcggtctccaagttgaagccaatctacgcgggatctctgttgccaatacatttcttcctgttctaagagatcgtcaagaacggactccgattgcttcagaaaggcagcagattcaggtgaatgagagtggacattgttgagagcagtaaccgaagctggggcatcagttattcattttttcatattccaatacttgcgaatgtgccactgctgcagtgattcagcacaacaatcaagtttgtgaatgatattggaaatgggatcattatttgaggcagcagaccagcaattggagatgatatccttactctccagatcagccaaccataatttttcaaagcgaaaccgaggacgcctttgtgtggatgaagctgcagagtttaagggtgtaacaattgcagagatggcacggtgatccgatgagaaaaaatccaaatgtgtaacagcaggacattcaaaaaaagaatcccatgaatgattagtgaaaacccaatccagtcgttccttaatagtggtgagtgtatttctgttttttatccaagtgaatcggtccccactgtatggtaattttttgagcagacaatgatccaaggttgaacggaaagcagtcagttgtgcctcgttacgtaaagagccacccgacttatcactttgagataggatttcattgaaatctccaacaagtatccatggcaaagtaggtgcgatatcatgaagtcgggtaagaagagtccaagaaagagctctgctagaagttgcaggagcgccatagaaggcagttaggtgaaaaagagggccatcatcaacagataaacaacaatcaaagtatgtagaaccaaaaatattgagcgaaacattaatattatccttccacagcaacattaaaccaccacttaatcccacccgtggagattcaagaccatggctgaaatttaaagattgtctaaaccgattgattgaattactaccaagacgagtttccataagaaaagaacctggggagactgctgacgaactaccagcttcaagtatctgaacgcattgggattccccagccccctagcgttccaactaatgattttcatggcgaagagcagggttgcaacacaacctcagctggatcgtcagaagaatcatcagaatccatcataagagtggaaacattcagattagagcaatctccttgagacagagaaggagcagctaggccaccattatggttacgacaacgtttcaaaaatttcctcattgaaatctgatcacttggtctctttgacagcttatttgggttaaagttttccttgttgtccggtatgggaaggttgtgggagatggtaggtgaagaagaggttgtgaagaggggattgttaagtgatggtattgtactgacatagggatttggtattggaagagatggtgaaggggggtaagttgctatgggtatatgatgctggaaagtttggcgaatgtcgggtgtgaaaatgtgagacaaatgcaaggtgttagaaaagataggctgttttaatttagcattgctgtgggatgaagcagagaggagtttttggttattcgaagtagccaattggttgcagggggagggtgaagttgggcaaggctgatgtgaagcatggggtaaaacactgtggtccgtgggggttcgtgggaggttgttacggtgtataccagtaggcagtgaagaagatgaatttggtgaatggttaggaggttgaaatgtgagatgtggggtggtagcacggtcatccaaggggggtctatgcattgtggaagttgggccagataagtgaagattagaggtttcaccaacagtgagggaacagggctgaggcaaaggttgtgtaactagctttgggattgttgcagagaaagtggtacgggccagtcgagttaagaaaggccatgcattccctttagcaaaatcttgacgatatcgatcataaccattggaaggcagttttgctcctttcatccaaggcccatataagaaatcatcatcattcccactatccattctttccataaaagcaatacactttttaaaaggatggccaagctgcccacactcaaaacagaattcaggcaaacgctcatagcggaagtctatccaaaattcatctttaattcttggaaggctgatcatttgtctgcgggggagcggttttgtaaccaaaagtttcactcggatcctcaagaaagggccccatccttcatcaagggagtcttcatggacatcaatatactcaccaattatattcccaagtgctcgagaaagagatttggacttgctaagaaacgacaatcagtaaatttgaacccaaaaaggagttgagactagatcagtgacagagacatttttgcagagcatctggtgagcgtaagattattagatggttttggaaattccatggttctttgttaaggactctgaatttgtctcctggacagccgaaagttattttaaacatatcatcttgaaattcagttataatggtcggatagcgacccttccagtggcccgacatttggtcaaaaaaggttggtttgtgtacatgaaagacagtgagaacttttgcaattagaacatggacagtagtagacatagcaacagaggtggcatcatcagtgaggaccaaagtagacctttcctcatcagtaagagaaaggttatgttgcagtgattggcttaggggatccatggcagaaaatgagataaaaggaaagctgttgcagaggaaaaaaaggaaggaaaaagaagagaaggacagaggaaggaagaggcaaacccagaaaaaaattgcagttacatgaagatagctgatttggatcgaagggagaatgaggaattggaagttaggatgaaaaaagtttgttaaaaacacataactgctacagacccaaaaacgggcactttatgtttgttaatttattctcgtacttgggttcttgttagtcagcgtaattaaaaaattgtgctggccctatattaatttaatattaataataaaaatatttatgggaacctttttttttaactataaatttcatttaacaaaattgactcgacctcaacaatattaacagcatcaaaaaaaaaatatattatataccgaaaaatatgatccatatataaagaagatgttctagccataagttgagcaacctgataagcacaccgtttgacaaaacgtaatgaagcatcgctaaaagaagataaaagttgtttacaatcctcaacgacaccactaaaagtggatgacaaaacattcaaatttttattagcttgtaccaataccagacaatcatattcgatgacactaacacctagaaaatcacgtttcaaccatgataacactttcttgagagccatggctttagtcatctctaaaagaacttgcccaatccgtagtcccataatcctagctatgatccgacccttgtgattctaaacatctccaccaaaaccatgccttcccttctcgtcaaacaataaagcatcaatattcaccttgagtttttcataatctggtttagaccatagttcgcccccatttgaaagataccaagtatcaaatttaggaaaaaaacttctttctttagtttttctccactgatcaagcgtgatacaagctaaattgacaacgaactccacccgacttttcctacccttcaacaagagttaattttgtgcgaactaaatttcccaaaccaacatcactgctcgaacactttattcctcacctagtcctgagaacaaatgaagaaaccagacaccaaacgacccttcatcaaccggaatcatagctaaacctgctacccgccaacaattctgtgtaaaatcacaggcaactagatagtgcaaaattgattcacctgcccattagacacaataaagagacatccacatgtttaagtcttcaactgaacactcgtaggaatacacccactaactgtcctccatacacaatttttctcttttgggggaagcttttcttgccaaaaattcttccaaaatgccacgacctccccatcgacacttccctcatggtttgcctataataatttaaacacactcttaactgtatactcaccagaagattcaaacccctataccagtaatccttagtaactgaattaaaagggaaataccaagaatattgattgccactttctcatcaaacaaatctttgacaacatcaacatcctaagctttctcacccaccacagaaagactactaacctttcattagccaaaccaggatcaaaactattgttgggctttgtgccctaannnnaactctatttcaatgtaatcttttcta

SEQ ID NO: 113593 - DNA, 4076 bp, Cannabis sativa
  modified_base (1910)..(1910): a, c, t, g, unknown or other
tcaaataactccctcatctaacggctgtcgtacatcacggaatacattctgtgaaagtacatcatgagacaaaatcgtgtccctatatatatacagtaaaaactctatactgagataaaataaattatattgtaattcatgaaatgttataactaaataaagttacaccattaaaaaaatatcaatagaacaacaatgataattaaaaatattcttaatattatatcataataaaatttataaattatatatattattaatatatataaatattcttatgaggtttctttacattttaaaacattttgttttttacatttttacaaaattccacacaaaaattctaaatcgtaactaaaattcttatagcaatccacatagaaattatttgagtaactcaaaccgtaaatttgaaaaaaaaaataaaaaatagtatatagagtaattctcttattcttatatatatatatatatatatataaaaatatacttatttaatttaaaaaaatatataattaactacaatatttaaaaaaatattcttatttataattgatgttaaataagttattgttagaaagaatttctactttgtgtgtgaatatataatataaattataaaagagcactttatttgtagtttaaagtagtgttggagagagtagtttgaatgtagtggtgcaagtgtgggtattttagataaaggacagaatctatagtgatgttgttaaggtgataagaagaatataatataatagcaggagacaagatattaatattatagagctacgaacaaacaatataatcccctatctacctagctatggctagtataaatacacacgttgcttccatatgtgaatatataactacaaccatccaaccaaatataataaatcattatattatattatattattattatggctagagtactacttaataataataataataataataatagtagggactctcttgttgttggtagagtaataggagatgttttggatccttttacaagatcagtccctatgagagtgtattatggtaacagagaggtcaacaatggctatgagttcaaaccttctcaacttctcaaccaacctcgtgttcatattggtggtcaagatcttaggaccttctacactttggtaaccaacctctcaattacaaaatgtggtatttttaaaaattactacaaaaatatatgtgatcatcatatcatattaattataattaactaattaattgtataattaattgttaccttatggtggatccggatgctcctaaccctagtgaccccaatctaagggagtatttgcattggtacgtacctaaatatatatatttatatataatgtatatcactataaattttcaatgattaattaacaactataatatccaatttaatagtatgagttagaaaagtgtattatatataatatgctggattttgtttttatttttattttattttttttgaaaaaaagtatatacaattataataatgtataacatttagctcaaagtggattaatattattaatattgtgcccccttgaatcaagtaatattggacatataccaacgcataataatcatgtattatacataaataattatatatatagtaaattgtaagtactatatacaaatatataataagtagtatatatatagtatagaataatatgaaaatatactgtcagaatatcctgtcccacttcactaaacccttcttctaccattaaaatgaccacttcatcattttcattttattacataagattttcagaatttaattgtactattttattcttagttgataatataaaatatacaataaatatcatcctcagtaggaatttatgtaaaaacaattatatatatatatttatatntatatatatatatataaatttgagtcctcagcctatttaaggctgaatcaagtagtcataggaggacgcctcaaaactttaagcgaaaattaaaattgaattttttattttataaaaaaatatcaattaatactttataatttatttttttttaaaaaaaaatatttcataaattttaaaataggtacgaatttgaaaattatgggtattgatatcacaatatttaattcatcaattttttttttaagtacgcatatttacttttataaatattattatgtatattatacattttcaaaaaacatatttattatattatatacaattgtaataggtgtccctaaatgtatgacattgtagattaaagtggattaatattattaatattctgccccgttgaatcaagtaatattggacatatactataatgcctaataatcatgtattatacataaatatttttatatatataattaagagagacatggtgtatgcaaatattgttatagtactaacacatatatagtataaaataataggaaaatatcatgtcacagctggaatcaatatatgatatataattcttctaccattccttaaaatgaccacttcattttatcacaaaagattttcagaatttaattgtactatttattcttagttaataataaaatatcttactaattaaatattaggaataaaacagttaattgtatttgattagctataattaagtataacatgatagttaattaacaaattaataattgttatttaaatacagagttgagtaatattttttgttgtttaaattaattgttaggttggtgattgatattccaggaagtacaggaccaagtttcggtaagtacgtaatatgtagtataggtagtaggttttaataataattagtagttaattaatgttaagtattgaatattgaataggagaagaggtggtgtgctatgagaatccaaggccaagtatgggaattcatagatttgtgtttgtgttgtttaaacaattgggaaggcagacagtgtatgcaccaggatggcgtcaaaatttcaacacctgcagagactttgctgagctttacaaccttggtgcccctgttgctgctctctatttcaactgccagagggaaactggctctggtggaaggagaccttccaactaattaactaatcaattcattattaataacctcagtactattatatatacatatatatatattcagaataagctacctttgccatgtaatgtaacagtgtgtgtgtgtgcatgctttattaatctttgtctacatatttaacaataatattcagctttcaagttcaacttcacgtatcaaaataatattattttacaaaaattacacaattcaactaatttagtattacaaacatttataaaataatgaaaataaattaattaataatatatatatatatatatataaaaaatctcataactttatgatgataattttgagtgctaaaatttatctctttagcctttaatgtcaaggcttgtagattttcctaacacaattaacttttgttatcatgatcattaacctcactatatatgataaattcacaaatgtgtatatatatatacattgagacataggcctgcatccattttctaaggctttttattttaaagaaaatgcctacttttttttttccttttctattcttaaatttaatattcattatttttttaagacctaattttaaatttttactcaagacctcaaaatgtttgggccaccctgcattgagaataagctagctacttgtataagaatgtgtttctatctttataatattcttctttattatttttcatttgagaagctactaagtgtcagtgacacctaacacagtttaataattattataaaatattgttaattattaaggatgcacacggggtagaaaattgacagggagtgctccccctgtcctcattctcgttaagaattttaatctctatcccggcttatttcccatcggggatggagcgaggaatcccttaatgggagcaaagacagggcaaaaaatcccctaatagaaaaataaaatttttaatatacaaaaatattaaactacgtaaaaattaaaatattacacattaattattatccaaaacaca

SEQ ID NO: 113594 - DNA, 1979 bp, Cannabis sativa
gggaaatttctaaactagaagttacatgaagctcaaaactcacattttttgagtcaagttattattttgatcatctatttttccaagtagacatatcaagtaattcttatgatcaatgagctgtaattttttttagtatgtttactgttttcttggtaaacaaatagacatttatgattagactttgtaatcctaccaccataaactaagactaacaaaagaaaacaatcaatttttgcattttgttatgcacgatagaatatcccgtctatggcacagagtttcgaaaaagcaccacttcgaagaatgaaaattaatcacttactttgcagcctaagaagatatacaaatatttaatgaagtagcgattttttattgaataaaaagagacctaatatggagactttttttttttaattctatccttacttgcttcggaaggagaaaagaaatcggaaccgtagagtgttatatatttttatattagaaggttcctacttcctgcgttgactgacttagtcaatggcttacttaattcatagaaaaatgctaagaaacacctataacactaaatagcagtggggcgttctgaatattgcccaattcagttttcataatcttctttttatggtatttggtcacaatttttaattattttataattttttttgggtattaattgttgatttccagatttagcagtggttcagaaatggaaaatctggtggttggttctgatttcccacaacaatcatggaaaaagattatagagctttgcaatggaattccttcatcgtttcagggtctcaaattcgaagaacaccgagtgggaaagcttaatttaatagcttttgctacttcaccatcttttgccaaggaaaagcttcaacaaggcccagatttggttccatcttcatcacccacggtcaaggagagtttcgatctttttgaatctctttcgcggaaaaatcatttctccattaacaaagctgtcattactctcttcaaacagaaccttaatgaactctctcaactcaaaaataaggtagcttatgttggaatttgactaaaattaattttgtttttatattttatgaagctataacattttgggtattaaattgtgtgaaagagagtttggtgtcctaagttttagtctttgtgaaagagagagaggtgtgggagaaaaatagtgagttgtaaatagaaaagtgagtgagtttatagtgtggtaagagtgagagtaaggaaaaagcaaagtgcattgggatttaggtgtatagattgagatagtgattatatgtaattttgaagtcaaaggaaaatatctctttcgtagagtttggtaattttttccaacaagtggtatctagggacagcgttaaaatttacaccgaaaatattaagggtgatgttttccataaaatttgagattgagcttgtcgatggaaataataattttaatttatggcaaggtacggttaaaaatgtgttggtacaacaagaactcttaaagacactgcagattgaacgtaacatatccactcgagttattaaaaaagttagaaaagctatgtaaaaatttcaaataaaatagattatatttgaataaggaattataagagttgaagatgatccaaagaaatgatgttaggtatcatataaataattttaataagtatataactcaattgttaagtgtggtgatcaaaattgatggagaggatacaactattattttgttgacctctttactaaaatcatatgagatactagtgactaaacttctggttggagatgttactttaaccgcggatgtggtgtcaactactcttttagagatagatagtatcaagcaactaagtagtatgtttgatattgatcaagctcttttgacaaggttagagtcaagtcggtgtcggggtaggattacatcgagaggaagatatgatgacaaaagagacaatcgcgctcattca

SEQ ID NO: 113595 - DNA, 4255 bp, Cannabis sativa
aaaattagaaataattgatgtgttttttcttttctctataattttaggcaagactgattgtaaggaatgaaatggagaatataagttggtggttttatggataagatagataagaaaatataatggttgaaatttaacatatagaaaccaaaatagaaaggagatgaagaaaatcagcaccattgtcaaccatgaaacagtgtgactttttcgttttttttttttttgctttctcaaatgaaagaatgatatgagttgagagttgagattactttgttgtttgtacaagtacaattaatgagataactttatcaaaagtgaagatcatgtgtatgcatggattgcttgacactataatcatcccttcccaacatggtattttatcaatagtttgtatttttttgaaataaattaaaatatataatatttgatatttaaataactttttcatttaaaaaaatgcatttttagttggtgttggaccatggccttatttatttatttattttgtaaaagcattagtatttataaaatggtactactttacaaataattattagatttacaattaagagcactcacacaaacttattttttattatattcttcaaaatattttattaaaaatctattttttttatatcgcactatttcatattatattatatatcaatttttttatatttttttatatcatttaaaaattatattttaaatattttttaaggtaaatataataatatcatacctgtataaaagaaaatattttaaaaaattaatgtaatatttataactcgatacaaaagaattttactttcagctaaattttttttaactttttaatacctaattttttcactcttaaattttaactatatatttagttactaattttttttaactgcttttattattattattgtgattgctcaaacaatgctcttcataaaataaatgcaagtatgactgtaaaataatgtaaaattcagataatggtacctccaatgtcattgcttcccacttgtccccgactccaacacaccatttcttttttattattattttttctttttcatatccaacaaaccaaacaaaatattaataataaaaaatttcttaaaaagaaattaataatagaattagttacttattattttaaagttctattctaacgcaccaattttggcttttctttctcattctcatccatttatttaaattaaatacaatattaataataattaaacaaaacatattttatttaaaaccccttactttattctcttattcatttctcagtgttgagactgtagaacttttcaatctcatccttccattacccaaaaacctctccaatcacacccttacacgctctcttctctgtaatgctcgccatcttccgcatcctcggcctctccgaaccctaattctctaacccttttaccactttcttgtactttcaccatccatggcttcctcgccgcacaaccaccatggccgtgagcttgagctcgataacgacgaaaaccaccatctcgttttcaatggcgacggtaaaagcaatacccatgttcccaaaaagcccaagctatcttctttcatcacagaatccgaaattagatccgagttcgctcaccatgaccagactgttgcccggatcaacaacggtagctttggttgttgcccggctttcgttatggatgcgcagaggatatggcaacgaaggtttctggctcagcctgatgatttctacttcaatggactgaagaaagggattcttcattccaggactttaatcaaggatttgatcaacgccgaacacgtggatgaggtctccatcgttgataatgccaccaccgctgccgccatcgtcctccagcagacctcatgggctttctcccagggaaaatacgacaaaggagacgctgtcgttatgctccattatgcttacggcgccgtcaagaaatccatcgaggcttatatcacacgcgccggcgggcacgtgattgaggtacctttgccttttcctgtaaactctaatgaagagattgttactgagtttagaagagctttagagagaggtaaggctaatggtaagagggttaggcttgctgtaatcgaccatattacttcaatgccttgtgtggtaatacccattaaagagttggtcaagatttgtagggaagaaggtgttgaccaggtttttatagatgctgctcatggtattgggtgtacaaaagttgatatgaaagagattggagctgattattatgctagtaatttacataaatggttcttttgtccaccttctatagctttattgtactgtagaaagtctcccaaggttgctgatttacaccaccctgttgtttctcatgagtatggtaatggattggctatagaaagtgcttggattggaacaagggattacagtcctcagttggtggtgccttctgctttggagttcatcaataggtttgaagatggtattgaggggattaagaagagaaaccatgaagaagttgttaagatggggaagatgttgtctaatgcttggggaactcatcttggttgccctcctgagatgtgtgcaagcatgattatgattggcttgcctgcttgtttaggggtttctagtgagaaagatactataaagttgaggacttatttgagggaagagttttgtgttgaagttcctctctattaccggcctcctaaagatggagagattggttccctaactggttatgctcgcatttcacatcaggtgtataacaaagttgatgactatattaaacttagggatgccattaacaagcttgtgtctgatggattcacttgctctcttctctctacatgatgaggtatgccctgtttcatctattcttcaatagtgtttgtggagatgaaatgaatttgcattgataaaattaaaaaaaacaataaataacttgaattagtataatatttctgatttagaatgtcatatgaacatggatgatgtgtaattatcatcacaaaagacttgtcatttggatctttatgctttatatggtagaattgttcatgaaatgttcaaatcttcggcattgcccattaagttgaggaaaatttctactatcatggcttaatcttctttgtagccgtataaaagaagaaagattctatttggaggttggaacttttttaaactttcctaagagtcttcacacgggaatcatcattctctaagcaatgaatagtggaacataaaaattgacaaagaaaaatagtgaaatttaatcatacatgcacttcgtcatttgaatgctcaattgaagctcactgttttgtgggctctcatttgcattcaacatgagttatgaagtcttacaaggtcctttgtttgcaaggtatttctctagacatatttctactgttcttgacatccaagtaaaaatccagtctttatatagtttgtattacccaccttcaatgctcagcccaactacttcagtaggtctgccctatatagtggattaggctataccctggaccattcagccaaaaagaaatgaccatttgtttattgacccaacaaccagaactggaaagtgcacaaacctctctacttgaatttgcatgaagaaagcacaaaccaaaaaataatggactttttgtcaacttctatgttgtcattgacatgtgattttctgtttacctgtagttcaatgaggcactgaagaaatcttttgtgaggagaataacagctatgtttctctaaatccttttggttgcaatggtttcggtaccattaaagccaaaatcattggtagagaaatgaattgcagatgtgcatgtattatatgagctgaaataattttattttatttttttctcaagccttttctgattttagtttctagagatgatgacttctgctagtctgttgaattgacccaccttagttagttttcctgtaaaaatgtttcttaactccttgttagtgcatgttgctatgagactgaaataagacttattctatatacaaataaaggctgacctaatttaaagatgatgatgactcttgagaatgtcattgtcatctctttctttgttttgctttccattttatatctagatttgtaacttgaaatgctacatttattacttacctgaatgacttaagagacaatgatcatatacattagggttgtacataaatttttgtaaaccgctcaattcgaacaatccgcccaaaccaaactgagataac

SEQ ID NO: 113596 - DNA, 2806 bp, Cannabis sativa
  modified_base (54)..(58): a, c, t, g, unknown or other
ttttccacagttctgctacagctgttttttctcacagcacagctacagctgctnnnnnccacagcacagctgtgccaaacttgccctatatccattgctttaaaaataaataaatacaccattactcaaattcaataatatatttacattttttttcaagaaaaaaaatctggatggacataaatagatttcacatgcatagcgcgtgtatctttcaaaaaaaaagagagagagagagaaactagaattgttcattaaattgtccacacagtacaaactatcacgcaccgcactacattatacatgtgatttaaaaaattttgcaatacagttatagtttgtatttttttcaaattacgcagtgcgatttacgattttgaatttaataattgcgataaaattactaattttacaatataatttttgtttttttaaatatatgtaatatatcacataattttttagaaacaatttaatattataatttaataattagtatatataatgtaatgatgttaaaacttttttatatatattttttgtaatattaaaattttataagattgattttgaatttttattataatgtttgataataataataacagtataaatcgttcaaaccatattatactgtattttctcggtgttgtttttgtggcttttagatcttttagtgcaattacgatttgataaattatatatacagtttagtttgaaaaaccccttggtacaaagtaaggtgaatagatcggcggtcccttcttttccacattatatatgattatataccatattgtcggcttagccaataaactatatatatttatgatatgcaatcaatatatgcaactaattaaaatgcctccaaagttgctgtattattaataaaagtgattgtagcctagctagatagtttgttcttcttcaattacaactctattcgaacttccctatacctaatttttagctctatgatgggaattttcataaatattttttaaaatatttatttatacttttacggcttaaaatttttatttacaaaaatatactcgtaaaactttaaaattataataatatattttacttaacaaaaaagtaaaaaataacaagaaattaacattacgacaattataaataaactataaaataactaaagaaacggtttaatgcttttattgaagtgatatttttataaataaaaaatgaaaaacataaaaatgaaaaaaaaaaatcgtattcaagtatttttatattttttgttttaattttagtaaattatgtaaatttttcattaatttatcttctaatcactagagttgtagattttacactagagaatagattcattaacttacaaattttagtttcctatagaaccttcctttatcaatgttaagtaacaaaaaaaattaaaaacatattaacatttgttttgcttaaaataaacggtatcacgtgatgcagatcttttctctacccattcggtctatggcagtcccagagactacatgctagctataggagccttatacctcattctgtcttacttgaatcattggtacttacacctcatgaggattcttatcccaaacaacaagtcatccttcaagggccaaacataattcttcacaaatgaggggtctgatgagagttgaacctttgacccaagcaaaagagaatgccaataaaagcctcttaccactacaccacacaacacgtggtttaaaatatattaacattattgaactggttttgaggggtgacgcctaatacaaaattttcattattttaatttttgaatgtaaaatgtttaaaagattgggactttattatgtgtagaaaaaaaaaacattaaatggggcgttgggccttataagtggtaattcgtgttagcatattgtgttcatattgtgttgaggtcttaagtttattgaaaaactatcaacacgaatgctggcacgaacgcaacccatgacaacaaaaaatttataaaatataaacatgaacactggcacgcataaattttatgtcgtctcaaacccaaaatcttgtgtcacgtttgtattgtattggcgcgttgtaagctaaattaatatttcagtgttattgtatcatatagaattcctaaatgtatttaaacattgacacaaacaaatacgactcacataattttcgtatgtaaaatctcatatcgtatttgtgccaatccaaattgtcgtccccactgggcctcccatgtagatattgatcataaaaattccaagattgcaacgtaaactttaactactcccaaacaaaagacaattagttttgtttttttaaaaaaaaaaaatatttattgccattattgcttgacataattgttgagtttcttatctcacagactcacatgtagttgggattatatccgttattgttattattagtatttaaaaacaaaatagtaataaatctgagtggaagcctagctaattaagtgaacattgatgtgaagcatgtgcataaagattaatttattagccggtattgaaagcaacccaataacctacaaaattaatactactaattaaatagtttggagaatgatgagaagaatattatgagttaggtcaaatgaagttcaactcaactaaaattatataaatatatatattatatgtttagggactattacggtaggtattgggtaaaataatcaatagggataataatttataacatttgatttaatctaatagctcaaattaactcttgaaaactacaccataattaatatatttatttatttataattaatctt

SEQ ID NO: 113597 - DNA, 2177 bp, Cannabis sativa
  modified_base (1769)..(1776): a, c, t, g, unknown or other
tcatattaatatataatatgtcacatttaaatattttaatctatattatattataacaaataatataacattccccccactagcttcttggtacttgagcaccctggagagttttcttcttcttcctctttagagcctcttggttggttgtaacctcctcagtcacttgttcgggctcctaaacttcatcagatggatagagtttgtacttaatgaaactagccttagtggccaagagggaaatatttcgagtaaactctaggagttggagtattttttttgggctcttgatctaagacccaaggtaaaaggaggacaacaataaggtagaatgtgctagaaattgacgtggttggtatccatgtccttggcaaagtagtaatcctctacaacccaacaatgttagacacattcgtgtccgtagtactagttagccgcttacactcattctgggaaaagtaaaaatacccaaacccattctgcttgggctagactttagatgaaatagctaactaatgttgtgggtggatggctgaccccatccttggaaggcgtataacacaaacaatgcggccagatactttatgcccttgggggtgagctgggtcggacatatgtgataataattggctctctttgaaataggaatacaaaggtagcattgcaccttgtttgacatgtggtcccgaccacacacaaaatctgcctccaggatttgttgccagctttctaggactaggaaggaatgcttccaccttaccaaggagactttcttcatagagagtagtcaatctcttaaaggttagcagagatagtggtgagacccacctagcacccttcagacctcaattatttaaaggtcgggcttctgtatattcctcctcaacgtaatctcgccctgccaccaagacatctccctcctcggagataggctctccagccttgttgtagccaccaaaaggaagtacttgagcttactcctcttcttcttcttcttcctcttcgtcaacttcaaaaggattagcaaggtggacctcaactttttcgaaggacttatagacactatgtcttcagttatttcaaaaaaactaaagacataggtctccacgtgtgtgtgataaggggttaggttagtggagatttatgtttttggttatatctatattttcggttatttcgaaataatcaacgataaaggtttcaatgactgaagataagttcgtgattttttttctttctttttctatttacttttatcttttagttttatatttcgtatcataaaaaacagaagatatagaccatttatctagtagtggtaatttggtcatatgtcaattgcgatttgttgattagcaaattgtattctcactctttatatttttttttgctaaataattaatttattaactctaaatatgcaaatactcttttttttttctttttttgtgattgattttacttaggattaaaaaattgtgttattgtgtcgtgtttgtgttaacacgtttatgacactacattcataataaatacaaacacgagtgtcaagaccaaaaccacgaacatgccatgatttcttaacaggtcacatgacacggagcacgtttcataaatgtatcatgacacaaactcgaaataacgtttatcgggcaattgaacatgttatggcatgatgcaaatttgacacaattaacataattatgtatataaatacatatattactaataaaatttaaaataataatctattattattattattattnnnnnnnntattattattattattttgataaagaaaattaaaaaaaaagtttttatgatatttttttagtttttattttatttgtattctataaaaaaatatttatatatgcttatacatattataattatgtcatttttaaattaagcgtgttgatctaaaaatgatattataaacctgaatttgatacgaaaataaatgtatcacttagccccaatttcactttgtatatttatttgaaaaataaaataaaaacaaattatcctaatattatatgtataatacaatatttttttcaaaaatatatttatacgaaacactttttaataggtattacccattaataggtactaaacaaaattaactataactattaattttaaaaatattaaattattaaattttagtc

SEQ ID NO: 113598 - DNA, 2388 bp, Cannabis sativa
ctatggacccaatttgtttattcatacgttttactaattaaataatacaaacataatacactatcataagtttctgaaatttattttgctgtaaaatgagtttgaatgcacaacatatactaaccaaattatgaacttcttgctcagcagagaggttaattatgtcataatcatgagattcacaactcacaagacaagtcttataaagcaattaacttccttcccaagaaacataatcaattttgtgggtacaaattctcatcactacaaaatctaatttcctttccccataaatatatttaaaacttttttctttcagagcgacattgaataataataaactatcacaaacacaaaagcttaccaatcccttttcataaaacatccagctataaatatcaaacctgtaatcatttaacatttctatagttctacacctaaaattctgaacttcgggttagggacgggaatttaagtactgatgttaatatcttaatagcattgaaccgattaagttggatcttctgctcttcaaaatgaggtgttacgtttggtggagtagacactaaactgaaggcctagaataagaatcagcaatcctagcggcagagtcccaaactggtttagggagtaattaatttagctgcacggaatgattccttggtcatgccataatacactggatctgtgctggtaaaggtgatgaaattccatccaaaagctgatcctccaacaacgtatgtccctttaatctcaccggattcaggttgtgccttctcttgttggtctgaagagacattttgaggcttctcttgctgattttgaccattctttttccaagaggaatttgcttctgatatcacctgtttgaatagctctaccacttgcttcagctctgtaatttgaaggtttggaatgtcacaaacacaatttaacagccaatccaactaatatgttaattattgacagaccatacaaatatcaactgctaacctatagtgaattttatttcacttctaccaaaaccccagatcctactaaggtcatatccagtttaaaaattggagtacaacctttcattgtgtgcaaaaagtaccagacttgtaataaagcggtctgaacttatgatggcattggcgtctaccccatctaaaaactatacttgtaaactcagcacaagttttgtccataaagacatggatatgagtcatgaagctgaaagtactaaaatttaagggtgtagtattccaacattcaaatatgaaaagaaagtaaatcatctcagtgagcttacgttcttggatttcatcagccgccctgcaattccgaaaatccggggtgctaataaccttcaacacaacagaaaggatttcatattatttggtatgaaaagtagtaatttactcagcaaatgtatattaggaatgtgctaaatacatatcctcaaacgaaacctagaaatttcagcaacactaagtttctaactataaatatatatgcaaaattcatcaacctttctgtttatcaataaataagtttagcaattgagaaaaaaaactctatttgtaagttttctttacagagtccatccagttttttttctgctgtttgttttcttgaaaaaaaaatttatcttgcaacagcgatctttcaaaatctgaacctccatgagtttaaaggttacaattaaaaacaccagagagagaaagagacccacttttaacacagttgcccagaaggaattagcaaaaaaaaaacccaataaaagaaataaaataaagaaaaacgaatgaagttggataaaagtcaaaaacaaacctcaataaaatgaggacgaagactattgagaagaagacgaagtttgaggcgtttggaattgtgtggaagagagtgagtggagaggggtctcttgttggaattaaaggagagaggttgaggaggttggggttgagctgcctttggtccctccatggatggtgtggtgaggaggagtgaggtgcgaactgcgaagatggttgagagagaggactctcaaagtgacagtgaaagcgggggatttgaagatttgatccgggcgggtggggtgttggacttgggttgggtcaccgcactcgccaccgctaaagacaactctttttaacttgacttgccttcacttccttcccttccctataattatcgagtctctatcttccctactataataaacgatgtgtcgtttaactcaatattaatacacttcatgtcgttttatccaaaagcagaaagtaatgaaaatgagcaactaacgatattgggatctttttgggttttttttcttcccctttttttttttttttccttttagatatttctattcaacttgtttcaaaagaaaaaataataaat

SEQ ID NO: 113599 - DNA, 3316 bp, Cannabis sativa
  modified_base (3277)..(3285): a, c, t, g, unknown or other
atttgtgatttaggattttctatactaaagcacttttatgaatatgtttagatctgtgatataaatatttcttgagtgttttataaatcttaacaggatcaaaatacacaatacatgtaattcggttcttagagacaaccacattttcaaagttgaaaataattttcaaagcaagaataatgccaccagcaagcctagtagcatgaaccacgatactaaaataaaagtggagtttcttaagaatgctaaccaacttagaggcatccgtcttaagctcgaacaaaaatataatgtcagaagaacatggcctaaccaaagctttagttcaagaaccgtagaggtctaccctaactctctacagctccatgacaacccagtcatcttgccttaagatgaggtgaaaccccaaccagcaccgtagaaggaggtgaaacccaaactaacacaaacaacaaagccccaccagagccttaaacgatacaccacacattaacattaaaacatagactagaactcactgacaaaggcaaaaagtacaaattagaactcaaaccaccacacaacagctagacacccacaaacatcttcaaaaactcccactccaaactcgacaagacacaaacaacttcaaactccaaactctataggacacaaacagaatgtaaaacaaattattgaattattctatttagttcctataaataattaaccattgatattttttcaagccacgatatatcaacatcatcatgatgagaagttttcaggaatttcactgggattttatttgatttgaacatataaaaaaaattgaaaaaaataaattactaactaataatcaaatacgagatagcagtttattttttattttgcacaaggtttattattaacaaagttattgttgtaatatgatgtatatcatgccgatacaagtacacacgtaaaaaattagaagttagttgttttgtcttgatagttaattcggttaactgtcagttagttattttttgtattcttttttattggttcgagttgtataaatagttggagttcaaatctttgtatagtgattagccttgtgcagttctctctctctctctctaaatgtaattctctccaagattaataaacaacacagttcattcaatctattctttactggttcattattggttgttaccagttttctggttcattgctgcagcattcctgctgttgctattgttcatgtgccttggtctttgagcgctcgatcttgattgttacaggtgtgattgatcataataagtggtatcagagtaaggttttagctcaatcaagattcaatcaaaggctccaaaaatcatcaagaagatggttgcaacaagattcgaaatcgacaagttcaatggaactaatggcttcgggttatggaggatcaagataaaggcattgcttgtccacaatagaattttaaaagcaattgatgaagagagtctcaaggaaattaaagatgagaagaagaagaaggagatggaaaccaaggcacatagtgccattcttctcagtttaggtgatgaagtcctaagagaggtatctagtgaagacaaggctttaggtttatggaaaaaactcagttccatatacatgaagaagtccctatccaataagctttatttgaaaaagagaatgtacactcttagaatggatgaagggaaagatttgaggaatcacttagatgaattcaacaaaatcactctcgatcttagcaacattggagtgaaatcaaatgtagaggatctgacaattatactgttgagttctttgccaagatcctatgagcattttgttgatacaatgctctatggcaaagaaactcttacaatgtttgaagtcaagactgctctgaattttaaggaaaattagaagaaaactgaggacaatcaaggtgacaatggagaaggtttgtttgctagaagaaagacacaaaagaaagatttcaagaactagaaaggaggctacatgggaaaacagaaaccaaagtcaaaggatgactcaagggaaactacaaacaagaagtgtttttactgtaaaaaagaaggtcattttcgagatgaatgcttggctctgaaagccaaacttaagaaagacagtaagaagaacagggagaaaggaaaagctagtgttgtagcagatggctatgaatctgcagatgtgttagtggcctcaaatgcagattctagtcatgaatgggttcttgattctggatgatcatttcatatgtgtccaatcaaagaactattcaatgatcttgaagaaagaaaaggggggacaatatttcttggtgacaacaaggcctgtcaaatccatggtatcggttcaattgtgctcaaaatgcatgatagagtcaagatgaagattcagaatgtcaggaatgtaccagaccttaaaagaaacttattatctattggtatactgactaaaataggttgtaaggttaaaattgatgacaagtttctcaatgtcttaaagaattctaaaatggttatcgaaggagaatttagaaatggtctctatattatgattggtgaaactattttttattgtgtcaacactgtttcatcaaaccatgatcttgaccaaactaaattgtggcacctaaggcttggtcatgtgagccgaaggggtctgttggagttagaagaacaaggaattcttaagggaaaacttggtggtaagcttgatttttgtgaagaatgtgtgtatggaaaatgcgcagacaaaaattcagcattggcaaacacaccaccaaagatccacttgggtacatacattcagatttgtggggtccctcaaaagtgtcaagtttgggaggatcaaattactttctgagtattatggatgattactcaagaaaggcttagaggcacttactcaaaaccaaagatgaagctttcaaaactttcaaggattggaaaattctagttgaaaaccaatctggtaagaaagttaagaaactaaggacagacaatggcttggaattttgctccacacaattttcaaactactacagagaagttgggatcgggagacacaaatctgcaccaaggacttcatagcaaaatggcttggctgagaggatgaacaaaaaacttgctgaaagggttagatgcatgttgaagggtgctagtttggaaagaaggttttggagagaagctgttaaaataacttgctatttggtgaacagaagtccatctactgcaattggttttaaatattatactttctttttcaaaannnnnnnnntatattctcatgaaaatttaaatttgagttg

SEQ ID NO: 113600 - DNA, 7054 bp, Cannabis sativa
  modified_base (5938)..(5941): a, c, t, g, unknown or other
gctgcagagtcgtaagtcgtgctgattcttgtgagaacattgctcaagttgtctttgatcttgatgatgcttagcttatagcaggaaccctactttcaacaaagcaatattccactgtcttgaatccgtgatgaggctcgataccttcatgtctctgtcaatgccattaaaaattaatggcttaaagttggatataccaggtagccacaaattcgtagcacagtgaatgttgtttccatcaccaactttccatctcaatcctttagataaaagttctttccccaaaattatgccttgccaagtgagggaagggtaagaaccatggcccgcttttaaaaaagaagaatttttgaagtatctagccttgaggattctagttagaagtgagtcaggatttgaaaaaattctccacgcttgtttagcaagtagtgcctaattataatgaacaaagcttttaaatcccataccaccttcaaccttagaatggcaaagagctttccaagtcttccaattaattccattatctgaggagtttgaaccccaccaaaatttattcatcattacttcaatttgattaatgatcgatttagagaggcaaaaacaactcataacgtaggtaggaattgattgagccaccgctttcagaagtatctctttaccaccaatggaaaatagctgttcttgccatgccgaaagcaatttccaaagtttatctttaatctcaccaaaaagtgcttttttatctctgccagaataagaagggagccacaagtaacgttcatgacaaggctgaattggcatttgaaggagttgctaaaggtttgcttgaattgaatgcaaagtatttggcgagaacgacaagacagatttttgaagattaagtttctgacttgaagcacgacaatagtaatcaaggcatcgtttaatcgtattagccgatcttgcattggcacggtaaaggaccaagctatcatctacaaaaaagaggtgagaaactgatggggcaccacgaggaacttttaatccttgtaaatttccacattgttcttcattgatggaataatcttaaaaggccttctgcacatataatgaaaaggtaaggggagaggggatccccttgcctaatcccacgacttggattaacatgtccttgaatagagccattgataacgaaggagtaggaaacactttgaatgcatcgtaagattagtgacaccacgactatattgaaacccatagcaaacataactcgctcaagaaaatgccattcgacacggtcgaaggctttactcatgtcgagtttcatggcagcatagccctctttacctctttttaaatgcttgagggagtgcaataattaaaagacaactaaaacattgtctgtgatgaggcaagattgaacaaaagcactctttgaacttgatataacaagggagaggtacggtttaagcctgagtacaatagccttcgaaaccaacttgtagagaacattacaaagacttattggcctcaattgagtcaccattatgggctttggaaccttaggaatcaaagttattaaggtttgattgaagcaagatggatcacctccttcatttagaatatctagtacagatcgggtgacaaggtcacctacaatattccaatagttggagtaagacatcactgacataccatcaggtcctgggctgccatcagatttcattgaggaaagtgcataaaatacatcagctgctgtgtaaggtcaggaaagagtttcatttgtttctgcagatattgtacacggtatcactgaagaaacatgctgaagggcttcagaatcaactccattagaggaataaattttctaataatattcttggataatgttacttataccaaggagagacgagtgtgcaattccttggtcatcaaagagcttacggatggtgttattcttctacctactgctggctttttggtgaaaaaatctagtgttggaatctctcgattgaagccaagaaatgcgtgagcgttggtgccaataaacctcttcttgtgtaagtaaatcatcatgtatattttaactagattgtaactttgcataatgtgctggactggtgttatgttaattattcaaagcagccactttctcttgtgaaagcttgattttcttcagtagatcaccaaattttcctttgtgccaattttgaagtttgtttgcacatgtaacaatgttttgaatcagttgaaagccaggattagtgttcgagttgttccagttgcaattgatgatatcttgacaatcatcctccttcagccaaagcttttcaaattgaaattgtgatttgaatttcagaggaggagaggttgagtcaatggctaacacagtaatcttaagtgcatggtgatcagattgaaaaaagtcaaggtgagtaacagttggtgtagtgaaagagcttgtccatgaattattgataaagcataatccaatctttctttaatattgatgccatttatactgttgttatgccaggtaaaacattccccttgaaagcttaaattcgttaatccacagtaatcaacagcatctctaagcacatcaagttgtgactcaacacgtagaggcccaccaagtttgtcatcatgtgaaagaatttcattaaagtctcccatgacaagccatggtagcaaaggggcaatatctttgagctttttcaggattttccaagctacatgtctttgggaagtattcggagctccataaaaaccagaaaaatgcaatgaaggaccatcaagaaacgccatataacaggcaacaaaattagtaccataattgatgattgttacattaacattagctttccaaagaaaaagaaggcctccactaagacctactctaggactttcaataccattaggaaactttaaaatataacgaaatttagtaatagacccaacactaagtttagattccataatgaaaattacatcaggattacattgagaaatgagcaaacaaagttgtttgaatgctttcggtttgctcagtccccgagcattccaagcaatgacattcatgatgattggcaaggctagacatcagcctgcgccaaagaagcatcactaccatctgccaacagtgaaaggttggacatttcagaagagggatcaggctgctgatgcattaggttgtttgttgaattcgattgaggggaagatctggtatgacatcatttcaggacaaatcttacattgccacctgttgtaacaagctgtcttttggcaaacacagatgatactcggttttcaattgctggtgtggaatttttttttgggggggatgagtcatttgtgtagcagtaacaatgatacttgaagtgagtgtacgaggttggttaacagtagaggcagactcagtgtgaagtaatggtgatgtaaatgactgcaatggtgccatatgtgtgtaagtaggggaagtgggcatgacaggagccacagaagcacttattgaagatggctgaagttgtgaatctatgtttagacaattgattacattcttttgttttgagtttcccttgtctttccttgaaaaatcctcttcgacagagggtgtagtataagatggagatgtgagagaggggccataagtaacatgtttatcagtgcccaaattcgaagaagatgggggcagatcaacagtagaatttccttgtgtaataaggttaggcaatttttgataaggaggcagagaaatgttagagtgggttggcaaagtatttggtgtttcagcaactttttttttttcagtggcagttattttttcaggaagtacagggaatggattggcatgaggaatgatgggtgagatggaattccaagcaagccgagtgataaatggccaagggtcagccttagaaaaatcttgcatatatctatcataggctgatcttgggagggaagagccttccatccatggaccgtagggaagtgaaggttccttgccatcatcaattttttctaagaatatagggcatttgtcaaacacatgccctataattccacattcatagcagaagtccgggagcctttcatagcaataatcaagccacaattcatcttccatccatggaaaagagaccatctgacctctaagaagaggttttaaaacatctattccaacccagattctaagaaagggatcccatccttcgttaagggaatcatcatgaacatctatgtaagtaccaatcaaattaccaagaattttggcaagtgattcagacttactaagaaagggaaggcgaaagatttgaataaaaaatggagtaatggtgtatgaggaaatatgggcattttgtcaatcacttggtgaacacagaatcatgtgttggttatggaagtgccatgactctttagaaaggacccttctttgatctccttcacagccaaaagagaccatataagagttggtttcagtgtcatagtccgaaattgtacagcaaatcggccaacccattgagtgagaatgaagttttttagttgtttaggattatgacctttgctagaaaaaattctacaaaggagtcggtaagtggctgggtgaggtggaggtgtggcaatgtcattgatggagattactgcacgttctctggtagagagggcatttgaaatatcggggtggaagttgtccatggatctgtgtaggaatctggtggtagtgcagaggtagatgaagaaaagagaaggtggagtatgggcagagaagggtggaggtaacggttaagcagaggttaatgagcagtttagtggagcgtgaggagatgaaaacagttaaaaagaaaaaacggtaaacaactgccacagagcacttttaaaggcagacaatcgttctattgtacactcattttttagcctattaaaaataatttgcaaattattttcactattgtgaagtagttctttttgttacattttatatttgaaattaatgacgtagttgtttaatcttcacataagtgttgttgtgcaatttaaaataaaattgcttatttttttttagagcctcacttttattcaaactagaaaaacatcaaacaaggaagtttagatccaaaagaaacggggcaatctcaacaatagaaaagaagtgacaaaattatgggatgtaacacaaatagccaattcatgcacaacatggttaagaactctagaaatctaagcaaaactcaaaccagtaacatcattcaccatctcaataagagactcaaataagaatgagaggtgccacaaagggcattgcctgacttcaagcgccttgataaggacttggcaatcagtgtaaatatgagcctcatcccaagcatacctcttacacagagccacaaccaacaacaaaccatgaagctcagcttccaacggagaggagacatcaattttgtttgaaacaacatcaataaagtggtcatcccagttaataaccagagcaaccgcataagcgatcgagccatgaactgcattgaggcaacagggcagcctgttgaccatcgtccaccttggatagatcaagaaatctggtattctgcaagtcttgaacatcagtaaggactatgcaaataatagactctgggaattcaaaagaaccatcatgaaagactctattatgtgccttccacaaaggtgatgcaaagggccgttgtcacttaaagagattcctatatgaatctgcaatttgaccaggaaaaggagaaaaaatccaagagactatggggttgtttggcttcataacttaaaaactgcttttagttttgaaaatagaaaactgtttttaaaaattaataggagtcgtttggcaaaatctttaaaagtttttttaaaattgagttttaaaaaactagaaaaaaatatcaaaatgttgttttcaattttcaaaaacaatttttttttgtctaacatattnnnntttacatttttgctcacatacttggatcctagacttggaaccaaacccgaacccagatccaaatgtatggtgttaaaatattgattttttttagtaagaaaaaatcaaaaaatagttttaaaaaacttgtgccaaacaccattaaatttttaaaatgaccaaaaactgtgttctattctcacttttaaaaatacaattctaaaaactgaaaactgaaaaatatatctttgggagagctaaaagccaaagcatcactcatgattctccattgagtagtaaactagcatttgcgggcaatagggcaattgaagaacacataggccaaagaatcttcatcaaagtcacaaagagaacatctcatattagtgaccacaatagagttcaatctctgtccacatggaagaatgtccctagccattttttcatagaaagaactttgacctctcatgaatcagggtcttccaaatttgcatccaaaaattatcgcccagccccacccgctacttgatcaaggaagaataggtagtcttaactaaaaactcccccgttacagtctttccaaatgagtttatcctttctgccccaaggaagtgtaatcactttctaattatagcccctcaatgatagatggggagaactaggagttgagtagttgagaattcatattacttgaggagtccaatcaattatttaagggaaaaacacgtggatattggtattttagattgaaagcaacgcaatacgaatcccaatccaaccatgggatccatgagatagaccaaatatcagtggatacaccattaccaactagccaacaactctcccgacaaataaaatcattaacagtcatgatccattgagcaaccttaaaggccgattgaggaagagacaaattctagcatatacaccatatttgcaatattttgcacagaaaaccttgcccaaaagctattcaaatccttagctaataaccaccccaattaagaaatcaacaccaagtttatatccctaaattttttaattctgtaaagtccttttttggcaagttagttgacaaaatattttttcttttatggtaagattcttttgcatacatacccgatttcttacctt

SEQ ID NO: 113601 - DNA, 2199 bp, Cannabis sativa
aaagaaagcatgtttaattagaatttaaaatcagtttgctagcaacaaatgtacaatttaaatacatacataaattatgctatcatacaactttatattggctaagttcacttgttggacataaacatacccaagctgttgacacccaacaaagattacagagtaaacctctccgcaacctctaacattttcgatctcagtcatatcgtaaggatatccaaagtatcgttcaagaatgttgcgctataagagcaacttcaatgctacttgttacgggagttgctatcaaaaaaatggtggactatttgagtaaaaagctatgaattttcaattacaaatataggcaccgttgcttctgttgagtaacggtgccaatctttttttcttttttctaattggttaatttataatttgtttatttaaaaatcgaaagtgaggtcaaacaatgttgtcaacgttagccttaccctaaagacgtgaagctttgctatttaaataataaatcgttgtaatataaaaggtgatgaatactattatttcgaaaacaaaatataaattatttggaaataaacaataaataaatgactaaaaacaagaaccaacaacatatgagctgtgaatgtaccttaaatcgaatattgatcatatgaagtttgaaaactttattgtcttgcctttaattcatagcaccgaaaaaattatataaaaataaaaaagctcatcaatggctatcttataatgttggtgatttatatttagattagaagagggatcaatatttaaatcttcattagtgttacctagaactcgtcactcttaatacaattaagtattgagtcacatataatttaatgtaataacatttgaaatatcgctaactaattacaaagcatcatctctaggtggtgctaagtactactagttaatgcattatagcaatgctcgaatgaaaatgttatttgctaactaaatgcaaagcgtcatctctatgcgttattaagtattactggtgccctatagtaatgttcgaataaaaaatgttataaattgaaatatagtacaaagtaataaaatactttaatataataatttttatgaaatattattaactaattataaagtgtcacctctaaataatgtttagcattagtgatatcttataacaatactcggataaaaatgttataaagtgaaaattagtacaaattaataaaataatttaaaattgttttcaaccgtacccatgttgtgaaacacaaaaggaaaagtgggaccaaaaaaagaggaattgcccaccatttttgaagacccatttgcatgaaaatggccaatttgcatgtatttaacaaggttttgagtgagtgaatatggcttttgtttctttggttttattaggcattactacctttaattactcatatcaatttctgtctctcattgaattttgtcttgcccccactttccccaactagttcagattctcctaatcttttatgctccattatagtagtttgctttaaggacatggattattgctctcaatccatatctatatctatatatatgtgtgagagtattgcatgattctactatgcaagagctccggaatattatgctatatttgcttcgatatggagaaaaaatatggttaaaagtgccttgcataaagaagtagagagtgtctaatgcagccaaggatgacttgccggcgacattacccatttagagtggtgttgaaggtgagcgctggcaagttgtctttggctacgttgggctctctgcttcacatgcatggcctaataactcgggtttactccctgaaataggtaattgtttaatgatgcattatgtatgtgtgtacgatgcatgcattaaaactaaaatattgatacttttgtaacacttttgtgaaagtaactttaattgtttttatatggatattttccctttaattttacattgaagaaatgcataatcttattaaattgtacaaataatgtcaatagtgaatatgttttgcaaattgatcacaaagaaaatctataatattacaagggttaggttagtattatctcaatacttaaactatgtttggtaggaacgagagtgagtaggaggaatagggaagataattgctctcctttgtgttgttgatattaagagtaaagataaaacaaggttaattagtaatttttctcc

SEQ ID NO: 113602 - DNA, 7578 bp, Cannabis sativa
aaacaaaaaggaatgaaatttcaacatccagaaatcagacaaaagtaaactcatattacatttttggctactgaaaagagtaaaaaagacaaaagacccaccaccaataatccaaaaatacaagcaagccatctcaatcaagtaatttcatctcaatcaaggttgggcaaaggggtgtattaacttggattctactgtcaatgcaagaagaaatctccatagcccatgattctcttgcctgagcacaaccgacccaccattactgccattgctccttagatgagaatagtaactaagacgccaacaacaggaccatcagaggatgatgttgatggaccatggctcactatgtgctgctgcagacactactactacactcagcggtggggcttgtgatgacattgttaaagagattaattaacacaagctgtatatacatgaatccttattgcataggaaagttaggtaatgaggattacaatagagatgattacataaactaaaattaaaatgactccataccctttctctatataaatataaaaattaaagtagcaacaattttgtcaatttaccaacaacaaacacactgtaatcgatttcctattatcattcgtattccatcatattactataactattactatttcattacaccaaaccaaatatcacatgaatatcatcattaccgatttatgtactaagtgtcatttacctacctgcctagcaattcttgaataacattcctagcctcggtgaaggggtttgtaatatgaacttctttggcccatacatttttcatggattttgttctaatctctggtagtaaaagtttttctatctccaactgcccaacagcatctaaatccaccatcgatgcaatgatcgtctgcaaagattaagaagtatctcttcaatattttcacatgcatagaaagaaatgatcaaaaggtctattaactagagtaacatcattttactccatatcgtaaagaaacttacccatgatgtaccaaaacaagcattcaagacaacagatttgaggaagttttcatctgaaacactaagggaattttctggactaacagatacaacaagatcttggtaagaggaatcgtacaatgatccaaagttttttactgtaatcctgtcatggttctctaaaattctctcaagatgataactgatggtgtggtgtgtattttcatcagtgtcaaccccctttaatgtccagttattacgttcatgggctttctttggaagttcatcgttcagcctgagaaggcttctagctctttcaccatttgcccagccaaagcaaggagatgacccatcatctacacaagaaagagtagaaaatataacattactgaatatcaagagcagaatataccatcacaacagagaatctgggatggcagaaattaagcaacaggaacttttgatattcaatcaccataaatccaagcatttaagatttatcaaaagggtgatattgcaacacaatgatcactagcacaaccaacttgaatataatcaaacattattccagaaaaatgtatcataaatgactgaatctgaatctacgcaatttactaattttgcaatgcagttaaacaaggcagaattacattgggatcatgacttagactatgagaagatggacaaaaaagtgaaaaatatgtgtgagcatacaaagctgggaaatagtgagttagaatgccatactaggaaactcattacgaaagcaggttccacatccttgcttggtataaaataatttactttctttttattcttcatgtaaaattacagatccactaatcagatttggaccaccttttatcgaattataccggtgtacttcaaaataggcaaatactaacccaagacaaaaccagcaattggaatgttgactagatgctgcagaggacgggccttagatagaaggggaacccattttctatatttctcaaaaaccaggatattaacagaaacaacctgtcacaagaattaagatagtgtactctcatgaggcattaataaatcattggacagaagtttgagaaataaactaaatcaaatagcttaaaggcataaaattcagcttgtaaaagttaccctgcaatgtatacgcattagcctgcaatcaggttgttgaaccaactttgaaatcagactagaggataaattgtccagagaagtaaaaccagaaaccaaacccgaaaatgaagtgtccatggaagtaaaccaactcatttctggaacaagagcaggacactggtcattgcatgaattattcacagccccaatggaagttatcacaataaatgacacaggtgtcaacacccatctattctggcccctggaaaaccattttaaaacattacaaagacataaagaaaagctataattgaaccttgtataggttgcaatgtgttgctatactttgaaagaatacaatatcatactacatggaacaaaaagcattcagatagcaagagctcaaagcacaatcagattactgaccccaattggagaactcgatgaaatattgcatctacaccaggtccaagaccaagagggagagcatgtttactcaatgaaccaactatcttcacctgttccattaagagaatccaatgaaatgatgcataatattttaacattatacacaataaagagagataaaaatagtgatggaagcttacaatttgatgctcaaccaaaacatgaaaacaggaagtgcttgcaattccacttaagaattttgatttaagagagtcaccatggtgttgagaatagtgtgcagaaaccacatgcccttgcaaagtaattaaattaccctcaggtggcaagcaattagaattagaaaaggatggaggataagaggccacagtccctgggcatgcataaacctcagcaatttcttcagatgtcacaactggttcaacgaggccccctttcacttctctcaaatttaagtccaacaaattaatcatatttaaaggcacacgaacagaaacatctgaagaggtttctaaacaatcaccatttgctacatggaggcaggcctcattgcaatttttcaaagaaacctcatcactgagtgaacaagaatctaatagagaacagcttggtaaattacttcctgggagagcatgatcaggaataaacgaaaggctcaggagacgatgtctggaagttacaaaaaatttggcactgctgacatggtcagaatctttaaaactacataaagaatcttctccatcatgctttgtaatatagtagcaaccaatctgcaggaactggaatcaaatgcaatgttacataaaagtgggatggttactcaacaaaaaaaaaacaaattgaaatgttttctcatcccttcatcaggtaagaaacagtgaaacatcacgcacttgatatatatgtaaactttctggcttcaactccagcaaaactttttgtgcactaggtctgcaaaagccacaaccatttaaggttcctgtataaggcaggataactgaacgaaccacactacgattattgacacctttaatagttgcagaacaagaaatttggtgagaagtaaagttgcaaaagctctgcttgtcgcgggattcagaagaatttaaacaaggccttaatttcccaatagccttacaaggagtatctaccaaatccgacaattccttgcttgatatatggtcttttttacatctcttaaaaatatgttcatcatgatgcctgccatcacaatatttcatccgtttcttcaactgatctcctgaatccatagttgcatgtccatctttttcattaaggaataaattccaatgaaagatgacagcctcaagaaatatgttcgatttgtctggggtaatattgtcaccctgaaactgttgattgttaaagtggattacttacaaagtactgaaaggtaaaaactatatctcaaacatacatctctcttttattccattaagataatttttattcaaattaaaaataaaatgatctagaacactgcaacaaccacacaaagagatcagatagactaccttgcccagaactggaaatttatgagttacatgaagcaaatgataaattccactttcaagtcccatatcttctcctaattcagtacgaggataaaataccaaatttctacatgctgcactccgtaggtgaaattgaacatgaacagccaagtttactgccctagctaatgagataaaattaaagacacttttgcatgagaatggcttgccaatcaatcccaaataatccatcagttgaggcattccttcaagaacaagaatgtagtcaaccacctgaaaagataaccaacttaaaaagcaaaatggacatctttatctgtgaaccttttcaatccaattctgaataaattatatggcctaatcacaaaaacttctggaatatatacctcatatatactgctggaattccacgttgatggaaggtctggtataatgacatcaacactactagtggcatcaaccaactgcaatctgccggaagatggagaaatctgaatcattaacactaattatcattagatcaaccgccgttaaagttacaaaaacagaaaaaagatggttcaaaaccaactttattgagtagttcaatatgcaatcaatttaagataatgatgataacaagagtagcaaagcctaaatgttcaaggatatatcaacattcacgcagatgttagatatattacacctccaaacattattgcactcgagaacatctgaggctctcagcaagtacaaaatgagaaatggaagacgaagtcaaagtataaacctgcagacttccaattaacacaatgcctatatcttcacttgagaaaacattcctaatcggttgatcatatgatctcccttcacataagaataaactgtataagttgttctcttgtaactctttgtctttgtctttcttcaattgtactgttctcatccatgtggcatcacaatgatggataaaagttgctagaggcacaacctaaaataaaaaaaaataagtagtttagtttgtggttttcattagcaacaatgaaaaacaaaaaaggcatatcatctttgaatctaaatgcttctcgggtatgagtttaccaatttcaagtcactactatgcccctcacaaccacacgaattatatttgcacagtgacatgaaaactccttgctgccaaacagaatttcatataaccaacacaatcaaagtacagcacagatactatccaaaaaatgtttataatgacaaactgaatagtattctatcataaattactcgacttactggagatcgaagcatggatggaggtaaatgtgcattagcatatatctgaaccaatccttccttctgataacaccttgcaatcatcaaatatcaccttatcacataattacacaataagtactgcgtacaaaacagaaaacttcaaatggctaaaatgaaagcaagggaagttacatgttttgatcccaatatctccttctcggatagcatacctccaaactttttccgaaaacatgaaacaagaagtaataccctgaaaagccataccaattagctagtaaattcaacggtaatagcatatacacttgcaaacattttatataaccataaatttaagagcaaacaagtaaagaaaaatgtaccaaaatctagcagaaaagactaacgagtcaatgaagttccctaacatactgggtgattgagatattatatgacacctgcaacagacaactgagtattactttaattttctaaatgggcacttccacaagaaaatctagtctaaattacagtagactatgcaaagccaaaacatattctagaatgagaaaacaaatatttagattaaattacttaggacagagcaaaacccaaaccagggaggagaaaggaggctttcccctatttcttttagattcattcattcaaacgcattaaattttcataatctcgaccaccacaaaagtctaccatgagaattcatataatttacatttggcaaaacctacccagttaccaatggagagaagcacttcacggtaatactagtcttgtagcaagcacctagtataagcatcttcgtccaggaaaatcttggattcacaaaatgaacatttctcaaagatatctaaaaacagaaaccggtaaagatatatgagttacatataaagtgcgtcaattcaatctcattctgatatcagaaaaactaattaaataaagctagtaactacttaccagagcaccaaccctgagactatgcggcggagtaatcaaatggttagttagtaaaagccagacttcattatcaagctcaacaaccatcccttgcatgtatactcctcgcactacgccagtgtaggatccacattctcctttcccctcgacattagttttgatatttggatgaattttatgtcttcgatatctagaaatgcttaaacaagacttctccgcagtaacatacatcaaacgagaatgttggtctccaatataaactaacttcttcttcaagtttgagatagttacaacattcccaatttgttttgtaattactgggtgccaagatgaagcttgtccacaaaaatatacaataaagggtttggtaaaagaatgattactctgttcttcaactgaatcattcaaggcagaaattgtgtccttagagttggaactacacaacctacactcacagaccataatttgaaccaaaaacccgcgaagattcaaaccaggaattgtttcggatttagcagtgttccgtaagtttccaccacctgatgatgcacagggaaccacacaaatcgggctaataaactccaatacgccgtggaggcggtggcgagacttggaaccattttcacaaccgcctgaaactaatgaataagactccacttcggaactccgagaagaaccacgctctaactccaaaaatccccatcgaataatctctaagaaaccacctcctcgtttaaaaggaatgaaattccagccaagaatacggattctacttccaatcatcgacatatcgaggtcgagaatgtcgcagcagacagtagctgaaccatcggagaactggaaacaagagttgttgttagagcatcgagtagaagaggaagaagaaacaccatgtacaaccgctgggagtgttacagttccgataaggagagccgggtagtggagtggagtgagaactttagggttctggtttgaatggtgttttttgggaggaagaggtggagcagaagaggtggcgggtatgtgattggaatgggaggagaggtgggagtggtgagagaatgcggcagtgaggggacgagcagcatggattaggtgggcgattgtgaggagcttgggttcctccatgaaaaatttcagagaagggcattaacaccatggattgtgtgtgtagttgtggtggtggagaatttgttgaagctttctctgtcaatatgctcttcttttttggcctgtgtgtgaattgggtaagttactcaagtttcgactctcaaattttaaattttaaattttg

SEQ ID NO: 113603 - DNA, 1375 bp, Cannabis sativa
atgcaacataaaatgatttttgatctttattattaataaatctaattatattgaaattatttagggcacaaaacccaataagtgtcattaaatatttaagcataatggatacccctattgttgaaaatacattccaagaaaaaacccttgttgaacagttctctcctattgtttgtaatgctccatcatgtgtcattttacctactactgatgctacccattttgaactaaaacaaccaattattcaatggttgccattattttatgggttagatagagaagatccttatatgcatgtgaaagagtttcttaaaatttgcttaaattttttattttaaaatttttctaatgagttggtcaaacttgagctattttcattcttattaaaagataattctaatgcttagttaaactctatcacaaatggaactataactactcaggaacaataaattattggctaaattttttctaatgtccaaaactgataatttgagaagagaaatctttgaattttatcaaaaggataactaagagttttattaaaatttgggaaagatttattattaaaatatccccaccatggttttgaaaaataagaaattttagaatatttttatggtaatttaacccctacaaactaacaaattattcaatctatgcatactagacaatttttgaaattgcaagggcaagaagcatgggttgttctagatgagttatctcttaattcccaataattgaattactatgatcctaggtctagatcaaccagttcaccaaaaagaggaggaaagtatgttgtaacagatgactttgacataacatcatcaaatgaaaaagtagagtgaaaagtagaagccttactgataagtcaaactatgaattctcatgtgcaacctatgaaagatgtttgttctttatgttctagtacatataacaatacacaatcatgtcattcgttccatgattttttttaaagaggccaatgctttacatttgtatgataagacttttgatagtccattctcctccacttataatccttattggagaaaccatgcaaaattttgagacaaaattagcctcagattaaccaagggcaacaatttaatatgccaaaccaaagtgatgcccaacaaacccactcttattctcaacaaagaaaactgtaattccctaacaattaggcacgatacccaaggggattaagaaaccctaatcctttaaaccggattactagaaagataaacactggtaattaaaactttaatcgaaaatagattgaaaataaaacttgtaataaacttaactttacaatcaaaaattacatgtttcgggatcccaaaaatattttacaaaatattacaagcct

SEQ ID NO: 113604 - DNA, 2421 bp, Cannabis sativa
  modified_base (2352)..(2391): a, c, t, g, unknown or other
gtgcagatgaagcttgtaaattttgtgtgctttactgatttattctcaattcaagtctaaaattcatatgttgaaatcaatctactcaaagataatcaacttggtaatctgaatcattaaaatcaacaagtaatactttcatacaatgtactgttttactaaaaagaatgatagataaagttggagcatagctcgagatagctaggaaagtagagttgaatgagcatatcagttggaaaagcgcatgaagaaatagagtgaatggatccatgtggaccaattcaaaatagaaagagatcactcaacatgtgttcccaccaacaaataggagaccccatcattcaagaaaggggaaattattgatcacacaatattattcgaaattctaccataataaatctacataatacacgtctgcttgacacccaaaattgaagaagagaattacactcgatttaggaggaattatgtaatctagcactaggtttatagtttgaattgaatcaatcctggtgtaaataattttaagtggaaatacaattttattgttgaggtaatttttagcatggagccatctatgggagtcacatgaataaaaaactaaggactaggctacaggttagaatgagatctaataaagcatcaaagaatgtgcaaaagtagttgttacatatgaaagggatacaccaagtgggataataaatcctactggtgctatagtgacaaaaatgaaagagataaaccaaaggataaccgcgtaggacaaacacatataggaactgtgatgactcatggaagagaagttccaacaggatcatcaatattattatcatcatcaagacatcacccgatgtgtttatgcaagaaatagcatatatgtgtgtgtgaaggtgaataggacacaaacaccgcacgatgttaaggcaaacaagcaatatagatccgctgaggattgaagagagacttctagagcaactatagaaggctaaaatctactagagtacaatagaggaaatgagatactagccagaaatattaaaaatttgatgagaatggcacaaagaaaaaacgataacaactacaaaaaatagagaatccttttctttactgatattaagaaatgttgcatgtaatgatcagacatctacaaaatattttcactagataggtgcaaatgaaaaaaaaaaagagttacacagaataaaataacatagaagtagccagcagttgagatccaatcttgaactctcaatcctaagcaatatggtgatgagtttttgcaatggaaagaacaaatgatgaaggaaatcatggctaatatcgaagaaggcaagattgcagaactagacgatctaaacagaccaaccatgaggaacatagcaagacctccctttgggaagtggattgttgaagaaccgatgtctaagcatttcgtaatgctaacctttacaatgttcgatagcaaaagtaatccattagagcacatgctttagttcaaataaagaatggctttaggaaaaataatcttggaatcaggtgtaaggccttctccacaaccttgataggatcaagtggttagtagactagaagaaaagtaaaatagaaaagttcaaacttcacaacatggcgcattagtcacatgctgattcctcatccttctctggagtagtttgagtggaggtaacttctccctcttcatagtctaagaacacagatattctccttaaatactctttgtcattttgaactaagatcacatttttagacattgtttgagacaagatgacagttgcactttcagtttcctcctcatcctgcttgagtggcaatttctaggattcatcaaggaagcaagtgttagcatacgcttgctagcaagacattattagtccattattttggagactctcagtattgaatagagttttcccatctatcacccatgtatcaatcttaatcaacatggcatcaactctccttctcatgtcaattaagcactcacattcatgtggaatcttcgctattgatatgaaccatggatgctaggataagtaagcacagcactacagtataagtgttctgggagccattgggaccacaagataatagtttcaggaagagagtaatcatctctgattaattgggcttgatttttagtaagagtgttaaacacaagaggtcttaacttgaaagcccaatctcttcgatcatcactttgaatggtggctttacgaagtttagttgcccttaccttctcaccacacattttatctaagttcttagacttgggcacaattaacttagctctaatgaactaagctacatggggattatgttgggttttatgccctnnnnnnnnnnnnnnnnnnnnnnnnnnnnnnnnnnnnnnnnaaagatcagaaataaaattttatgttgcat

SEQ ID NO: 113605 - DNA, 3945 bp, Cannabis sativa
cggactcaaacaagggatccggatttgccggagccccgcctaccatcccgttgggatcctctgccggatcaacaggtctattctccgggtcggaatgctcatctctggtatcggttcagtctgcggctgcggattcctcatgttggctctcatcaatgtggtccagatcaagctcggtaccctaggttgtggcagttctcacacctacgctgctgtagtcccgctcgtgatcttcgtcccggccgcgcttctgatctatatctccattgttctgtacgctttcttcagtcgctagggtttgacttttctaaattttgtaatatttaaagttttatttattattttggcctttaaatctcttagtggaaattacactgtagccttacatatatcaagttaatcataattgattactatttaaatctctattttattggggttttactttgtagttgtatagttgtcctttgagtttgcatttggttgttcaaattggttttgaggaaattaatttaataagaaaatattggcaaaagtattatgctctgttaatgactaatgatagaagaacacttctactgttatagagataaataaaatgtgaatgattgatttaattaaattgacagaagaagctgttaaaatggctatgagagctttctatgggtcattaataatatctaaattgaatcttagttctgggtaacccttaaaattcttggctagttacttattgaattagaccattttgcttgtgattacagaacaattattacttacatttaatactgtctctaagcaagatctttgattatccattttctcctatttggtttaacaaaatatgaagtctttatttaatggaaagaaaaggaaaaatatctaacctgatctatttttatgtctaccatttacggcatcattagattattgatagctagtgaacaagaatagctgactcagattctatttgattgagtgtgtagactgtagactaatgtaatgtggtggagcagggaaggaaattgagatagtggttttgtttgaggaattacaagtgaatggtcggttatctataatttggcttttctgaatctaaattttgctagattaatgcaatagtttgtaatttatttactctataataatattttatcaagggtcgacgataacataagtggtgtatctggaagaacaatactcaagtagccgaaattggctagtgctttgttgtcagcttctcatttaaaatcattttctcaagaaacgcttatgtaattaaatatgcagtttaacttatccatagtggccagacaaaaaccacttgagaagagagtaggttgagcaacaaaatacattttctttctttccttttaatccatagtgccatctccaccatatttgaaagtgggaattaactttaatgtcatttgatcaacaatatgattatatgagccactttatttgctataaaaacatgaaatctgtcgatggttttattcattgcagtagctgaaaatggaggcctcaaccaaatgcatttgctttctagcttttcttgtaattttagggatcaatgagctgagtttgcaggttcatggggctggtgagtgtgggaaacgtacttcccctgacaacgaggctttcaagctagcaccatgtgcatatgcagcgcaagatgagaacgcttcagtttccagccgatgctgtgctcaggtgaaaaagcttggccagaacccggcctgcctctgcgctgtcatgctttccaacactgcaagaagttccggggtgaagccagaagtggctgtgaccattcccaagcgatgcaacattgatagccgccccgttggttacaagtgtggaggtttgtactagtttgtttttacattatctttataaaatctttgtattacattttctttatctccttaatagtttggtaacacaattatttattctgtttttgcagagtacactttgccttgaagacatttcaccctacgcttgttttgagtggttgttggcagtttgttagtaaaagaaaattgctaaaatttgtgtgtttttagccagttctagtttttacttgggatatccaaatgcctaattataaataaatgggctggtgtgtgtttaactgtttccttcaataataaaacttctttgctttctacttgttgctcacaaaaggtagcttcatggggatttgtgtttttgagataaagaaagagacaaatattcaaaattaaactatatataaggatactcaaaatttaggattaggttatcatcaacattcagcaatcaactatggtgaactatgattaaatcatctgaatctggtgcaattaaagtaaagtaataagtacaattatcatagttcaccatagttgattgctgaaagtaaagcaactctcttctataaatatgacctggttaagtaaagtaataagtacaattatccagttctggaaattccaagcatatagtaacaattaaagtaaagtaataagtacaattatcgtctcaaagattgtttaagcgataaatctaccaactaccaagtgataaagaatatgatagaagaatgttatagtaaattggactttgtcattttatttctaaaacaaataataaacaaataaaaaattgaactttttggcatgtataaaatgttcaaatatattagaagagcaaagtacatgaaatctttgtatagattgaactgaagagaaaatggtacaagagcagtctttatagagtagagtgttgaaatacaagaggtagttaaaactaactaactgactgagtgataactaacataacagaaaactaactctaataggcccttttaaggtggtgtgtaaaagtccttaacacccatattggatataatggtatggaattgagtgaggaaaagtggcttagttaatacatttgctaagttattttgagaagtgacatgattcatttgaagtgtactatttgttatcttctctcgaactgtgtggcaatcaatttttacatggtttgtccgttcatggtatactgggttttcagcaatgtgaatggccgcactgttgtcacaatataaaattgagggaagtttaatggatacaccaaagtctttgaatattcatgtgagccaagtgagttcataagtggcatgggccattgatctgtactcgactttcgcagaggacctagagatagtttgttgtttcttagatttccaagacaaaagagagtgcccaaaaaaaatacagtaccttgaaattgatctcctcgaatctgggcaggccccctaaacagcatcagtaaaggcatgaaggttgaggggatctggtgttgcagtatggtagaataatccttgccctggggaggtttagaggtagttgacaactctgaatgcagcttgtaaatgaggttgtcaaggtgcctgaagatattgacttaatttgttgacaacataactaatgttaggccgagtaattgtgaggtatatgagcttgtctataagacttatgtattgcttgagatttgggagaaggtcacctgatttactacttaacttaagatttggctccattagtgtggaagcaggcttcgagccaaggtgacttgtatcttgaagtagttgcatggtgaatggtctttgggagactgaagttcccttgttgcagcgcgcaacttcaagtcccaagaagaaccgcatgcttccaagatctttgagcttaaatgtagagtcaagagtagcaataaattggttgaggacatttatattgttggtagctacaataatatcatcaacatatatgagtaaagaaagaaaggagtcgtgaccaatgggttttattttttattttttatttttaaataattttgtaatataagattaatttatatttatatttaaaatataattataaaaagggtaaataccat

SEQ ID NO: 113606 - DNA, 2748 bp, Cannabis sativa
  modified_base (2216)..(2221): a, c, t, g, unknown or other
aaaccgcaaccgcaccgcgaagaatttcaaaccgcattttttttgcggtgtggtgcggtgcgggcggtttgagcggtttgagcggtttgatgtacacccctaatggacatagtcatattagaaaactagttataatttcttcaagttttaaaaatagagatttgacaaaaataaaattttcttatatatttttgaaagacactaaaacatgttttttaagtacatattaagctttcccaccaaaaaaaaaggaaaatacatattttctttaacatgataaatagagtcacacatgattaacagtgtaacaagtcataatcggaagtgaaacctcctcaaactaggatagctcatcgtctaaccgaagggtatgttttgccaaactatgagttgtagaattcctatcgcgagctacataagacaaaactgcccccaaaaattcagacgataaagttataacgtcttcaaacataacctcatcacattgaaaaaataccttttcattattaatagttgtcgacagagctagcgaaactgaaaaaatatcgtttactaaaccaaaaaacacagatattagaatgacaatcttcaaaataaaaattaatataaaaaacttataatttaacacacaacccatatcactagctcaacattactaaaaaaactaaaaaatctacaaaatttctaagtataactagccaaaagtattaccctttggctagtaacaacatacaagtaccctattttaaaactgctgaaaaacaatatcaaattgattatatttaaaattaaacatatcggtaaattctctgtaattgtaagtcctccacaaaataatttataaaataataaaaaataaaactctattaccagacaatataatgaaaaaagacaacgtgaaagaacgatgataagccaattcatattaaagataaggacttaaaaagactagaaatacttatctgttaaaagtgaaaaagtcgttgaagtagaaattatgatcataaaatggatcgcttctcttacccattgaccatactacaaaactactctaaacaaataagaacaagttatataaaatggcacaaaagccacaaaaacgtaaaaagcatcaagaccataaaaaaaaaattatgcaaaaacttgtaaaataatactctttgaataactaataaaaataaataaatcaccatttataaaaataataaagaacataaacaaaaagtgtataattttgcaacaataaaagaaaataggatatatacttatttggtaccttgtgttttctcaaaatacacgcttgataccttttgttttggataatgatcaattggtaccctctattttaaaaaactacaaactttggtaccttaagtgtatttaatgttttaatattcctaaattactccactttaatacattatatgattattatatcaatttattatttgagctgattcaaatataaatagtaaatttttcagaaataatatatataattgtaaattaatcaaataaaaattaaaattatttttttttactataataaatgaaaataaaataaactaaaaacccaaaatataaataagttcagtagaagcactccttttagtgcctgctagtatttctccagagaggtactcctatggccccatcttcctcatcacccaggcccatcttctctttgcggaaggtcaatggcctacgtcttcctaatctcttggtacacttcaaaacattggcgatgcaatagttggaaggcaagttgcgacagtggaggccgtgaggaccgtagctctaggctcttggctgaggcacattgatgggggagatctcgtctccaatcgtagtgtgggaggagttcttgacatgtgggtgtagaaggacctctttccgtgtgagtctgcattaattttattttattttttgagataaagtctgcctcttgtttgtgagatatattatttggaatgtgactagctcgagtttaaagattttgaggttattgctcttgttcttttctagcagaaacttgaaggtggatatttgggtaatcatgaatctagtgtttaggtatttagaagattgacatcgtataacaaattaataaccaattgttatgaaatattatttatgaatgttcaaatcaccaaattaattatcatcattaatgcttgattgtattttcctttattacattgatttagtttctcatnnnnnnagtcatatttttgtataaatagggattcgtccatttgaaataaacaactgagaaattctcattcactttctctttatctcttcatcttcttcaccttattttgttcttatctattttatattattctatatcattttataacacgttatcagcacgagtctctgtccaagcttcaaggtaaatattttgttgaagttcttgagttgtttcaaggtcacgatatactaaatatatatatatacttatttgactggaacaatttcaagaaccttttttttctttttcttttttatctatatattatatacgtatgtatatgtttttatatgtttattattaaattcatatatatatacacacatagtgtatctcttattgtttatctatgatatgatagagaaaatttgtataaattatacataaatctaaaagattatgtatcttcgataaaatattgcatatatcctgaagattatgcgctcttaataaaatcttccatatatcttgaaaattatgcaaatataata

SEQ ID NO: 113607 - DNA, 4035 bp, Cannabis sativa
atttcgatccttattcatagtgtatatatgtttgattaattccgcacttaatacttaaacatatacatttcagtttatatatataaatttctaacaatcttgtcactgaagaatgttatattttttaataaatatattattatttaaacttgtggtgtatatgttcttaaaaaaacttgtaccgttgatagaaaattaaaaagaatatattttttttaaaagaaacactaagagatatcttaaggtcccaagtaccataagaggtggcaaattattattggtgcattctaatatcgggtcttacatattttgattttataaataacattgaaaattactaataaccaattgtaaagcgctataacggtgtggtattaaagcaccttaagatactaaggtgacgtttggttaggaggaatgaaaatataagaataggaacgggaatgagaattggaataggagtagaatagaataaaatttaaaatgcataaaaaataacgtaaaaaaattattaaaattttttaaatcttgcataagaatagtgtttccttccatttcaaaatggaatagttattccaccaaaatgatggaaaggtaattccatcgaaatgatattccaatagttttaaatgcaaccaaataaaagaatggaatgaaaattgttttctttttattccattccattttattacctccaaacaaacgcgacctaaatagcaatgtttttttttatgatactttgggtaggagatacgaaatgaaaagactgttaactaatttatttggttaatttttatttgttagaatataaaaattggagagagagaaagaggggttgaattttctaaaacaagaaatgtgatataattaagatagaattctaaatataacatgagaggaagtagggtggtatattattctctaccgttattttttttttttcttctcttttgtctctggaaatagccctatttatattcttgaaattaggcaatagaatattaataataatcatgtccaccatgaacctcatcttcctctctctcctcttcttcttcttattatcttactcatcatcagccaacaatgataatccggttccaccaacatcatcgccatcgccatcgccaacgctaacgccatcgccaatcatccagcaagcatgcaaagccacccgtttcgtagaatcatgcttgaccacaatggcaaagcatggagaggaagtaggacccaacgcctctccaattcaagttattcaagcagcgttaaaagtagtcgctgataatctccacattgccaattcaatggttgaatttatcgctaattcaccaactaataacaagcacttggaaaaggccacaaagagttgccttgagacatttcaaaacgctaattaccgtatatctatagccaattcctcattaccaagtgggaatataaaagatgcacgtgtgtggatgagtgcatcactaatgtaccaacatggatgttggtcttccctaaaaaattccaatgacacccaaatattggtcactcaaaccatgtcttttgtgtcttctttggctgaattatcaagcaatgcacttagcatgatggcatcttacgaccgctatggtcaagacatgtcagcatgggccccacccaaaaccgagcgagacggattttgggagaacactactactactcctacgacgtcattggatcttggttttcgaggtgggttcccgtcaaatttaacggtggacgtgacggtgtgtaaagacgggagaaacggttgttacaaaacaatacaagatgccgttaatgcttcgacagatcttagcattaaaaagtttgttatacatataacggctggtgtttatgaggagattgtgagggtcccatttgtgaagcagaatattgtgttcataggggatggtatgggcaaaactgttattactggttcacttaatgttggtctcatgggacttaccacatatgatactgctacagttggtgagttcttatttattttattttttaaaaaagataataaattttcttttgataaatctatttttttccctctcttttggtgaaaatggatggaaaaaaatatctattttcactcaatgtatgtacatatgcatgtttatatatataatcacttaagtatcatgaattttgctaattttgatttttttacccctgaatttttctcggcgttaaaaatttcctatttaagattttttttgtaaaaattttactaaagaaagtctgacgtaaatgaaaatttaggaggcataattcagcaaaatgttaaagttcaggaggtatataattttgtaaatatcaaaatatggtcacgatttagtatattagcaaaattgaatgaaattagacaaaaacaatattaatagtttaaggagaatttttaacgacctgaaaagttaaaaggacatgatttggtacatgtcaaagttcaagtagaaaaattcctaattagccatttcaaaataatgagttgaatagaaatattaatgccatatttgttttggtttacttaaaacaggagttgttggggatgggttcatggcgaaaggcataaccttccaaaacacagccggagttgatgcacaccaagctgtagcattcagatcaagcagtgatcattcagtgattgaggaatgtgaattcataggaaaccaagacactctttatgctcactcacttcgccaattctataaatcatgtcgcatccaaggcaacgtagacttcatctttggaaactctgcttcatttttccaagactgccaaatcctaatagctcctagagtagacatttctgagaaaggggagaagaatgcagtaactgcccacagtaggagggaccctgcacagttttctggctttgttttccataattgctccattaatggcactgaagaatacatcaagttgtataagagcaaccctaaaatccacaaaagctacttgggaaggccatggaaagtatattcgagaacagttttcatacgatgtaacatagaagagttgatcacgcctcaaggatggttggaatgggataatgatgttggtttgaatacgcttttctatggagaatttgaaaatactggaaaagggtcagacctatcccaaagagtgcaatggagtagccgaattccacctgaacatgttaatgcatattcagttcgaaatttcatccaaggacatgactggattcctacaaattaataataatgatagtatccacatacgatttctaatttatatcctaatcgtattttaggatgtcctaactaatttgttttcatgtttgaaggttaataatgattgattacctttttaaaataataaaaaaaaaaagataatgataataatgaaagaaccatataaatatatatgggaagaaattttgaatatatatcctgttttgaactatgttactgtactagtgcagcatagaaatatcttgttccgatcttcatttacaaaataattagtggatatttaatttgaaaatccaaattatgttactaatttaaatttaatgggaaaataacaaaactatattaaaacaatttttgtttatttcatttaagattgcatatgctatgcaaattgtccggcacctactcaataatagtaacgagcattattggttatatgaattctcttactaccatcaaattacgttttatcattatttattggtactttttataataattattaaattaaaatatattaaaatatttaatgtttataataagaggaaataatttttagcctttctaaatattaagtggtggggttgtaaattttagctactgatttaaatacttaatttatcattacatttcttcaataataaaagactactaatggtcaaaaaaaatgaaaagaataaattagcatatactgttataaatattaataattatgtggatgtctaaatcttttatttattaccagaattgtaatcaatatttctctttttcttagtttccatttttcttagcttcttaatatttc

SEQ ID NO: 113608 - DNA, 3586 bp, Cannabis sativa
gttaaaaagtagaaacgtaccctaacactcatttaatgtaccctgagacccatctaatgtaccatggaaatacattcgtgaaagtacatcagaggacaaaatcatatccttatatttaataatcgtacattttacttattgttataatgatttataactatcgatttaattaatattttatttaaattaactattaaaaactacaccgtaattaatatttttatttataattaattttaaatattaataattagatccaactaacaatactccaaagttaactccaaacctatttatctgataattttttttaaaattttaattaattattttttaattttaaatttatatattaattttattttctactcaacaataattatagctaaaagagtataaaatattcaagttatttagacttttccctctctctctctcgtgtgcagctctcctgggctggtgctatggcgaagactagggcgagacaggggaaattgaaatcaaagatcaagaaatcaaaaaaacgagggccaaactgcacttctgaggttcgtaagatgaagacaattgatttgattattggtgttgaaccagttgagttttctgaggaagaagggaatgatggaacagagcaagtgcgtgaagatattgatctatttcaggctccattatcaccaaaatcatcgttgcaatccatcaagagacaagaagacattagcaaggattttgaatacttccttcaagggaatcgaagctgtgctgcaagtttaaatcaaggtaatcctaccactcctccaattcttcgatctggaaatgttgtgtggaacttagaaaaaacctttaacaattctggcaattctagcaaggttaaaataactttagaggatattgaggatgaggttcattaatggagttcttctattgtttgttatgttctaggttccaatcccccatcatttgtgattgatggtttcattaggagggtttggaaagggaaagctgacaaggttggatctctgtcttatggggtctttctagttcggtttgatacagttgagataagagatgaaatactcaatgggggatatgtgttcttcaacaaccgaccagttgtgatgaaggcttgggatcctgaagttaattttaaaatggaaggcatcagaccagtgccaatttggattcagttacctgatctcgtattgaagtcttggggagagaaatctcttttaagattgttgggcaactgggaaaaccacttcaggttgatgcaatgactaaagaaagtaataagttgagctatccgagggtccttattgaagttgctattcagcaagattttccagagagaataccatttgaagatgagcatggttgtgatgtatttgcttccattacttatgaatggaaaccaatactctgtcatcattgcaagggacttgggcatgctactgttgattgcaagaagaatataggaaaagagcaacaatgggtgattaaaggttccaaacctaaggtagatactgctgtgaataatgaaacaaggaataaaaagaaggggtacctgatgtgcaacctgatgtagtggatacagatggtttcaagcaagttactaaaggtggtaaatctagaggaaaagaggtagctgctgagactcaaatagatagctcatacactgctttggaaggagtttcggagcaaggtattgaggttattaatggagcagatgcaatctctattggaactcacagaatccatacaatcgacaagacaagaggagggggagtacctcctcttggagatggataagatagtgtgctggaacgtccgagggatcaacgacctaaacaagcaaaaccaagtcaagaacatgttacatgttcataaagctgggcttgttggtctcctcaagatgagagttaaggccccaaagcttggggccttatatgttaacatcttcaaagggtggtgttttactttgaacatagtgtggcatgaaggaggtcgaatcatcgtggcatggaatctgttcagcttctcggtgaacattctcaaatgtaccagccagcttctccatttacaagtagctactttagatggtaagtttggttttctagttacatttgtttatgcttttaatgaagttgaagggaggaagttgctttgggtagatctaaatcagttgagaactcaagatccttgaatggtattgggtgattttaatgacattttgtccaaagaagaaagagttgggaagagggtaaaatacaatgcagccaccgattttattgattgtgtggggcgttgtcaactagaagatatcaagtatagaggaagctattatacgtggaacaataaaaggaaaggaagtgaaagaatttgctcaaagatagatcgtgttttagccaattctcaatggttaaataatttttctaatgctgaaactatttttgcagcggaggaattattcgatcataccccgtgcaaccttagttgcctctgtcataaatctgctgatgtaagctcggagaggttctcttggtcttttcttcaattcgaccagatctcctaagtgcaacggaagttggcgagaagaggagaattgtgcatggaattctgaggataaagccttccatgagttgaaccttccgagtgccaacttgaaataccattgctgggcggcctctgagagggtggcaggaaaaactctgcaacatacatctcctcgtactccttgcagttccatttacatttcaaaatacttgaggtgggataagggatcttccttcccagtgtacaatttccaggttggcatcttaaatttgtaaggcaattctaagacattaatctctggggagaagggggacacgtgctcggtccaactcgaggtcattattcgaccggccaggccttggaacatacattttagctcatctagttgtgcctgcaccgctggattaacttgttcggcctcttggccaaccagaatcacgtcagcatctctttgagcgcgagctccgggctgaacgactggagcgtcatgctggtcgtccaaccctctccttctgttcagatcatcttagagatcatgaactgtccctaatcgattaaatatagaaacacccggttgtctctgtgactggttggtttggccaatatgctagccgacaccattaacttgagtggaagtattaggtgtaacctctcctgatgaattgttagacaaggtctgcccgcctaccacttggcccaaaggtgggacctgtgaccggggattggacgactgaccatttatagtttgagaggtgttcactgttggatcttcgtctgtctcgcccaagggaatgacgattgcaggttgttgtccggtagcctgataggcttttcatatcaacacggtggtctgccgagttcaatcatcaatggctgcttgctgagcccttaacgtttccatctctttgtccctccattcagcgaacatgcgcctctgctcttcaaacgcgagatttatcgtagtacggagttcctcctgattgtcatgcagggtgttggtatgaccttgcatgactccaagagcagcacagaggtt

SEQ ID NO: 113609 - DNA, 1722 bp, Cannabis sativa
  modified_base (54)..(65): a, c, t, g, unknown or other
taaaaattcctattgtaactaacgctgcaactactttagaaactcaaaccgtannnnnnnnnnnnaaaagttaaaaaataatatataggataattctcctaagatcaattaaatagctagagttattttgttgttaattttaatattgaaaatttccctatatattgttcttttataattgaaatgtccttaaggcccataataaatgcctaatcacattcaacaatatgttagtaaggcccaagtgacaggcccaattaaattggactccaaagcaatacaagagggaatgtacacttgggaaagagagattgcccaattggatgagataaacttactcagccaccaaagaggggattacaagctgaagacgaaaaagatatcaggagagattggcgcgtaacaagatggagcgcgtgaggccacgttggctgaaggattatgtgatgagcctggattgttagtgactgtgttgttaattttttttttttttttgaaagagactgtgttgttaattgttatagcaataacggtttggcttgagtttcaaatattatgttgaatgaaatagtaatttaaggcttaataaattgcaattaaacttacaaacatgatcaactataattgataatatatcctgttcttactatgtttatataaaaaaaaaaaaaaaaatgttctacctaaaacttccccttaattattcttactaactaaattggtatattagtagatatatgatagtactaaaatgtacttcaagtatagagagtcaatttgcagtctttttcgcaaatgagatcgatgcccattatttaatgctaaatatatcacttctttttatattaaactatttaatgcatatatatgggaatcttattatacatttagcacttaattgatatctctatatagaatattaaatggaattaatgtctctttttcaattgcctattgtttaagatcttaatttgcaatctcctcatccaaagaaaatcagaagtttagaattaatatatttggaagtgagtcgaccattttgtttaatttgtttgttgctttcagcaagtactttaattaattaaaaaagcttgtaattatgatctaattggataatattgctttaatatttaatataggtaccggtgcatcctcatcattagatatataaatctatgtataataatatatttagttatggcataaatattgctccatcggcaaatcagaaatttgctcgaatagtttatgtatgattaaacactattggatgacaaataaaagttcccaaaataaactaattataagaaagcatactttgtacgttttgttttggctaaactaatatatatacattgtacgaattaaatgcctgattaattacaaagatttttaaggacaaaaaatatgaatggtatgttatgattctctttctccagtatataactagcactaactacgtcgtataatactaagccaaaactaattggtaagattaagatttttcttagccaaaaagatttagtactgatatttctaattaaaaggctttcttttcttttcttttcttttttttctatacaaaagttattggacccacaacgtagtacataaacatatgatctcctctatatatttgtagggatatgattttgtcgcgtaatgtattttcacagaatgtattccgtggtacattacacgggtctcagggtacattaaatg

SEQ ID NO: 113610 - DNA, 4260 bp, Cannabis sativa
tcgcttggccaagatattggacggttgcctcgaccgctattatagattttacggctctgatcagaggatatgggcttgcctcagtgagcttggcgtgtcactcactcgccaccgtgggttccatcaggtacgcttatacatatcctatcccttaaaagtctcacttgaccatgtttcacggtagtttcttaacaaataatatattgctacgtatttatttagccactttcaaatgaataacccaggttggattaattagaatttgtccctcattaaattttttatttgagacagttaaaaaaatttcttaaacaattaaattttttaataattttattaatgtgataatattactaaatcatatttttaaattttaaattttaacacgtattaaattatatttttaaacttttatctctgtcatttctattattaaaatttgataaaaaattttaaattaacaatcttaataatatttttaaaaaaattaacaacataatacatatgaagataataatctaattagcctttcggtcggatcacttgggtggctactttaatgaaaatgtatcccacctctaaggggaaaacgtaaatgtccctgtacatggtggtacccaagttttgaggttttatcagctgatttgactatttataaatttgtcaccataataaatttgttccttttctaaaataatcttgtgttattaattgcaatgcaactattcaaatttgaattgatgtgtcgtatagaaagtggacactaatatggaggacttttttttcagtcaattctttccctaagaagggacgagcaaagaagtgtactatgattttttggagcactcccaactctttcacaaatttatttttttaaaatatatcactaattttttttatttataatacattttttcattatatcttatattaatttttttaaattcatcactaaaaatttacttttttttttttaattttaatatattatatttattttaaatagataatattaaaacaaaaataattattaataaaatatatttagagtaataaatatcattttataaatgtaaaacatgaatgataaattttaaaaaaaaaaaattaaaaaaaaaaattagaacatctattgtagtgtgtttttagagcatctctaatggtcctctatattttttacttaaattttaactaaaataactaaaaagttaaagtagagagttatttttattatttttgctcaattatgttctttaatttagttaatatttagtcattttaataatattttataatttaaatttattaaatataaattaatttaataaaataatgaaaaattaatactgtttttgattaaaataatattaaaacaatttagcaaaaaaaaaatagagagctctatatttaaagagttttttttatccattttctattgtagtgagtttttttttttatatatatagttagagcctattttttttaagactcgctttctattttagtttaaaaataagttatataattaaagatggtcttagtatattgttttaaatattttaaaaattttctattgaaatgttctttctctattttaaagaagttgtgagtatgttttggtgagagaaaagctagtaagggaaatgagtatcacggcgtgattcgtgaaacgaataaaagattggattatagacagaataaaatagactgggccttttagtattttattcgatatgattacttttaaaaaaatgcagagaaagatagcccccaaaacaaaaaaatatataataaagatgccatctgtaaaagctactcgaaccaaactaataaagaagtaaaaagggtagcattcctagcctttggtgtcatgagacgtggcaaatttacatggagctttgatatttgtgaaataaaagttctctagcaggtaattttggtgcgttttgttctgttgtaatcttttggtacaacaattctcctatttatcataactactcttttgtaaatgaatttgccgatacctaaatcagagaagtagctaaatataatccgccaaatgaagatttattgacccatgttaccccttatttaacaagtggtatactatgactcgtctctcaaacatccattaatttgactgcttggtcccaatcttactctcattatcatatcacgaaatgatcttataaataaaaataatatgtggctcgtatgtaactttgtttcaacttgtttgtccttgttaacatccattgctattgctaagcccaccctagttttttctgaagaggagagtaatataattgagacagtctggcctacacgttacataaacaatcttttcatgaaaagggtaccttgcttttatggaccatggtacatgggttgtttcctttgcacatttgcttagtcaaatatatgatcattttggactatagttcaacttcaatagtatggagtatatagatttatatagtatatttattatcacattttttacttattaaaatatttctctaaggtgtatttatgatccatttggttattttctgataatatttcagttggatattaaaggaaacccgtatggtcttctagcagcacatccattggttccactggtatccctgcaccatcttgattacttgaatcccttgttcccggggcaaacccaaatagaatcagtggagaccttaatgaaagcgtatcgggtcgacccgggacgtatattacaacaatgtttttgctacgacaagaaacgtaaatggtcaatatctatatcttggggctatactttgcagatttaccccttcatgttagcagcttcggaacttcaaatgcccttgcagacgttcaaaacgtggcggagttcgagtgacgggcctttcactttcaatacccgacccgtgagcgacgacccatgtcagcaaccgttagtttactttctggaacgggtcgaggaggtggctgagagtggaactaggagtagttttttgttgtctctgagcaaacaagccaagaaatgtagaacggaagtgtataagcgtgtcatggcaatcccaaaagttgttgttacttctatgaagatggacaaagactattggaacaaggtaaatttctatcaaattctcttgcacatatataatgctaaacatctagatatagaggaaagctagtaactaattaatatatatttaaattggactaaggtacgtccacactgtggacattgtcccacaaataaaataaatggtagaaaatttaataatatataaaaatatgagttactccaatcataaccaattagttttgaaaaactccatgattctcaatatgatagtgatacaatagtcactatattgagggggaatattgtggatattgtcccacatagtaaagacttgagccatatataagaatatgagctacttcattcataatcaattagttttaagatgaaacctataattcttaacacacacacaatgttattttactaattacaatatccactgtcgtgtaaaagaaattaaagttataataaatcggagtgccaaaacacaaaaggtgcaccgatgtaactaccaaagaattttccgtatgatattattcttgtattcctttacttgatacgacattatacgaaatgctatatgaggactagcttttttttttttttccttttcctttctttttttctatttcttttttatatatctttttcttttggaagggatcttcatttggtcaatttttaagttgctttccaaattttggaccaccgtcattgaaatcattattaagacacacactacttacattttgtttgaagaaggaagtgcctgtagtgtcacgagagataaagctgacttttcatacatatattaatcataaaacgacagacaataaatatgctcagtgtaattaagtcaatttaaagaaatgaaagttcaactgactcatccattttcattttctttcaacatctttgccattgctctcatatattaatcttgtaactttaatatgcatatatacataaatctataaaaatttgtttagcatcatagaatatgatatatttccatgaagaatgatctgatttatggtgatgatgtacaggttcctgttagacagtgctgtgagattttggatcatgcaagcgtaaaaaacggggtcatgcagattagaattagaaagtgcagaccaaaggaaactattactttttagagagagagagagaagatcggaagagcg

SEQ ID NO: 113611 - DNA, 2376 bp, Cannabis sativa
  modified_base (71)..(74): a, c, t, g, unknown or other
aaccccttattgcaactagcgctgcaaccactttaaaaacccaaattataaatttgaaaaaaaaattaaannnnatagtatatgagataatttcccttaatattataacatacatatggtattaaaattatattgataaaatcatcagataccaatttagttttatgacaaacaataactaaaatgttatatttccaaaagcaaatgtaccattttagtatttttccctaaaaaatcttattatttaataaatattttttaatatcttatatatattatctatagaacttcaaattatatattttctataattatttcaatttgtaattatgattttcactatttttggtagatttaaaaaatatttactaaaactagtaataatttataaatttgaaaatagggtaatatttttttccctgcaacaagcaacaaattattaattccatattaaacaacttattatttattttagtaataacataccattgataaaatttaggatacttttgaaaagttatattgcaattaaatttggatgtaattaaagataatcactcttttgagtctttatttcactatggttgactctgagatttgataacccttcaaaaatataatattattagcttttatcactagaaaatatgtatatttctaaaaggaaaaaaaagtttgcagtacaactattgatttggtagatgcagtagagggcctagacatggtgattcaaaattctaatggtgatgtacttgcttctgtcgcttggaaggttcctggcattattgtccataaattgcagaggttcttgcaattcaaaataccatatctcaatgcattactctcgacctcaacattattcaactcaacaccgattgtcaaagtttagttcaaaaacttaataattcattagctttagattcttctttaggcttaattcttgaagatgttagaattttatgttctcgtttcaatgttgtgagttttaattattgttctagaactgttaatgtagaagctgattatttagttaagtttgctttaacagctactgcaagcacaatctggtgacctagttatccttcttgtatttgaaattgttgatgccatttttaatgaattcccctacctctcggcccctttgagctcgttgctcttgggtgatattttctgagactattttctcataaaaaagaaagaaagaaaaaaaaatatcttacatctccttggttgggcgagctttgggcgcagacctagtctgccttaggtcagggttaaccctaactatgtaattatatggtaatcatgtaattggaggtaatttaaggatctgaaactctaatgataattggatgtaattacactatataattactaaaaaaaatcattttaaatattaattattaaacaatattatttctagtgtaattattaactattttgtcaatcaagacaatagaaattcatacgtaataaccacctcacattcaaacacgttatattttaggaaaaatatatattacaacctctataaagtaattttggtacacccttaatttgtttggtatccatgagagattttttgtctattatttttataatcatgtacgtttgtagttatttaagattatttgtaaatttttaaatgattttaaatagtttatattattaaaaataaaatttcaaataattatttattatatatatataaaaaaaaatagtacagtaaaatatttgaacttttgacattataaattatttaaaatttttaaaaaatttatatgtaagtctaaataattacaagttaaacaatggggttaaaagtttgttagatgttgaaaagtgcattaaaataactttttagataggtgtactatttcttattaaaaaaaaaagagaaaagtataatatataattaccctatattttaaaatataataacataataataattacataagctaattccaaaaaagcacttaattcatacaaaaggagtggaaaatatttgaaaaaaaatgtaaagggtataatgggaaatataagtgtaaatagagaattgctaaaagacactagtagtgcctagcaccctcctacatgtcaatattgctattagttcgattaagtatcgattctcatataatttaagtggcgtttggttgagagaaataaaaatataagaatggaaatgagaatggaaaaatgaatggaatagaataaaatttaaagtgcataaaaaaattgatattaaaattattaaatttttttctcttgtcacattagaacggtgttcccttctattttaaaatgaaatagtcattccaccaaaatgataaaaagaccattctattagaatgatattttaatactttaaaa

SEQ ID NO: 113612 - DNA, 1717 bp, Cannabis sativa
aaaagcttccatataaatagaagcatcgacctttaggtgaacttccatggcggaggaaaccaagttcagtgtcctctgcagtctcttcaactggatgctcaggagcaaaacatctgctaagaagcgttccaagtttcggaaatttcttgataacttctgcaaacccgccgattacttcagcgctgtacgactcatcctccccaatctggaccgcgagcgtggctcctatggcctcaaggagtctgttctagccacttccctcatcgacgctctcggcatggctagggactcccctgacgctcttcgcctcatcaattggcgcaaaggtggcgcaaagactggtgccaatgctggaaactttgcccttgttgccgtagaagtcagtttttctttgtccctaacttttccaacatatatttatattttctcctcggctttattttttattttataaaggaatgatttttattgaaaaatattggtagaacatcgtgtctacgagctaactcctacataatgatgatctcttctttctttggaaacaaaaattattcctctttgtttctgggtataaaacccctttttaacattttcacatgagttttttttttttttttttttcattggtagttccattttgtgttgttacttttaattatcgtttgcctttgccatataaagaactttttctgcaatgttatttgtgacataggtactagaacgtaggcaaggaatgacgtctggtggactaacaatcagagagttaaatgagttgcttgatcgtttggcttcatgtgaaaacaggcatgtttgaggggattctattctaattgttttttgtatttttcagtatgtgtattccaattgtttaaaatggtttagaaaatttggatgttagagtaatagtaagcaaaccctttctattattcactaatacttaatatctgtttttttttcgttatgcggatttgcttttccaatattatttgtttcttttccaatttgttttaagcatcaaatttggttctctctacatatacgggtttctctagatggttcgcattgttatattggtgttcttagttttcaacattaaaaaaaatgctgtatttttttggaagttacctcattgaattgaagtatgttatgaacaaattataatatctccgggcgttgatttattaattctttgcatcatacttactgtatttcttttttcttgggcattcactactttattttattatttttaatataacattacaatgagagcaggtctgagaagatttcagttcttgctatgttgattaagaagacaaatgcacaagaaatgaagtggatcatcatgatcattttaaaaggtgccacctttaacatttgtaaattttattttcatgttacttttcttaactaacttgcatattactaatgtagatttgaagttaggaatcagtgaaaaaagtatatttcatgaattccatccagatgcagaggacttgtttaatgtcacctgtgacttgaaattggtttgtgaaaagcttagtgaccgaagtcaacggcataagcggcaggtgcagtacaatataaatatattataacttttaaatgtatccattaatttttaaaaatatttaggacctctgctagtatgagggagatgattataaactaattggctgagggctcgtttggaacgccgtactaggtcgtattgtat

SEQ ID NO: 113613 - DNA, 1402 bp, Cannabis sativa
  modified_base (32)..(63): a, c, t, g, unknown or other
tttagaaagttcttatttaggatgttaataannnnnnnnnnnnnnnnnnnnnnnnnnnnnnnnaaataatttccaacagttatttccctaattccagtgttcttgaggctgttcctggtcacagaccttctttttcttggagaagcattttgtggggctgtgagttgctcaaacagggtcttatttggaaggtgggtaatggtatgagtattcatacaattgaggatcattggcttcctggttgtcgttttaagtcccattccacttccacccctcccaattagtctctttctttctttctttccccttttggagattgggataggggtaacctgaaaattttttttgactgtacacttgtggaagagatattacaggttccaatttctggccacaattgcaatgatactctgatctggggcctggacccgacagggctttttacagtaaaaactgcttaccatctagcccttcagtctcgggatatgcctaggtcctcctcttttgtttccaacaaatcttttttggtccaaaatttgggcctcggtggcccctcctaaaattaagcatcttatttggcgtgctatttctcattctcttcctgtggcctcttctttgttttttagacacatcattcctactcctctttgcccggtttgccagttacaatcggagactgtggaacatgctatccttgggtgtaatcatgcttggaaagcttggaaacattcaaaatttcttaatttttataataaccataaggatagtactttttgcttgtttttggccagtgctctagactattatactaagtttgattaggctttgttgttttgttttatttggtcgatttggaatcagaggaataacttatttcataagaagacaggcctctcttcgtaccaactttttgattatgctgctaagtatttacatgaatatattcatgcccatgctaagcagttgttgttgtctcctcctgcaaagcatcagaatcagagagaggtgcagcttcctactgggcagtagatagtctatacagatgcagcagtagatttgggccacatgaaacacagttatggagttgtggctattgattgtgtaggctgttccagagctgggtttatggctccatgttctggtgtagtttcccctgaggtggcagaaggcaaagcaatccttgtagctcttaagttgattcaagcgattcaactccctgttttgactattgcctcagattacaaaagtgtggttgataaaatttataattcttattgtaataattcttgaaaaaccgtgtttttgcaaaatgtcagttatatataagaaaatataaaactgtaagcgtttgcagaagcagaaagtaattctgctacactaaaacaaaacaggcagaatataa

SEQ ID NO: 113614 - DNA, 1675 bp, Cannabis sativa
ccactgcctacagtgttttggtactatcaactgccaggaacagtgaagactgctgtacctttttgtactctaactaacacaaacagtactattttgtacttttttcatacctaactattttttaattaaaaaaataaactcacaaccggtaaccacacctacaacaaccggttaccaccaaaatttcaaaaattaaaaaatatttaaaagtacggtggaacccacctgccgtacaacagattccaatccgtgttttgtaaatatgggcacaaaatcggctgcctataataatattaagattgagaacaatgtgagatgataatgatgaagaattgagtttggtggtggtgccattggtagaagtctagctaccttggtcaaactttgttggaacttgtagaaagattcacaataaatatatactgtagacgatcattattaatatagttgcataatcgatacacatacgtaaatataaaacgtaaatataaagttcactacatatctctcttccctatttgtttatttttgagattaatggtgaatgatagtagaaaggtaatgaaaaaaatagctaggtagggtttgaataggtgtggtgaattaatgcatatataatggagttagcttattttattatgtagtaagaagacttagttgagttgtctacttttatttttgtcaggatttttagacagtgagtaagatgactcaattcaatgcatttttattcagttggtgagactagtaataactctctctctctctagatctgcatgtatctcaacaactggcaaaaaggcaacaacaagtgttttggattagattatcttgttacttatgtttggtattctctttgaatataaaaatagtgttttgtaaaaataaatttttattagcaaaataattttataataaaaaaataataaaaataattatgaattacactatgcagctataaacaactattatagttgcaaaataattataaatggtgcaactatcataattgcatagagtaaatttagtgagattattttataaatttttgtatttaaaatagttagtttgccaaatttatattaatacactaagagtaggttaaaatagtcctatctatttatttaaaaaaataaataattttttaacatagtatatatattatattttaattatatataaagaataattatcattttttatattaaataataatataatagataataaatattaggtctatcataaattttattgaaatattatttttttagttttttttaaaaagtacagctaaaatttgaaagaaaaacaatagttaaagtgagcatttaaaatgctttatgtattccaatagcgaatagtacgaattgataaaggttgatgggtagatataagacaaagtactatgatcatgatcatgtacggaagcttacatcatccaaacagttccctatacacaataatattaagtgcttctcacagtgaaaggaatagttatcagaattaattaatattgccaactgtacttctctctatttatggaaattacagaagtaccccttaagaactcacacactctctctccgttgataattactataaggactctctcaagtctcagcttatataaatttaaaaacaaaataataaagaaaaaaaacaaaaaaaaaaa

SEQ ID NO: 113615 - DNA, 2455 bp, Cannabis sativa
aagaaagaaactgtattgactattaaagtgatctaaatttcattggatgctaaaaattgttacagcaaagaaattttaatgaccaagttgggtaaataaggtgaaggaagaaaagaaagaaagaattttatataaaaaaagataaaacagaatgttgtaatcaagtgtaaggtaagtagtaactgttaccaatcaccaccattgatgaacaagaaccccacttcgtcttagctctgtaaacagttccaagcattgaccatatgttttctcatatttttcactcctctgaccaggacaacacctctgccatctattgtaatggcattccaagaaaatctcatcaatcaaacaaattgccccagtttcaaataacctcgggataagatcgaattcagtcccttcaacatccattttcatcacaacgaaatctttctctgtaacagtgttcttcaaccagttagcaaaatcaaacccctgaatcttatccacttctccatcatatctacccatggtattcacctgctgaattttacccttcacaggctgaatcctacccattcctctgcctttatcagtgactttatcacccgcgtctcgattgatttcgaatgacaatgtttcattcttaacccaagctgcataaggcaacaaagttacagcctttttcttcttatactcttcatgaaatgttttatcagcttcaatagcataaacttcaaaagtcttgttctgtttaggatactgttttctaaaccaactaccaatactagaaccatagctccttgctccaacatcaacataaacatatctactcttaaagcttatatcagccattgatggcagatacttaacattctgtatgttccttttcaaagtaagccatggctttaagggttcttccataatcaatggctcagctttcctaaccaaatcttgtttgtacccaggaactaaacacttatcaccattctcataatgggagtttttcttaatcccatggctaagaaaaacacattcttttttcaaaatcatttcacgtataaaaggcatggaagaatcataaccatctatatcacgtattgttaataaattgcagcaattgaataaagcaagaaatgaattgaaactatacgtatcttttgccccaatatgaacaacagcatacccttcgggtttcagtgtccgtacgatctctgaagcaaaatccaacggccgtggagatttctccagccgaccgccgcctgagaagacgaaatcaaatgtgttatcaccgaacggaatccgatgcgcttctccatttataaccaacggcttcgatgctttcttaaaaatccctacggaatccgatacgccgatctccttcaaagcaaacacgtcttgccccttcggggtttcaacgcaaagagacttcgattccggcgaaaggtaaccgtgagaaatcagatcttcaaaaacagaagagtagaaattcgcagccttaatccaatccttactcgtatacaagtcacgtcggagaacggatcccgtcgccgccgcagtagtcgacggaacagaaccggcgtcgctcgagaatatagcagaagaaccaacgccggtgccggacataacaaagttcaaattctccggcaaagagaagaaacagaagtctccgacgttacaagactcgccggtaacggtaacgacgtaagcaaaacgaacaccgattactaaaaccccaaacaaaagcaatctcaccagaaagttcttcaacaaattaggttttccactctccataactattaacccaaacaataaaaaattcacagaaaccaaatcaaaagaagaagggattgatggtttgaatttagcgagaacagaaacgagcagaggtgtggttagctccgatcaaggatggtctgtgggagagagaagggcaaatatggaaatgttgaagaaattgaggggcaaaacgggaaagcatggtgaaaaataatttgtactaaaaagccattagaagtaagtgagtgtttgtttggattggatttttttagagaagagaattagggaaggaagaagaaggtgaagcgttatatatgaagagtgaccaaacgcggtccccggaggagtgaggtgaccttttaccggaagaaccggttccacgcggatagaagaaaatagagtcagatagcgaaacaaacacgtatttggattttggggatttttggaaataaaaaaaagtacacacaatttagtccatatttgtttgaccaccaccggatatagtaaattttattattggaaagttttattggacgtctaatttatttcttctatttttgttaagtaaaagaaaaatatttttttgataaaaaaaattaaaaataaaatgattattaattgttttatttattgaaattatttcacaaatacacaaaaataataaaaaaaaaaaattacaaaaatacggtttcataga

SEQ ID NO: 113616 - DNA, 7519 bp, Cannabis sativa
  modified_base (827)..(837): a, c, t, g, unknown or other
  modified_base (2880)..(2881): a, c, t, g, unknown or other
  modified_base (3198)..(3204): a, c, t, g, unknown or other
  modified_base (4651)..(4657): a, c, t, g, unknown or other
ggcagcaaagaagcatggtaatcttgatctggtagatattacttcggactggaactattccttcggttcttcttctcctctgccttctctgtcgtctgttttattctgtattaatctttatgattttgtaccttttaatgaattttggttcttttaaaaaaaatctataaataagatattactttttcttctcaactattttgataaaaactttaaaaggaaatatatatgtataattttttttatgagaaaaaagaaaagaaaataatttataacaaataattgagtgctttaatttttgtagcatttcattattattgttgcaatgtcggtagacagatagatataatatactatatatatatatatatattatatatatattttgaaatatattttaagaacattaatgctaacaagtaatcactatacaccaattctattttctctaattacaattattttcttaaagtagtatattccattcctcaaaaaagtatattctaagtgtattgtcacgtttttcaccaactacaatatttatgagaattgaccagaatattattgtaatatattattattattagtgtaatttaatattaaattttatatattaatataatatacaatattaaaaattattagtgacaagaataataaaataatttttttgcatacaattgtatgatacttctaataattaatgacaacaaagaaattgcatacagagtcggctctaggcataggtgggttagactcgtgcttaaagcccactcattttagaagctcaaataaaaatatattttttaaaaaatatacatattttnnnnnnnnnnnttaaaaataccatttatctttataataaaggcccaacaaattatttttttacttatagctcatttcaactcaagacggatcctacatgcataatgaataattgtctttttttttttttttgaaagcataatgagtaaatgtcaatctctattatttttaacttcattcaatttttgttgcattataaagacaaatttcaaattcaatcattactctcataatagataaaaattaatcaattacaagctatgagaccttctttaaataaaaaataaaaaacatccattttaaatttaggcaatactaaccctatttcaattccacccttaacatctctactctcactcaatgaaatcgcttttgtactatcaatctcaatctcttcaatttttttcggtttacccaacccgaaatccctctcataaagatccaccttaggagacccgcaaaccatcacatgggtatccgacccgatcatttctgcccattccgatatccaattttcagctccaattaaaaattctttgtctaacctaattacagtgttcttaattgcgttagctccaataattaatccatattctcccaacaactcacccctcgttgcctttgctcgcccgaacccgacacaattgcccaaatacgagccaggaaccgaatgctcgaatcgggtcaacccgcccgcaacaaacccgaaataatttggatcctcatcatcataagccaattgacttactctttcttgggtttttagcacacatacccataaaaatgcgcacgtgacaatataaggagacaaaaaatctagtgcaagtgaatgttgttgtttaagattaagaacactaattctagttctaatcttgtccacgtcaccaaatccaagtacaaaagttgtacggacaagtgtattattatcattgttaacaagctttgatgatgatgtcaatagggctgttcttttccaccactcattcaagaagacaccctctaatccacgtgtatcaacaacaaccgtccgatcacaaatgggcagagatgaagggtcaggatgataacttcggtcaacacaaaacgttgaccaaagcttcatgaaattattgaacgttctagaatctcccacaacatggttcaaagcgagtcccaaacaaaaccctgagttgggaaacacagtgactcggacagccaacagaggaacaacaacactcgcaccggcggcgcgtgaggcgcgtggcttcagctcgggagcgagttctttaatctcggccgcaccccttttggtgtggattccggtgagtcgggcgaagtcggagtcggaaacgacgacggagaaatcgacggcgtcgtggggtccggcgacgatgtggggtttggttggaggttgggttgggaggaagagtgagccggcgaaggggcggaagtggcggagcgtgagagcgagtgagagcttgaggtttgggagaagtgtggaaatgaagtgagtgagtggaaagggatgattgtagaagaagagaggttgggttggtgggaagaacagccatggaaggtctagaaaggttagagctttttgggttgaagatgagggtggtccggcgggagtgattgaacattcttcttcaatcattttattggttaccattttctctcttctttttctttctcttctttattcttaactctcatatcaatgtgtatttatatatagatatattagatattatattatgaggaattttatttgcactaggggtgtttgcggtgcgggtgatgcggtttttgataatttttttaaactaatttgtacataccgtttttctaatttttcaaaccgcacacgcaccgcgaaactaaaaaggtttttgcggtttagactattaccaataaataaactatcacaaatacaacaaaacttagagcaacacttctcaaaaattctataagacttcaaaataaacatgaaaaaaaaaaattagtttcaataatacaatgattagtgggctttggatttgacattcacatgtgggacctaaataaatataaaaattnntatttttataatgtgcggtgtggtttgaactgcatattaataattcaaaatcgcaaaccgtaccgcaccgctcggtttagtaaaaattcaaaccgtgaccgcactgcaaaaaaatttaaattgcatttttttgcagagtggtgcggtgcgggcggtttgagcgatttgataaatactcctaatttgcacctcataaaattataaatacaccctattattaaaaaaatataaacttaaaaaaatttaaaaactactcttcatattttctaaaaatttgttcttcacattattttttgttaatttcaatacttattttnnnnnnnttttcataattttttctaactcgtgtatgtattttttttatttttatttttaaagaaaatttcatataatttttcattttaatttttttattataatatttaaaatataatttaattttgtttgataattatattttttaagaatataaattgaaagaaaaaagtttaaaaaacttagtatagttaaaaatataaattttatataaaataaaaattattaaaatgaggtgtctttaattagaaatataaataaaatttcccttatattattttaccatatgccttttttatgccataaatatttaaatttaattttttaataataataatatttaagttatatttaagtagtggtcattaattattcattttgccaatttttattcggtatttaaattaatatttaataaaaatttaatgacttagatcaattagagactattacgtcacaatttacttgatacttaacggttcggtacttatagaaattttagaattataacataagtattattaccgtcaaatattcaatttaagtattttttttattaccagagctaggtatttatagtgtaaattactcaataaatatatattatatattatgaagagcaatttgcgacgtaaatacctaatactttatatttttaaaacttttataggtattggcaaataaatatctacttgtcgttttcttattgttatatttaaatgaattttataaataaaaaataaaaatttaatgacctagacctattagagagtgtcattttgctattgatttgatatttaacggtgaggtatctatggaaattttagaaatataatttaggtattattactattaaaaaaataataaacttaggtatttagttataactgtgagttaaacttggttatttacgctgtaaattattctattataatgtattgttatgttcttagaaatttgtgtagtacaactctcaaaggggtgttttggtagacggtattcataagaattttttcgtttttttttttgcgtatgttaatagttatttaggattatttataaattattagaaaattcaaattagtttataatgttaaaaataagatttaaaaagttacttagtggttccacacttctcctcccaaagaggatgtcccaagttcgaatccatcctcccctaataaaaagaaaagttacttaccatccatgtaagaaataaaagccgagcatgcaatacaatatttaaatcttatttttggcattagaaactactcatattttttttaaaaaaaattacaggtaatcttaaataattataacatacacgatcataaaaaaagtagggggtctaccaaatcacaactttagtgggtgttagggtcggccctgagctaagacgaagaaaaaattaaaatatagttagtaataaaataaataataatacttttaatgctnnnnnnntgttgtagcctagtggtaatttaattagtttaataaacaataggttgagagttcaaaccccaatagcaatcactttttcattgggccccaatttttatttttgacttaggccaaaattaacatagggccgaccgtgatgggtatactcatagttgtaaataagtgcaggtcatgctaacccaacatatattttttgtgtttcttaaaatatggatcgtatcgttctgagctataaaaaaaaggattctgtcctaccgtgccttgaaaaaataggtcatgtcgtgctgtgcaataattttatagatttggccagcacggtccgcaaattcgatactttcgtgtcgtgtttagttcgtgtcgtgctttattcaagttgatccaattttcttaaatagaccaacatgtttttctatacgagcacaaattcgtgctccatcatttattacaattaataagctaaatactaaaaaatataattatacttattataattttaatattactattattttaatagataaataaatgtatttcattgttattgctactagattattcagcttctaatgtgtgatatttttgagctaatttatttgtacttacatgttgtgttttcgagtttattataccgtgctatatctaagcccatatattttcatgccatattctaactaaacctatatttttttcatattgtgtcaaatagtgtcacctatatttaggtcactattacagacctacccatattcttttaataatttgaataaattgctgacaatataagataaaataattcatttataaaaaagagaaaaagaaaccaacattattggcctgcatctatctacttctaccacgtttataatgctatctcttacattttcacaggttccacattatcatgatgtcctcaaattaacttattttattattttttaacaaaaaaaaatattatttaagagcctttataattagaatattttataataattattaaattaaattatataaagtaaatcagattgtaaaacattgagtagcgagcactacaaaaataatatagtccattatgcaaactccttaaaagttagtcatactgtcgtagtgggtggttagcttaaacacaatttattatttattctataattttgtttattttcaaagaaaatatttggctctcttgtggaagtgggttattaatgttaaatataaaagcttaaattatcaattgcatgttagttttggtcaagtggaatatatttatagataagcctataattgatataatagaaatggttcaagtgtaatttcattatacatatttggtaggatttaggttcattgttgtttactaaattgcatattgaaattatttttaggtgatatggtcttagtaagggatagtgactttaagaaggttataaagtagagtgttataatttagtaaacttaggtatttatgacgcacataataatcaagtagtaatggtacatatatacagggtattcatatatgttataaattattttgaaatgaaatatttgtattattggttggtaccaaaatagttgaggaaattatttagtatacccacttttctttacttgttttaatttttacctctattttcatattctttaatatatacccacttttatagataatattcccattagaccccttaggttaatataaattatatgctagacttaagtaaagagtgagggtatattgggtaacccactcaaaaaatcgggtatataaaatataatatgagagtattttttattaatggatacaaaaagatgtatttttcaacttaatagtttggtatctttcttaaaagaaaaagaatatgtgcaaataaatttagagaattttcaaagtactatttttttttaaaatattttatttataattttacaacctaaaattttgtatttaaaaaaatacatttgtaaagtttttaaaattatataaatacacttttctcagcaaaaagtaagaaaataactaaatatggcgagaaatcaacctcgtgacaactataaataaactataaaacaaatagaaaaataatcttatgaaaactataatacaactataaataaactatcaaataacaaaaaaagaaatttactatttttactgaagaagtatttttgtaaataaaaggttcacatcgtaaaaattttaaaaattccatgttagtgttttcttgtaattttttctaaattttttagtttattatgtaatatgctcaataaatttttaggcatcaatgccaactacaaagatacaaaattgtttttatccctcttctacctcttctcatttgtgtctacacaatccctttttgggccattatgcattacagatactcttaaaatgttttttttttttaaaatactatatctaataatataataatgtttttttaaatggtaaatttaattttgtgtacatatcattatttaattaaaatttacatcaatttcaattttggggtatttatgaaatcttttttataaaattgggccaatgtgtggatcttgggcctaggcccattcgtccccctccccacgcagccctcagttctatccaaaacaaatatacaattcaacatcaatattttattattatttttttggataattacataagacactattttttatcaaaaaattatatttttacatttaaagaattttttttacatttttacactttccatagaaaaacaacgaaaactacataaaagtaacgtgagaatgacatttaaataacatcgaaataacaacaaaaaataacatgcagataacaaaaaatcaacaacaaattaacaagaatacaacataaaa

SEQ ID NO: 113617 - DNA, 3507 bp, Cannabis sativa
aaatttgtcctcagtaatgctcatttttcttgtagtgtttattcactttgtcaaaaaaaaaaaaaaaagtaatttttggataattaaattagtctggacgacataccaaggatcgtactacccatctaaatcttaaaatgttcttcacattttacctagaagaatgtcacgtcactctgtacggaaattgagataatagtgaggtttatattaattggggaacccccgatgattttaaactgtttgaatgctctttaaaaccccgtttcttttttttggcttctaattctttttaaatcattaggaaaattacacgagtgtttaaaattatcgcgaataatctactatatttgatggtattaacactcacttaattttattaacaacaatcaccagaaatacgttttaaaaatggacggaaatagttatttttgtaatagtgtatcatcttctttctttaatttgttccctaccaaaatgattttgggtgcaaattcaggttcatgtatataagacaagcgttgacaaaaaggatatatacaaaatcgttaaacatatcccaatgaatgctaggaagacatgcaacaaccaacagtacttgaataaaaattatatattatattatattatatttttccattccatacaattaattggcccactcttatttctgaagattgccattaattcaccactaataacaactatgtatatattcaacacactactccaattggcctgataaaataaatatttaatcaactcatatatatgcacgttatatatatctttctccttgtatatataattcaccaaactcacacaaattaaaacacacagccaaacttttctcaatatctctcattaattatggctaataatattaataataacttgataataatgtacttctcttggtttctcgtttctctcctaattacctcttcaactttctcactggctctctcccgagacaacatgtgcaaatccaccagatttccttcttattgcaacacaatgctcccaaatcgagacaccgatgtccacaatttcggcagattttcggttctaaaatctttgtcacagtctcaaaagttactcaactgggtggagactcgcctcaaccaccgtaactcagctgatctgtcagaaccatccttgatccggctcttggaggattgccgtgagctgctctcgtcaaacattgacttgttaacgaactccattattcgaaaagtcaacaggaccagtaacgttcttccgacctcggaagctgaagaactccaaacctcgttgagtactgtcttgaccaacctccaaacatgctcagatgaactcgagtccacaccatcggcttcttcgctcaagaacgacatctcggagatgatatcaaacgacactaagttgcacagcctatctctctccctctgcacccagggttgggttcccatagatatggacacgacgcctttttggtccaggcgacacgccgttaggagaagtggcggaaggattcctatgaagatgtcgggccttaacagggctaggttggatgaggcttttaaacatccgaggcggtccaggcagctgccgcctagtccacctaggaggaggacgatgaggaaggttcttcaggctggggaggatgaggaggttacgataaaggacgtggtggtggttagccaggacgggagttggaatttcaccaccattaacgatgccattgctgctgcaccaaataactctgctgcttcgggcgggtacttcttaatatacgtgacatccggggtttatgaagagtacataacgattgcgagtaacaagaagtatcttttcttgcttggagatggcattaaccagacaattataaccgggaaccacagtgtggttgatggttggactaccttcaactctgcaactcttggtacgtaattctctcttatatatatccactacttaattattctactgtaacatgatattttaatttatttaataaataattaataaccataacttcatgaaagtattcaaccttaaataacaataatctttattcttattatatgatcggaatgtaacatattcaaccagcatcgttaaaggccatctaattaaaagtgtccattatcacttattatgtctacttactattaatattggatcacatatatttaatttaaaatacaatatatataaatatatatatatattttttttgaataacaattttattgctcaaaccaaactttacatcacattaaattaaattaatattctatagtattcaatataattttttgataaatataaatattatatagtattcaatattaaattaattaagattgcaacaagcacatctactaaaatttcgatggtaaattctatatattttatataaatttagacaatgatggatctgacgatgctatataattgaactgatctattttgtatatataccttaaattgcagctgttactgcggtaggcttcattgcagctgatttgacgatccgaaacacagcaggaccgagcaaacatcaggcagtggcgctccgaagcggcgcagatctttccacattctaccgctgtagctttgaagcttatcaggacactttatacactcattcccaaagacaattctacagagaatgcgacatttacggaaccgtagactttatatttggcaacgcagccgtcgtacttcagaactgcaacatattcccaaggcttcctaataagggccagttcaatgccataaccgcgcaaggccgaatcgaccccaaccagaacacaggaacttccatccaaaactgcaccattagtcccactgctgacttggctgctgccaacgccgcagctgcagccgggaatggatcgttcacaaagacttacctgggaaggccgtggaaggaatattctcgaactgttttcatgcagtccttcatcgatggctttcttgatcccgctggctggcgtgagtggagtggtgatttcgcattgagtactctgtattatgcagagtatggtaactcgggtcctgggtcgaatacatccaaacgagtcaattggacgggttatcacctcatcaacgccaccgacgccgctaatttcacggtctccacttttttgctgggtgatgtttggttacctcaaacgggtgtgccttatagcgggggtttaatatgaagcttattattatatttttcataaattaaatattataacaagtgttaattaatatttactataaattaattagtgtcgttttatatgtattaattaatgtttccattagtagaagtatatgtcactactagaaattttgttattattagaagccgaaaaaattaccggcaggctgtgtccgccactaattgttgggttattactgataggggtgttcatccgatccaatccgcactttttttgtcaaacaacatccaatccgcactaagtgcggatttcatattttggatccaatccgatccgcataagagtt

SEQ ID NO: 113618 - DNA, 1103 bp, Cannabis sativa
accaataggctgaggtgactaagctttcatgtatctcttcagttttgtgtaaatttttgaacaattgtcttctctatgtaagcctacgggtataatgaaatgaaaatagaagaagtttacacttaaaattcacaatttttgttcttaagccacaagctatgttttaaataagagaccaggaattcagagacgtccaaacatctcagctcacttgagtgtgctatatctagctgtgtatgcccccataaaacgtacagtgtgctatgtttatttactttatttatccatgtcaatttttttattttaacttatattcaacccaaaaatgtgatgtgttttcaaaaaaatttcccaagggaatgactcaattgaattccttctcaagattaaaaaaaattagtgcaagccttgaaatgagatgcattttcaaccaaatttcccaagcggaaaaccttgcctgaatccctcctcaaaatttcaatgtgtttcctaaagtttcatctgttggatgttttgcaaggaacgaacaggggccatacctgaactcctatgcacttttatccctaccctgagcaaatggtaccgccttaaatccatagcgtttgcagcttgctacccaatttatgtgtgggtctagtggcaaaaaactctgtttaatgaagtctttgcaaggaaagttcgcataagtattacaataattttagcccaatccctgaataagggacaacgccaaaatctgtaatatcctcagccacctttcccaaagcccaacttcgtgaagagttatgataaaggaacgcttggaatgtagaagctctcccatccacgagaaaaccatcccttaccagtatcattcatgcagtactccgtttagtttgttaagtactcaaggcactcaaaaggtgctaaagcttcgcgaccactcgacattctggtagcaagttaatagcccattcgcatttccaaagcatttaactgactcaaatttgaaactacctaaagggttttaacgagacaaatcatacctgaagataggaaacaattgttgttggaaatattttaccaagatctagatttactaagaagtatgtttcattaacatc

SEQ ID NO: 113619 - DNA, 2148 bp, Cannabis sativa
tcattttcaaaaaaaaaaaaatgtcctatataataaattgagattattatagataatataggcaaataggtaaataaattaataaaataaaataataattaaattattattattattaatttatttataggttttaattgatataaacgaggtttggggtgggtgacaagattaaaaatggcaggagatgaaaccagaaattgatccctacaaaccctaccaatatatatatagcttataattaataattattagccacaaaaacttaggttttttaataattaattaattaattaattaattagggttttgcagtttccaaggatgatcaattgagtcacctaggcttcactatgggactttaattttagttttatatatttattataaaaaataacattagttataatcctttaatttataatatgttttttataatatttattttacatattttaaaatttaaaattatatatgtatgttatattttgactaaatttttttatatataaacaaatgtatacctaaagagtattaaaacataatattaagctagtatttccataaaacacatataaattactaataaataagtatttattcttctttaattaaaattcgttcgatcgagcataattttttttttaattcgagtctcacttatcaatctcaaaataaatttaaattaatccgataaagaataatgcaatcatatggtataatttattaattttcattaattattttaacacttgagggtaagaaaaatgattataattaactacctatagcttcatttttaaatgatatttttctacttgttgagaacattattaggtgtaataatattaatatattttgaatttgaatgatcattttgatacacatatatataaatatattattatatgacaaatattatatactcataataataatgacatcatgtgatgattgtaatatctagtggtggccaggttaatttatatattttttatttttatttaatatataattaataattcataaaactgacagataaagaatatgataatatataataatatataaattctatacaatttgtattgaccactcagtataagctcatactacgaaaaaaccagttatctagattaattaataatgttgcatcaaaaaaaaaaaaaaataatgaaatttaaaaagatataacaatatatataagtctaaattatagggtgttttataggaattttttagtttaagttttttcatgattatatatcataaaaatttagaatttttatttgatgggaacttatttattatttaaatatatttatatttatattataattatttctattagatttatttaattttatagaagtttctctactattttattctatatttattaaattaaaaaaattacatttaattttttaaaatataacatttttattagtggggcttatagccctaacattaatactagcgggtccgtccttgatcatatatattatagttattttagaataattttttagaaaatttttattattttacagtacgaaaaataaaatttttatattttgttgtatgtgcaattattttttcttatacgcatgataaataattgtttaaatcttatttttaaaatttaaaattttctaaaaattcactaataatcttaaataattacaacacacgcgtttataaaaaaaaattagagtaaacatattttttgattgctgaaagaaataagaaatttaaccaaacaactttataaggatctattatataaatttcctatatgatattattaataattaatagtgatagtaaccaaagtttaaatattcaataataatatatatatatataatagcaaattattttattattatctaaaagagccaatatacatataacaaatgtcaataaaacttatacaaccaaatattaattaattgtatatagtgaatctatatacttagttttatttatataaaagtataaatatttattcatatatcaaagttgtgatataatgcacatagaggagttgtcattttcaagactcgagctttgtgctacctacattttcagttaggcccgaccccaatatataaatatatatatatacatttttttatatatata

SEQ ID NO: 113620 - DNA, 975 bp, Cannabis sativa
ataatattcttgaaaggtgttatactaagttttttttttttttttcaattaagagtttcaaaaataatatgaaagagagataaaataaaatattatattcttgaatgatattcatagttttagcgccttcaaaaaaatactgccatcagagatgctctaaggagcttcctatattatcaataaaattttaatcggaataactattatttttttttactattatgtaaaattaatttatatttgacagattcaaagtataaaatattaataaaataatgtaataattaaattagggagaatgacgtagaaacaataataaaagtggctctagatttaacttttcagctattttaattaaaataatagagtattattggagatgctagtaataatataaaatcatttaaaattatactttgagagtaaacataaaggcattatcggtttaacaaataaataaaatatgaatacatttaattactcgaggtcaatttttttacccttattaattgaattattatttattttttgaataagcttatgaaatatcatgaaaaaaataccatattaaagtcaattgattatgtgttatttataatttattttttccaataaaaagtaattatctttttgaatactttgggagtaccataataaagttattacattttgaataaataataacatatgaatttatttaattgttttataaaaatcaatttttttcaacctcattaatttaattaatttttgacatcattatgtcacattattgcattattgataatatggatagaaaattttactgggaacttaattggtgggttacaccaaaagttaaatttttggcctcattagtatgacattatgaaatcttattggaaacttagtgcatgtttagcatcataattaaaaaactgttttttgtttttaaaaacaaaaaactgttttttgaaaacaatttggcttgtttag

SEQ ID NO: 113621 - DNA, 1348 bp, Cannabis sativa
tattttttagtataatttttagtgatgcagttggaattgaaaaaaaaaatgttgaaataataattttttggtgtaaatttaacaccaaatatgagttttaccattgaaaatggccttaacaaacctgcccctcaaagaccaaatctgaacaaattaaaattgacttcagagcagcgatcgtagataattattccaaaattaattatatgaagtaattaacattatggcaagtcccttttgttcacttagggttgcattcacaccaggaccttggaactaactgtagcttgagaaacataaaattttctaacgttttaaaaacattttgattgtccaagaaatgattccaaatcccacttactatgcaataatgggtgttgtacggtggacgatgatgggcaccgtgttgcgatcgcgacagaataatgccgagatcttgtagtgccaccacgactggcggaagctggttcatagtgctgtgagaccaagcatgaatttgttggctaaacataatgcagccaaagcatatactaacaaagccatgaacgattggatcatgacataagaggtttaagggaagcacagcaaaagtcacagcacgagtaagggcatgcacattgtttgcaaattgacgcttagtgatagagcatggcaacatatgatgaccttgaaattctttaacttgttcaccgaagaagggagttgagggtgttccgtaattgtcaatcgcccaatggtaaactccagacaaaagatcagccatcacatacccaaccaaaccagccaaagtaatgacaaacaaattgctcgaatagggtgcaccaataattatcgacttcatgaaagagaccagcacaacggtgcacccagttgcaacccaaattcgatgagaccacgtggacagataagtaggatcaataacaataggggagacaacgttttgtgttacggtagacatcagcaaatgcttataaatttaactaagaaaaaagtttatatatataaatatgtatataatttacacagaggcaatggaacaattgttaattagacatggttcatttagcttaatttatctcttccatttcgatctttagtgttgagctggtgcactttatattctcgaccactcaacaagtacaacaattactacactattaatcaaagcctatcagagtgaatgcagtctgtagagtccttgatctattgcaaaaatctgcctgactatttattatatgaaaagtagggttatttgcggcaaaaccccctaaagtagggaggtttttgcaactaatccccaattctaaaatttttgcggtaaaaatccctaaactcaagttctgttagc

SEQ ID NO: 113622 - DNA, 2281 bp, Cannabis sativa
  modified_base (2207)..(2230): a, c, t, g, unknown or other
aaaaaaaaaaaaaacctaaaataatagctgaaattctaattaaatcaaattcataacagactactcaaaaacaagttgggacacaccaattaagatggtcgattcagatagtatgtgaggagtgcgtgagttgggaaaaaaaggattgattcttatatgtattaaaagaacaagtgtagaaatctgaagtctcaaaatttcactacaaagtatcaataagcggcctcatagagaaatcgttcatataatgatgtctgagaattaatttaaatctctttcattatattttaatgtatacaaactaaactgtttaagctaatctcgcatgaatcatgatatgatcatctatttctattgactataattctcacttcttatgaatatagaacaccaaacaaatatctatgattgtaaatttgtactacctttatcaaatgatagtttaatttttctctgcatgtgttatatatataagcaaacaagacacactatagatcatttggaatctttctaatcaagttcttacatatataattttcttgatcaaatggaaaatttaaggtttccactaacacatatgacttgatcacatgtgtttgcatggtgttgatttgagtttgtagatatgaaaagaagatgttggaatgaacaatgggatggaatatgataagatactctcatcgatatattcaatattcattcatggctatcctatcgaactccaaaagaaaatcccacttccaatggaggaaaattaatgtctctcttcaactcagccatcaaatttttattttatatttttttgacttacaatattgttggacaacctcagcctcagccaatccctttcttttacctcttcttttcactgttcatcaaagtttagatttcattctttctttaattatatattatattaaacgcacattttaatttgaggccagtgaggtttgaggtgtgtgaacagtgatggtgacaacatatatatatatataaatatatatattcattaaatgaaagttataatgttcttgttataaattataatccatagagcataatcttaatatgttaaaaatgaagaagaagctaattaaaaagcatatatacctaaactgctggtcatgcatggatatatatgatgattattgtttctcacttttttttagagaaaacagaaatatccattaggccatattctttacatgaaataattctgatagagtaaaattgtaataccctactagattacagtgttttttaaatactgtacgtgcacatctttactaatcaaagggtttattaaaaaacgtaaataaataaaattttattaaataacttcgctttaataattaaacataatagtttacataatttaggatctcattttaaaagttacaaaatatttaaacttcaaaagttattgtctagcgattagcaaggtgagccaaaactgtcgcgaagactctgaacactccaagtctaaacatcttgataacaatatcttcatccttagctttagactatcactggttcagttctagcctttaccttgatttcgaatgtaagttgtcagtaatcctgagtgaaaactgttgctcgacgatttacagcccctcacaaattactaaagctacagctacaactacaaaattcatctagaaatggtctgaattggaggagaaaacggttggattttccccttgattcttggtggccgactcgaagagagagagaaaaagagttcaccaaattttctaattttctaaataactaaggaaaaagtctcatattattcaacatatacttaaattaaaaggattactactattccaatagcacaatggacaaaaatatgaaaaatataactttatccctaataaaacttaaagtaaccaataaatagtaagggtaacattgtcataacccataaacctcaaactctcggcattctaaatgtataactaaaacgtcctgctatttctaaaatactaaatcaaagaaaggtgactctattggccgaacgtcgcattccactgttatcgggcgtaaaacattaaattcataaaaattcacatatatcataattaattcacctagtattcaaatatatcttcataattgagaaaatatttttctaaggcctatttctgacaataagctttaatttctactaagaggcacataatcacataataataataatnnnnnnnnnnnnnnnnnnnnnnnnaataataatagtagtaataataataatagaaatcaatgttaacttcaaaaa

SEQ ID NO: 113623 - DNA, 2551 bp, Cannabis sativa
tttcattgttttagagatattcatatttaggatgctaatcaacatacttgttagtaaatctagatcctagtaatatattcccaacaattagaagcagagggaacatcgatcactaggaatttaaccattacagatgcgcttgttggagcttttcctattgtgattggtaggcatgtgtgttcaagtagagcaattctttggccacaaaatccataaaccagttacgtgtagggagccaagtcattgagttgaagttctatattctcatatgtttttttaacaaaatatttgaagaggctctattgtcaaccatagttcgagccactattttatttaaaatttgaacatcaacaacaaaaggatcattgtgaagataaattatgtggtcgaagtcttcttcactaaaggatatgactggttttgctattcatggttgttttggctttctttcttctgtgaccagtacttcatctctttgttcatattgtagggtccgagcatacctttttctcactttgttcgagtctctaacaatgtgagggcctcaaagaatcacaaggaagtttctgtccactggtggaggcaataattgattctaattattgtctggatggatggccttctaatcctgggcagtcttggcatacttctacaagttcggatcttttttcctgacgaggaattcaattttgcatttcagattattatgctcgtcaatgtcatgtctgtagtatgcatgaaaacaaaataattcggtggtgtccctcttgcttatgtgtttttttatgggaggagattttttgtacaacaccatggattgggtcattgtaaaaatagtttctatatcctcagttaggatagtggaagcagtaaactttgatgcattctccagaggatactgctcggagttgttgttgaaactacttttcttcccattaccttgctagttgccattatttgaccttttatcaccttgactcgaactattatagttttttgaagtctaactctgctggacggatgtattggctacagtggtgtgtagctgagtgtttttctgcccaattgtgtctacacggtgaactgcttctttgatctttataaatccttctgcttggtctatgaattatctcattgaccctatagtgagtctttcaatatcaatccacaattcccttagaggttcaatacctcctaagatagcggctagcttcccctctttagttaaccctttcacctttgttgcttcagtcatgaatctaataatgtaggctcttaagggctccccttgtatttgtttaacttcgatcagatcttctatgtgagacgagaatttcctaaaagaggataactgtgcatgaaactccgccatgaaggcattccatgaacagaatttacctgaggctaacatgttgtaccactattgggtgacctccactaaggtagttgagaaaattctacaccgtacataaccttttactcccagtaattccataagcatttcaaagtacttaatatgggacagatgatcttcttttcttgtgtatatctttcatgtttgcattttgaacttggcgacagataaaaggagttgatttctggtgagaaaggtgaccctctagactgatcgcgttctaggtccgtgagttttaggttggtcaagctgtaaggctcttaagttgatctatttgggcttgaaccactggatcaacttgacctacctcttgatcgacttgtgtgacttggggaccccttagaacattatcggagacatagttacttacatggactggttggacattgaggggatattttatctgtctcagagtgatttagatcatctgtttaggtagtgtacagtgcccaactagttagagactgattcacccaagggccttcttgtctggctgttatcagtagtgagttagttcagtatatccgtctgaggaagaatgttatgctaatcattccatcccaagtaatgagttggcaaaacctccccgtctaccatgcgtcctataatttgactatgtgaccttggatttgacaacctgtttgcttgagtttgctgagtattttcaactggacattcttttggctagtattgaggtctaggagggatgtagacattggtctttcggttcggatcatgtatgatcagagtgtctgccactaattattatttagttagctaataggcttgcctagtcaacacggtagcctgcctagaatggttgtgttgtggtattttcaacacgcaagtatacgtatcgtttaaacaagtaatagactcacaaatagtgaggtcgatcccatagggattgtagttaagtactttaaaattaaacttttacttctatttggataaataaaattaagaaagaaaattagaataagaaaaatagttaaagtaggaagcaataaagaaaattaacagtaaataaatgttaggacttcgatttcaattgtatctattgattatggcctaatatgattatcttccaattaccaatttctatgcaataaaaggtttactaaggtaatttattgt

SEQ ID NO: 113624 - DNA, 1076 bp, Cannabis sativa
ttggagagcttagcttcgggtgttccaatggtggcatttccgcaatggacagatcaatggacgaatgctaagctcatagaggatttgtggaaaacaggagtgagagtgaagcctaacgaggatggaatcgtcacaagtggagaaatcaaaagatgtttggagttagtaatgggagaaaatgaaaatggagtggaaattgtaaggagtaatgccaagaaatggcaaaattctattaaagaagcaatgaaggaaggtggttcatcggaaaagaactttattaattctatgacaaatgtaatttattgataagtttttctattttgaaaactaaataagaaattgttaatccataaagagtaaattttgaattttgaaataaatagtgtaatcttataaatgttgcactgttacatcgtatgttttgatatttaagaaagttttttagttcaatttactttcataattttgtatattgtagttatttaagagtatttgaaaatttttaaaaaattctgaataatttataatactgaaaataaactttacataattacttatcacatgtaaaagatgatgtggatagagagaagaaatgaaagactttttgtaataaattagagacttggtcaaatttccaaatgtgtttatttaggcttattaatttgattgataaaagatgtccatattatcaatcatgaatctaatatagtattaatagagctgttaaaataagtactgataggaataacaaaatttgataaattaagtgattttgttgttacatttaggatttggatatttattaatagcaacaaataaaacatgtgttacatttaatagtagtagtagattcagtttgctataatatataatttgattgtgacataaatttttcaaatcaatatattagagtggtctcaggattggtgttagatgagaaataaaggaataggtgacaagaaagtggtaattatctaaaaagaaaaaaataaagcccgtgaaaagatggagtcagcccatcaacatatagagtctaatttcattcaattttactgtttcagtgattgtttatgtac

SEQ ID NO: 113625 - DNA, 2308 bp, Cannabis sativa
  modified_base (2265)..(2278): a, c, t, g, unknown or other
tttttaattgtatcacttttaaataatatagaaaaaaaaaattaacataaaatttaatatatatatatatgtatatgaataaaccttcgttgtaaatttgacccttttcaccagcttgagaccgctatggttccacttattacaaataatttatcatatatatagatatgtatcatatatcatatatagttctgtgtacatattattattaatttacatcttataaaatcactaaaaaagttttttttttttttttgaaacgtgaaaaaaggatttagaaaacaataaaataaaagattcacataatgatcatgtcctagccgcagaagtatcatgggcaatagatgcatgcaaattttattttatcatgtgtccttcatcatcacttcttcaccaaaatatcgctattttctttaacatgaatctttattacttttctagtttgtctgattctctcccaaaatttctttaacatgttcttaatcattactaagagaacttactttcagttaattgtcaactaaaccaacctttttctccattcattttaatattatatccatcaacttttttataatattataaaaaaagaagacattttttaaatgtatatttttcttgaaaatattaaataatgatagaactcaagattcgagaaactatgtaactcgaaacttctttttagcttcaacagctaccaaactaggtgatattaattattatatattattatttatgtcaacatttgaaagaatttttcaatctaattatttttatagttatttacgttgtagttatttaagactacattcttcaaaatttaacagatttaaaaaaatttaacacgccgaaaatataattcatatagtttgttacacgttagatatttttattttatacacgtgtgaaatagactgtttgaaccctatttttggcgtgttaatttttttctaaatttctcaaaattttgtaggaagtcctaaataactacaacatagaagactataaaaaaaattgaagtaaattttcctatatgccaaaatagatgcatcggtgaaccccttctagggagtgcattgtagaatttttctatattatatacttttatatgcaatataaagtatctaatgaaaattattattttaattttgcagttcagtgtcatcacaaaattttagagactggtcatttgatagagatcctcgagtgatgattggtgatgacacttaactgcaaaatttgcgagctgctttagggaacatgcaagagcacaccaacactcttcatcatgatcaggaagatacctgagtagtcgttaatttttcctttgagcagcaaaaatgccaactccaagagtggatggataaacagatgaagattatgagggcacaacaagaagcaatcaacaatcattgcaggccactgtgcttattaggtgactgataatctagttatacgagatctaaatagacatctatatcctcaacggatcacagtaggggccggatgaatgtttgactagtaacactcattagacccaaggtaacggatcgtccaatccaaggtgaaagagtcaaattgtgggccacacagtagacgagcaagtttttccagcctattatattggagggaatggtcagtataacatccgtccatagatggatatatcaaaccaattaattgttgataacaaccggacaaggaggcctcgaggtgaataaatctttaagagattgggcctcgtacacaatttgagagaatctgaatcgcagaaagggacaagacaaacaatgcaaccatgccaatgttcaactgatcaatttggacaactatgtacccattactgttctaagggatccataagtaacacaggtcgatcaataggcaggttaagttgatctagtggtgcaagcccaaataaattagcttaagagccttgtgcaaagcctgaccggcccaaaacttgaccagggggttacccttttcaccataaattaacgcaattgatctactacccaagttcaaaatgccaacatggaaaatatacaaaggcaaggaagatcctatgtctcacatcaagtactttgaaatgcaaatagattttgcaggcagtgaagggtgatgtacggtgtataatttttccagctaccttggcggaggctgcccagtagttgtacttcatgttagctccaggaaaatattgggaatcactatatgtttacatgttttcatgttagtggtttaatatacaatttttgttaaatnnnnnnnnnnnnnntattcacaattacagtgatgtcaagacagt

SEQ ID NO: 113626 - DNA, 744 bp, Cannabis sativa
catatcatatataaaaaaaaacaataaaaatactttacatattaatatgtgagtatatatgtgagaacaaaggactttttagtaatttacttagttaaggtcctattgtcacttttattatagtaatagataatagataatagataaacgtggttagaggttgttggctcttttttatttttaattgaaaggtgtgttttgcattatattaaacataaacaagacctctactttttcatacaaattgaatttatagtatgtttaataataaacagtattttaaaaatcattcaaaatcatattatttttcaatcacatcacttcatttttttttctacctccacaaacttttctctcaattgttttaattattttatttaaagttttttatttccaaatacattttctactgattatttttctatccctttttctttcttcagtttatcttctttaattttctttaattcatctctcattattttttgactttttttttatattttttttgattataatttctaaaaaagaatgagagattaattaaagaaattaaagaagataaagtaatagaaaattaataaacatttaaaggtttttttaagtacgtttttggtttttaaaattaagaatagaaataattctttttgttattcttttataatttctaaatgtttattaatgttttatcaacggctagcaaacaaaaactaaattattataaatattaataattatgtggat

SEQ ID NO: 113627 - DNA, 3167 bp, Cannabis sativa
aaaataatttccaacacatttttctcagcgaaatttgcgaccaccatcaatcagagaagtgagtgctagtggtgaaattaacaattctatggttatccgtactgaatccttccctgattgtcatgaattaaattcatttctcaaattcttaagggtgaagttacttagatttgatggagctaatgtagatgattggatctataatatcaacacgatttttaatttttattgtgttaatcacgcaatgcgattggtagttattccatttcatttggatggtgcttcttcctttcgatttcaatggatgaaaaagagtgggggaattatagattgggagtcattcctcaaggcattgtagtagcattttggtagttctatctatgataatccatttggacgtatttctaagcttactcaaaccgccagggtcaccgactattgagctgagtttgattccttctaagcctagagttttaggcatggttgaatcgatattttgatttttttttttgggaatgaagcttgatatttggagggcatcattgatgttcaagccaattgacttagtcgatgcaatggccgaagctcaatttgttgaggatcgccatgatgatttgagtaatttaggaagaattgaagggggtcacactacctagtcatctcactctggaggtattagtcgtatttcaatcaatttaccacagtcacctagcaagcaattaacatcacctatggcaagcacaacaaaattctctcctacatgtacttactctttatcaatcaagcaattaatgtccatggatatgaaagaaaagcaagacaaggggctttgttttacatgcgatgaagaattcagttatggacacaagtgtaagaataatgtgttgttgttttatggttatgaggatgtggatgattactctatcaaggaatcaagtttcaagaaggtgaggagattactaaagattagtttagtctcaattcattatctaattcgattaatccactcattttttgaattatggcaaaacccgacaataaaaccttagaagttctgattgatacgggaattaataataactttatacttgagtcatttgcatcaaagttgaatgcacctttggaggaaacaaagtgttttaaggtattcataagaaatcgtaattttcatttatactctaagctttgtaaggtttttgatctactgttgcaaggtcatcagtttgaggttgatttatatgtgttatccttatgtggtctagatgtggtgtttgggatgcaatggctacagacgttgggatcgtgtgttcatgaccataaaactcttactatggatcttacatgaaaaagaagcttggtgaagttgtctggatcaattgattatttactaaataactttcatatatatttagttatgttatccgtgtttttgaataaaagacacgtggcaagaggcagaaggcgacaaactaagtaactaccaattaagtcaatttaattgaagaaagttgcaaaaagactaaacaaactcgggagaggtccaaattcttgttaagctaggagatgcaatcaaaggcaatataccatttgagacccagaagtcctgtcatccctttgggacctggagaaggttgcatcaactatccttgcagggagacacttggaagccttacaaagagtctaaaatggatggcaaatatacatggaaaatcagaggactgtcacaaagctagagtcggatggctcttgtgacagtaatgcttttttcacacaggatcagatcttgtcccatgcgtcagaccatggtagagcgcgtacctcctctgaatacacctttttgtctgaagactcctatgagggttttgtctacaaggtgtagcttccacacgacctgcatccagcaccaacagtggtcccaactgtacgaacccttcacccacgaggaagagccttgttaggggcccaatagtctatattcttttgtattttaccccaatcgtggtgatttttttacaaaaaaccctagacaggtcatgggtatgcccatactcgtactttaacctatataaacccctttataatttcttcacaaggggggatgatataaattacttagctaaagctttgctaaaatactctctaagctttcttcttcttcaagagaaacctaaacaaccagagtttgggtttttattataaacaccacctataatacattttcatgtcatcaaggctagtatattgacttgtggactagggataattaacgcctaaactacgtaaaatccttcatgtcatttacttaacagtcatttaatttttaaagctttcatttaattattttttaaaaatctcagtaaatattttggtgctttcattaaagttaaggaaagatctaagccatggtgttactacaaccacggtggctacacgcaaaatagtaataaagaagaatccttcggaaacctcgacgtagtcatggcagatgtaaacccctctttccagagcatgcccaattgagtaatgtgagagaaggggatgcatctgaaggtgacaacaaaggggaagatccaacttgatgtcacaaacaagtcaaagaagtagtccctaatgaagagaaaaaagaggagggcagtgaaggatacatcaaagatggctacaataaagactggtactttcacgagaaggaaccagatatagttcgagtatccaacgaactgcttgagacccaacagaaattaatgcatcaagaagaggtctctcaaaagatggaaaagataatgggcttcctccacaagaagttcagaaacctagaagaagattctgaagaagacgcttaactagaagaagttgatgaggacaatacgaaaaaccctactaatgtcaaaacctcagctcctataaaggacaaggggaaggaaaaattaggtgagcctccaaacaaaatagattccttacctcctagaaaaggcgtgaatttggccaaccaacccttgcagacacagaaggccattgaaaaaaaatacttaaaccaaacaagtgggtagaaaatttaactacccatgtaagcaaggaaaatatatacaaaatgacaagttcattaaaaatatatttgaatttgcttaaaataagatcatttctgatgatcgcgaggtggaatcaatgat

SEQ ID NO: 113628 - DNA, 2986 bp, Cannabis sativa
  modified_base (2942)..(2961): a, c, t, g, unknown or other
ttttttttttttaaaaaaaagcccaattttaaaattttgtacgaggcctccaaaatgcttgggccgaccctgcctacggggatgggcctcgcggggacccgcccttaatggagcgaagattccacatctaaatgggaaatggagcggggacggggatgacactcctctcccaacgagtacgcatttaatttattacttatctttttattaatatttcaaaatttataatatgtgtattttttttagtatattagtaccatttttatttttttctaagttgtatttttatataattattagtatattaaataacaaataatatgtaatattttaattattatgcaatttaattattttatacattaaattttttaaaataatctttattcttacattaggggcctgccctgcccgtccccacccctttaggggattctttgcctcgtcagccccgatggggaataagtggggatgtaaattaaaatccttaacagggatggaaatgagggcagggggagcactccccgcaaattccccgccctatgtgcatccctattttggggtattggggcctcgtcagttgtcgtttgggtcttgttgcctaactagtgcttgggttcgggtcttgaaatcaaaccttcaaaactcccccaaatgtcggacccaaaacacaaatcttgaaataaccctaaaaaaaaaactcaataaccaagctctgccacctgtatctccaaagaaatcgaaaattttgagctatttagtgaagtcaccgatatggacgacaccaaaaactcacactttttctttttgagtgtgtgaaaattaatgaaggcgatggtgttactcttcgagtagcaactgatgctgctagagttggagctatcgtcaccgctacaactcagagacgaaaagtcagtctggaccagaatcttcaaaatctcacagactacacctggttctatacaattctccaagaggattgcgttttaagaattggggcgtaatttaggccgaagagctaacccatgctggtattctagggaagagatggggtggtggcggtgggctctcgatggttcagagaagaaagaagaagaaaaatatatacatacattttttgtaattttattattttttttctaaattattttaaaataattttaaaataacgtggcctaattaaaatatgctacgtgtacacttgtgtacacatcaacagtacacgttggtatttaatatcaccactttaacaaaagtgtatagcataatagaagtgaagttcgaagggttttactaccaaaaaatcaatttgtgagataaggtgttacaaactgtatagttcaagtagtattgtcccaattatccctaactaatattgcatataaattcaattaattaccctgctgaaaagaaaatcaagctcaaaatagtaaatgatatacatataaaaaagaaaaaaataagcatgggtacaaataattgtttgaagttgaaccatcctaaattattcaaaaaattttaaaaattaggtttggtttctataaccataaggtatccgaaaacatgaacacttttactagtatagagataagtgacactctactataaaatttcccaattaactagaatattacttaatattaagaaattaaaattaattaagtaataataattttacaccagatttaaaaaaaaaaaggaaagaaagaaagagaagcacatactgttattgaagtggagtttttaaattgattcttataattaaatacaacatgtcaaaagatatcgtaatagagctatataaatatatcatgaacatgaatattgtcataactgccgcaacttcatttgcattcctcatttccttattcattttcttcaatgattctgtcaaactcagtaagctcaggattatgctaaaaataagtttttagcctactaaaagactcaagtatttttacctcattaaagttttatgaagctttagaatttacttgaagatggtgaagatggtgatggggacacagggggcttcaagtcttcatacctgttttatatataattgatttcggttagttgaacaaagcacaagacgattacataacaaaatatatatttgctcacattgtgaaaggtgatagtggtcttggctttggtttgacatgatcctgttcttcaatctctgtcttttcttccacaggaagttgcactgagctctgaactggtgtgctgctatccacagccaatggcgttgaggtgatcgttacatttggagcacttggagatggtgatgtgggaggcttcagctcatcatacctgaaaacatagagttcatcaaggcttgcaaaaaatgacttgattaatcacttaatatatactaatttcccaagttaagataaacacattaacacaatcattttaaatcatcatgccaaaaccttcacaatcatattctttatctaagtggtgatgtcatgtgtatggacccctttgaaaactccagaattaaggtagaattaaggttgtgtttggttggaggtaataaaattgaatagaatggaaaataatcaattttcattccattcatttatttggttgcattttaaagtgttggaatgaattttctactattttggtggaatgaccattctatttcgaaatagaagaaaaaatcatattccaaaagatgcaaaagaaaactaatatatatatataaattgagtattttaaattttgttccatttcattcttattcttattccattctcattcctaatcttatgttttcatttcccgcaacctagtggagtttggttggaggtaataaaatggaatggaatggaaaggaaacaattttcattccattcttttgtttggttgcatttaatattattggaataccattccgatagaatgatctttccatcattttggtggaatgnnnnnnnnnnnnnnnnnnnnaaggaaagaccattccaatgcaaga

SEQ ID NO: 113629 - DNA, 5522 bp, Cannabis sativa
atatatatacataagatatatgttgtatacggtccattgggaggaaccattgagaaatggacgactttgacttccaattagctgattacgcgtcgtagagagagattgagatggaatatttgacttccataatatatatgtatgtatatattgtatgagtgtaaatatgtatcgggtcttatatttatatataatttaagaaaaaatagttttttaaaaaatattgtgaaagtgttaaaagcatttccaatagaggtggcccatagagtttttactacatatgcaatgtggttattatttttaataaaattttattaacactattgtttatatttagtaagaaggcattacttatttatttttttttttcaaaaaaaaatatatactttatgaaattattttatagtatttaataaaatttaaatagtaacacgtaagatcatagtagataacctttaaaattattaattatttgagtaatttttttatgaaatgttatcaaatattatgtaaataaaaaataaaataaaatatatattttaaaataatatgtgcactataataactataagtattctcttattaaaaatgttcttaagtattactagtaccaataacaatgttctctgaacaaaaagttcaatcaaagcttttatttgacctactagaaaaacaattggaatttgatgatgatggtttcaataagagatatcaacctttggatcaattagtcttccaattaagtcaaccacttgcttatatacttccaccaccaaattctatccttcacttttaatattcttttcctaataaaacttttttttggatctgaatatccttcctaataattactaacggcttttggctctagttaaaaatattataataatatgggtaaatattattaggtaaatttacaatatttcttttaaaaagatgttttggtagatttctatctatagtttttagtttatttttttttttaatcgcatacgtcgtaattatttagtaccacttgtataattttagaaaaattcaaatagtttaaaatactgaaaataagattacatattttattactcacacgactatttatcttatacacgtggtaggtaactgtttaaagtttattttcgacattgtaaattatttaaaattttttaaaaatttacaagtggtcttaaatagcgctacaacaaaaataaataaataaatagactaaaaggctctccaagaagccaaaacaaataaaaatctaccaaaacgattctttagggggtttactatagtaatttccaaaactattttgaaaataatgtgttttgtatcgatcaaactctaatctattttattaaatgataaattagattctgtattttttaaaattatataaaatggtaccatataactttaatttttatcaaaataaaatttaataataacttgatttgaaggtatatgtagctaattacaatttttgcatcttttcatactaattaaaactatagttttaagttggttatgttaatataaaattgacaaaaattaaactcagggtacaattttgaaaaatttaaggttcgaatcatcttttaacaaaatagaagattcgattgataatttttacaaaacataaaatttaaaatgatacatgtcaatatattttatcttattatttttgataatttaatattagatatatgcctcacatgttttcgttcaataactattataaaaggctcctaattaatttacttgtaagactatgatcacattatattttattgtgttattagaattattagtgcctaatatatgagaattgctaggtggtgccttaaatttttcaaaagaccataagaattaagagatgacatagtattataaatataaattttaatatcaagaatctcatacaattttatttaactattaatagtatattagcttattatatggagtgccattgaatttaccaaataacttattatttcagttaaaaaaaaccatgctcttattttatagggataattacatgaaatattaatttttataaaaatttatattcttacgttcaaacctttcaattatcacttcattcgcacttaacattataaactcaaattttaacaataaaaactcgacggtcgatatatgtagtaaccacagaaaattcaaaattatatattcttttattggatggtgttgaacgcacatttgtcataaaatgatccacaaaagctgctgctatattacattttaattttggacttgaaacaaaaaatagtttgactggctgatagaatacatgaactatatatactctgagattttctaaagaatttaacagattatctgataatattttgttcctatatcactcaatcaacatatcatcatatatatatatatatgattttattatatacatatatttataggattaatatgactagtttacttttctgataaaattaaaatcttcctgacttgttcttctaactaggcttgaattgacggcaattgtactatatattcatttaatttaattataataggcaataatatgggagacagtttacttctaggacttgtgctcattggatgtacatcatgtacatatgaatttctggtttattattttgtctttatatatatagtttaatttccttaccttttctcctcatttttgttttttcaaatttgggggttttaatagttttaggttagtctatcaatacaacttcttcccaaaaaggtctctccaattaagcaccttccaccatccacatcactagctctctctattcatgtgtttagccagactattttgctgtagtgtatatcttaattactgtatattgcctcgcttaacacaataagaattttttaaacagaattcaaggccattgttaattctcaacttcttgattttgcggcctgtttgattctcaatcagtttcttctagttcataaaggtctcaagaaaatggtttttgtttttcaacaagaacaccccagcctttcttgtaaaaccattcaattatgctgggaaagtatcttgtatcttcgagtgtttcaactcttcagacactccacaagtttgagtaggagtgtttgcagtgcgggtggtgcgaattgtaactttttttttaaaactaaacgcatatgcgatttttctaattttccaaaccgcaacaacaccgcaagatcttaaaattgcaaaaaccacactgtaaaagtgcagtgtggtgcagtgcggtttgagcagtttacaccatcatcattatcgaacattacaataaaaatttaaaaatcaatatttataaagttttaacaatacaaaaaaaaaaaaaaaaaacaaatcttattatagttttaacatcataacatatataatcattaagtcattatattgaattgtctctaaaaaagtataatgtatacatatattacatatatctgttgtaatatgaataaagaataaaaaccatattgtaaaaattggtaactttgtaatatatagtgcggtgcaatttaaaccgtaattattaaattcaaaactgcaaactgcacagcaccgcgcggtttggagaaaatgcgaaccgcaaccgcaccataaaggatttcaaactgcattttttatatggtgaggtacggtgcaggcggtttgtgcggtgtgaacggtttaatgaacacccctaagtttgagtgtatgtatacaagtttgctttctgtgtgttgatatttgttgaactataatctgcaggtcttaccaattacacaattttcacagaaatcgagtttccacttaatcccttcttaaacaacccttgctttattcaactctagtaatcccatttcactaacatggccaaacttgagatgtgatagtttagtcatgttagtttcatcttgattaactacagagaatgcattgtcttgaatggtcttgccaatcaaatagtattccaaggcaatttgaaccttttggaaactgttcgtactcaattattcaccttaatagataggtcattcttgtcaaacattcgaatagaaaataaatttctttctaggtatgggacatactcgacttctctgatggttttcacaatacaatcatccaattggatcataacaaatccaattccttgaatttgacaagctttgttgtttccccacaacatatttcgtctaggcttatgatcactgtattgacataacatttctttgtaaggtgtcatatgaaaagagcattcagaagtgagtatccaatcaccacctgagtcagtgcttgacacagtaagcactccagcagactcataaccatcctagaaaacatgtgcctctgctatttccttctccactttggctaatttcttttgtaacagagtacactcatccttgaaatgggcctccttcccagttgttttttatttttggtttttgattggtgattggtgttcttcccatgtatgttgttgtttcctttatgttctttcttttcacaccttcctttaacatagagcccttcactgttgatgtcaactccatcctttgatcacttcgtaatatcctttgagttcagtacaaccttaacttcatccatagtataggcctctttgccataaagaatggtgtccacaaaatgttcatgtaccattagtaatgaactgagaaaaattattgcttgatctttctttcaacttcactctaatattgttctgatcaagaacaatcatattgaagtcatctaagtgctttctaagttccttcgagctatccattctcagggtgtagagcctcttcttcagatacaacttgttagccaaagacttcttgaagtagattgaagccaacttcctccacaagctcaaatcagtttcttcattggatacctctctcaatacctcatctccaacgctcaaaagaattgcattgtgagcctttgtttttgtgtctctcttgatcttctcatccttcaatccatcaagcaatttcttatcaattgcttctgcaattccctgatgcaccaacagtgctttcatcttaattctccaaagattgaaatcggtcgagccattgaatttgtcacctcaaacttttctaaagacatcttggttgagtccttgataatgcgaataacagattcttaaattttggatcaggctctggtaccaattattgtgattcaatcaaaaaaaaattatgaataaaaccaaattaaaactcaactcactctctcgctctccctgccaccatcgttagtcaccattgttatgtgcaattttttcatattgctcaccctaattactctctctccctgtctctttaattcccttctcttctctcagtctcggctccctcctccgtgcttagagtctcgggtagcttctcgcctcctcctctctagtagaaatatatctatatacatagtactagcaaaaaactacgtgcgaggcacgtatactaaattttatgctagttttttctatgttatttaaaagtgatacaattaaaaa

SEQ ID NO: 113630 - DNA, 2025 bp, Cannabis sativa
agagagagaggtaaaggatagagagaatggagaccattgatatttatgatctgttgagttctttactgtatctcattctcatcatttggatattgattcaaggcttcaacttattagcattctcatggtcatggagcaaaagttgtcaagtaaaatctcatcatcaacttccaccaggacccaaaccattccccataataggcaacctcttggaacttggccacaacccacataaatctctagccaacctttcccacattcatggcccaatcatgagtttgaagctcggccaaataaccacaattgtagtgtcttctcctgaaatagccaaagaaattctccaaactcatgaccaactcttctccaacagaaccgttcctgactcactccatgccttgaatcaccaccattatggcctcccatggattcctgtctctcctagttggagaaacttcagaaaaatatgcagctcttatatgttttctgttaaggctctggaaaccaacaagaatttgaggtaccaaaaagtacaagagcttttaggctatgttggtaaaatggctaaagcaggtgaggccttggatattggtacagctggttttaacacatcactgagtttgttatccacaacttttttctcccttgattgggctaatagttctagctctaatcatgatggtggtgatgatgccatggccaaagagctgaaggacattgttttgaatatcatggaagctgctggtatacccaatttggcagactactttccatttcttaagatagtggatccccaaggcattagaagaaacatggcttttcagttcaagaaaatgatgggcttgttcgaccgtatcatcaaccaaagactgcaattactcacagaatctagtactgctactggtcttatggatgaaagtcatgatattttggataatcttcttaattacatgatgagtgaagagaataaagaacataagcttctagacattattgcaattgaacattttctagtggtatgtatctaacttttttttaacatatacagattttgttaatatgaaattaataagatgttggtagtgttgcaggctctattttcagcaggcactgatacgagttcattaatcttagagtggtcaatgactgaactgcttaaaaaaccagaaattttatgtaaagcccaaatggagttagacaaagtaattggaaagggaaaccaaatgaaagaatcagacataacaaggcttccttacttacaagccataatcaaagagatctttcgtttgcacccaccagctccatttttaattcctcgcaaagctgaatctgatgtgaaaatctgtggttatttggtcccaaagaatgctcaagtgattgttaatatatgggctatttcaagagaccccaaagtttgggacaatcctaatgagttcattccagagaggtttttagagtcaaatattgatgtcaaaggcagacactttgagctccttccattcggcagtggccgcagaatctgccccggcttaccgttggccatgcgaatggttgatttgatgttgggttctttgattcactcgtttgattggaagcttgaagatggaattgaaccaaattctattaatatggaagagaagtttggcctcaccttgcagaaagctgagccattgcgagctatggctaagcttaggatgtagttctctgtctcttgggaccagatttgtttgcttaatataagtaataatattacattaaacaatgctaacacaatcttgtattgtgtatgcattttgcaatagaactggtaccaaaatgggacaacaccctatctgatctgttatcttcttgattataatatagactagtaaatataaccgcgctttgcttttgtaataaaataaatataatttcaagatttttattttgtaaaagttatcggtgatatcatttttattttgttaaatgttaattttattaggttctttgttttacaaaataaatcatgatgacactttgagattgatt

SEQ ID NO: 113631 - DNA, 3653 bp, Cannabis sativa
aattttatttatatttatgaagtgtttcttagcaacaaactaaacaaaataaatatttatgccgcaatcttaaaataaaataataataaatacactttagccttttttttttttctttcttcggctcaagttcaacctaccaaactggcaactaccagtttattcatcagtcccaaaaaatagactaaacggccatttctgtatcaattggaaacagtgctcgtgcttgggctgagctcacaaatgtccattttctcatctaattggccgtagagaggaaattgtacaagggaaaagaaaaagtcgaaagaagagggagtgtgaggtgtgagatctatggctgacgagtgtaatttgatttccgaactcagtgagtttgatagcctcagtgctgttattgggtttgaggctttctccagtgggaagaagaggaagagaatgaagattaagaataagaagaagaagatggatcatcagtttgtgattgacgatttagacgacatgactgtaagtaggtctttcaccattttcgtcctttttcgatttagttacgaagttcttatctttatgttgcaagggaaagatttagttgtagagattgaaatcgagggaatgagtttggaattggctatctttctagttttgaatatgtaagcttagttctgcaacattggtaagactaaaaatactagaaatgaaattatttatattctcaatcatgactagtgacttgaggagagaagaatagttgacttaccctgcagtgtgttacgtaccatatgcgttgttactgctaatttcaagaataggttgactttgcctaagctcatgctgcaatcttttactctaattatctatagattaatatggtggacaatgaaaagcaagcgaacattggtcaacatcaagaaatggtgtcaattggaaaagtggaaacggaatcaaacgtgattaaaaacagtattgttttacaaaagcgccttgtgagttgaaacaactatatttgagctcttatttggagatgttgcacagtcatcttacatttgttttcccattgtattttactttagcatcgacctagatattttgatccccctcaagaaattacttgcgtgtgccgcaattgtggcgaagaagggcatagagaaaataactgtagagcacaaaagcgaaggagaccatgctttgtttgcggaacttttgagcacagttggagacgttgcaagatggtatagcttataagttttccttaaattcacattctgtttgtatggtggatgttgtagttatttattccttttttgaaatgctcttctttttacataccatgttaagaatatgatggtgataatcaaatggaagaaaaagagaagagagattgaagagtataagaatcgtgggctttatactgattatttgatactttgtgcttgcattttataagtactgatttttagttttgtagttatgccacttacatgctttattgctgtacccacagcgtcggaattgctttttatgtaaagaacgaggtcatgttgctagacattgccccaatggaagccaagtagataatccaagtcctataatttgtcttagatgtggggactctggacatgatatgtttttatgctccaatgattattgtcttagtgatatcaaggtatgtacaatagtttaagatctttttcttcttccttcataacttttttttttgaatttttttttgtgtatgcttggctttttcttgaatctgttgttcccttgtgtcctatgatagaaagattcatatgtgccgtgaatatattattgtgtgggcaggaaatacattgttatgtttgcaaggctctcggccacctgtgttgtgctgattcacatggtggaattctaatttctgactcttgctacaactgtggccagtctggacatttgggttcagtaagttacttgctgtgtatgttacatcttacattaaataaattgagaagcttaataaatcttgttgtaaaacatatgaagggatgcacgaagacacgtaaagacatccgtggtgtttcactccagctttctgccactaatttagagaagcaggtcgttttgccagaaaattctcaaattgtgaaggttcggccaacactcatccattgatagtgaaccaattttctttattatgcctgtataacagacccggaaccacaaaataattacgtaagccttagtggtagaccaacttatataaccgtcattagtcttttctatgtacttgtagcttgagaaggaggtgggtgatcttgtcggcctcaacttggaagtattttctgcttgactgaatgagaaacaacaataatgcagaaaaatttggaagatcaagagaaaactgaaccagataagcgcgaaacaagacaaaaatgtgaccgcaggctaattgaaatggagaatgtagcttgtctaaaccagtgcaacggagtggctcagtaaatatggttctgatctcaaccctgcagatgattccagtactggatgtgacctttttttgagctctatttcattgtaaagaaatcagatattttgtggaaattccaatttcaaacgcttggatccaaaatatggatgccaagatttggtcattaggaacaatggaactgaggctggaagtaagaagctgaagtttggttctatctgaatttctgtacaaagctgcatctgtatccgaatggtacaagcaaaagaggcataggccatgtaataatattaggaagttcatctaatagtgcattgtaatttgtagtgtacaagttttggatataataatgcagtataatgttaaagaaaaagaccatcttatatgttattaggagtgttcataagatagtcgatccaatccgcacaattcaattcacgaagtgcggattgaattggattaaaaaattcaaaatccgcacttgtgcggattgaatgttaattgacatataaaagtaaccaatccaatccatacatatatataatttttttaaaaaatatatatacaatttaaagaaaatagtaatttaaaaatctaataaatataaaaggttttttctataataaactaataaaggcagcattttacatttataccatataaaggaaaaataaacataaatagaaaataaaagtttgtatttacaaaaataccagcctaacaaaaaaaaaggaggaaattcctccttcatgagccagtcaaaacacctcaattcaccaaatctccattgttttatttcaaaaatcaggaaaatcagctcaaatcaagatgtagatctcaaggaaaaagcaataaaatctcgaaaaatccaaatacaaaaaacgaaaaaataaaaaacagagatatcaacctccattgttgtaaaaaaatgcaaaaacaacctataaacaaaaactgaaagcgtacataggagagaatttgaagagaaggagatcggaaaaactttgaatatacccataatcgaattagagaaaaaaattcaaggtaaataaatatgaaaaaacaaacatcatctaagcttccagaaaaaacgagaaaacaaccacaaaataatattttaaaaacacccagacataaacaacctaaaagatgaacaaccgagaaaaaacatattaacaacaatctgcaaaac

SEQ ID NO: 113632 - DNA, 2715 bp, Cannabis sativa
gtgttctatgttatatacaaatagatcttgggttaattgttaatttatctaacaatgaaatcacttaccaaattacaataaatgttttgatctctaagaattatgtgttttcttcattaatttattcattttatttagtataacattagcaactcaaaggaaagaagtcattagaactaacttgactatgatttattcatagcacagtatcaaaaccaccatagtttttgtcaattttgcaacttaatttggtaattttatgtcccgtcttattctttgtctctcttaagcttatgcatacatacatcactactaagaaaatagtttttcctgacatttttaagcaatcatttaaagtattcccgtcaatttctataatcgtcgcctatacgaccgtcgcaaaatggacagaataggcgacggttcaaaattatcgctaatgtgcggtttacaatcatcgcctataacagggtataggcgacggttttaaaccgtaccctgtactataggcgacggttttaaactactgagaaatgaaactaaaatgagaaatttatcaactactatagccctagaccttaaaatttttccaaacctaattataaaaaccaaaaaatacaaatcaaatattgtcattcaagtacaacaatcactctcaaagataaataataaatagaagacacattacatttaaagtaacaattaaatcaaaaaatttaaaaccatagtttttttttagcaaactcaagccataacagcgaagggagctggtactggaggcatgcaattagtagctctctccctgatattcagcaattcaatttggaaaaaatatattagatatcagaaggtaataaggtgctatgcattcctcaagacaaaaagcattggaatgagcatgtttggggaagatttaataccccaaaatacagcttcatcatgtggatggatgtacaagggaaattgagaacaatggaggggttacacaaatttggaatcattgatgatcgatcctaactatttgatgtgtaacaactatgaagagacaaatgaccatttgttctttgaatgcagcatgtcagtggcctgtttgacagaaataagacagggttgaattggagggctattgatagtactccttgattcgaatcactagatggataaacagaagtaaaaccagcaaatttcagaagagggtccagtcttgtgtaccacatttggaaatctccaaatgaattgatatggcaacggaagaaaggaaacatggcacacctgattggtaggctcaaagaatctgtgagaccgataattgttttaatctggccaaaaaaattcagccaaaaggatgagagttggtttaattctttgtaatttttatatacattatgtatagaaggaagtattaaggccatacataattggttgtggtgcttgtaggatgtacaaattacagtttagtgcaatcaaatttatttgattcataaaaaaaacagccatgaccatttgattgtttttctttctttctttcttttactttttcttgttaaaaatgtttcaaggcaagggtacgtattaaattcaaaagaaaaacacaaaagagctaaacacgtggatcgaatgaggcttttgaaacatattttcaaccaaaattgatatttataaaagagtcattcctagtactcggtatatgaatatggaaaatactttattagtaccttggatttatagcctctttgatgacgaagaagattttaggtctataaagaggaagaaaattactcaataaacaaaaaaataaaatagaaaaaagaaattagtagtaatgcatttcagaagagagaacatcactactttttctttacataagttttaatcttttttaaccatggtagacaaattttttcttccccagagtgaagaacggaaaacatgtaaaagaagaacaattttctaattactatagagacttacttgtagaaaactacaatgacagagccgtctagacccacgatgtaggagagagaaagacagtgagagtgtgacaaattgtacatgaaaatgaagtacaccaaattttcttcagagtatagtttagtttcctcccttagaatatcatgtacacgaaaatggttttctaattgatttttagccctaattaaagaagaaggaatgacttttgccctaacactagaacacggcttgaaacaaaaatgaaaaatgaaagaaggaaaaagaggagtgatgggtgatgaatgatgataaaaagacacagtacactcatatcaatcaatttttacttttttaagtttaataatattttaatacaaaagaaaactggttacccattttctttatcctaaatacctctatattaacgacaaccctctgataaatttacttttcaatcttacggctacagtacaacaatcacagattgtatacccaaaaatgtaataacaagaaaaaatcatgtcgttatatatacagcctttttttcttagaatcaaacaagcttcttgtggccttggatggtcatcacagctcgcaccaaaagaggcagccacagtccacctcgaacacacacataacacacaacttccccttttttctttgttatattattttataatataataagtgtagattaaaatgtagtaatatatattattatgtgaataatatgtattaggtatttggtaaataaattgtgtaaca

SEQ ID NO: 113633 - DNA, 1655 bp, Cannabis sativa
taatggtgtaaaacactatgataataatatcaataaattagaaggtaaaaattatctattctaaaatgttattaattttttatatataaaataaattaatagtccgcacaaataactacatatttgtcacaaataactacatttttgtttgcatattttgtaaaataccaaattttatttttaaaatcctatcattctatcatgttacttttttttttaataattctaacatcacaatatcatattttatattatatcactgaattaatactaaaaaaaataaaaaatattagggaatatcgcgcgaagcgcggtttagttccctagttaattcataaatagtattcaaattaatataataaaagaaaataattcaaccttactatttttgaagttatcaacaatatattcttcaatgatagttatattactaaggtaataacattataatattaaaccatcaaaacaaataaggtaatatttcacattaccattcccttgttagcattaacccattctaaacagccctttaaaatttcacttaacttataactaagcatcaaaacgaattttttgattgtaaaacctcttaagttcttttagcagtttaccttctaaactaatttttgtgttgttaatgttgaatttttcatgttgtacacatagacatagtacacacatagcacaattttataagtgcataaagacttatttaaaaaaaaacattaaaataaattaattttaaattaaataaattatttaaaaaaagatttgttttctttcttttctcattattacagaccatatgttctttttttttttccagtttttatttttctcatcttcattctttataccatcaccaacaccgccgccaccatccatcgccgctaccatcaaaaccaccattgctccctacttttcatatatattcacatcacacaaaaaaaaaaaaatcaaacaaaaatcaaactaaatctcatatctatttccagacctccacctcaaccattacaaccaccaccaccattacatttgctagatccaaatcaacaacaataaaatacaaaacaaaactaaaccaacaaaatcacaaactaaatcaaatcaatgaatatatgaagaatgtttgggagccattgattccaactgaaaaattaaaaaccaaatttatttataataacaaaaaggggacatgaatcgcagtgggctccgacggggtctgaagctggttggatcggatccaaatatgctcggctctggcatagatctcacggtgggttttgatgactctttagtcggatcagccattggattttgttccctcgaggttcttagttcaattgtgtcactcttggcccaaggtgatgcccaagcacgcctaaaaatggcctgaaagccatggagacgtgaactccaatgacaaactcacagtgatagaaagacaacaaaataaggacctagatttgggaaagagggaaaagactccaccagtattagagcagaaagcagagaaaaaagaattctgtttttattgactgttagaactgaatggttacaaatgagaaaatgccttttatatacaagttgataaaacacagcaggactaactaacataactgactgaagtgtaatcataaactaacttaaccgac

SEQ ID NO: 113634 - DNA, 3316 bp, Cannabis sativa
atgtagaaaaaaaaaagatgcacctctcacttataaaaaaaaagtgtcgccccacctcaacttaaatcctaggtgcgccactgcatatggttcaagtgggtgtagaaggttttggatggtgtgtggggttatgggatctaatctcatagtaactaaaaaaaatgtaatatataaagacacttttataaggtgtacgattttgtctcgtgatgtactttcacggaatgtatttcgtggtacattagatgggtctcagggtacgttaccattttttttaactctaattatccctagatcaacccagccctcagatcaaataattcccccatctaacggttgtacatcacggaatacattccgtgaaagtacatcacaagacaaaatcgtgtccctatatatatacaggatttgcaatcaatcttgaggtaaggcgaatatcatgagtgcacctcagtcctctttagggccttgaaattgcaaaaaaaaaaatagtatatagattaatattaaataataacaaaatacagtgtttagagtaataatagaaagtatgattttaaggaaagaggtcaaggaatttgtggtatagtttctctaaatgaaaaagtctccataagtttttttgtcttcctggaaagttagttttctcttgaaagagctttcctgaaaggcctttgtgaccatccaaaagaggtctttaggaaagctagtcttcctctataaaggagttttgaattgctagtcgttctctcctgaaagggagtcctggatagtcaggtgtcacttttcctattcgggaacacccttcaccgtgtacttcaattcttagtcctggaaagtgttcgcttcatccaggagcactatgacttaagctgatgaggatattctaaagagtttgttaattatgtcgtaacaacttagcgttttcatccaccgactttgggatccatatcccaaatttataaatactgtcgacacttatcattttagaagagaataacagcaaggatggttatgctgacttctcagcatatgcactgtctgttgctgatgaagtggatagcacaattccctaatcttaccaggaagctatcaacaacaaggatgaacaacaaggatgatgccaaatggttgcacgccattgaagaagaaaaaagtcacttattaagaacaagacctagaaggtagtcaagagaccctttaggcaaaggttggtcagatgcaagtggatatttagggtcaaggaaggcattccaggactagaacaagttaggttcaaagcaagattagttgtaaagggcttcactcaaaaagaagggattgattacactaacatattctctccagtggtgaagcaagcatccatcagaatcatcatggccaaagctgccaaaattgatcttgaggtggatcaaatggatataaaaatagcattccttcatggaagcttagaagaagacatctatacgaccattcttgaaagctttgaaagcaatgatccataagaagtgtgcctgttccaaaaatccttgtatgatttgaaacaagcaccaaggcaatagaacttgagattcaatgaaaccatggagaagctgttatatgccaagagcaactatgatccctgtgtctacacaaatgatcatctgtatttactgttgtatgtagatgacatactgattgttggtcaaaatagagcaaaaattgacaagttaaaggtgaaactcaatgttgaatttgacatgaaggatattcggtaacccaagaagatccttggcattgacatacaaaggcaaaggcctaacaccatcaccttatctcacaaagaataccttgaaaaggtaattgaaaaatatggaatgagtgactccaaaccagtgcaaactccactggctcctcacttcaaactaacgaaagaccagtcacctacaactgatgaagaaagggcattcatggatacaataccatatgctaatggggtttaagtctaatgtatgtaatagtttgcacaaggtctgacttggcctattccttaagtgttgtaagcagatttattgttgatcctggagaagagcattggtcagctttgcagtagattatgaggtatgtcaaaggttcccttgacataggacccacctttggaaatgagtcacatacacaagaggaagtatatgagtttgtagactcggattatgctggcagcattaacaccataaaatctctcacatggtatgcattcactgtggtgggaggttgtgttagctagaaatccagtctcaaaaaggttgtggctctctccttcacaaaagttgaatacatgtcagccactgaggctgtcaaagaagttatttggcttaagggactcacaaaagaactggaatttaattcagatgatgtcacagtatattatgacaaccagagtgcgctacatcttatgagaaatctcatgttccatgagaggtccaagcacatagatagtagacttcatttcattagagaggttgtggcaagcaaagaagtcatcatgaagaagatcaatactgctcactaccctgcaaacatgctaaccaaatgtgtcactcaagttaagtttagacactgtctaaacctgttgaatgtcaatagccgctgaaatcgatcaaatctagctatcaccattgatgtgattctctttgtcttcttcaagtgatgaaagcaaggtggaattgttggtgcttccagctttgagcactttaaagaagtcaactaactgtttttcttaaaaacagtgcagcaagggtggttatgagtgtctcttaactgtcataacagtataaatacctacaccactagctcaatcaacacaatttttggaggataactactacaactgaattaagttagttttgtcctagttgagagagagctttacaagggagaaagcgttagagataaatcgagagatcactagtgtatagtttcagcttgtgttttgtgtgagtggagggttgtaagtagagattgttcactttcgaagtgacttctctcatagtgagttgaaattgtattcttgtatcttgtatattagtgatctctcttgtactattcttctcctcaaattcttatcacattgttatgaaaataaagattcattcattcattatgttctatttttgattattgagttatagtcactatgctattgatttcttgagttctttattatgacattcttgatgagatttgattagtctttccctcctctctttcccatcttcatagcaaaaaaagaaaggtatatatatgaaggaagaggtttcaatggttacatttttattgt

SEQ ID NO: 113635 - DNA, 2259 bp, Cannabis sativa
tttattaactaatttaactaataaatctgatttaaatgagttttatttagggtataaaacccaacaataggtgctggaacaatattagatacaagtgcattattaaacaatatcggtcctgtatcaaattgagaagagatgcttggggtgagtggttgggatgcaatttggaagagaatgagagagattggtagcaataggttgagttgcctgagatgaaatagcatgaagagatgtttttgtcatgaaatcatattgttgagttatgacagaatccttagatgatgcacataaataaggaaaggtattttcatcaaatagaacatccctcgagatataaactcttccttctttggctaggcacttataacctttgtgggctagactgtaataaaaaaatatgcagagttgtgacctatattaaagtttcaccctactgtaaggtcttaaatcagggtatcaaaggcacctaaaactttaagaatggtgtagtttgggctggagtgaaataacacttctattgaggagatatatttaagctgaggtgtaggcattctgttaatgacaaaaattgttgccctataggcttcatcctactattttaatggaaaagaggcttgagctagtagggttagggcactcttcacaatgtatatatgcttacactcaacaactccattttgttcatgtgtgtgagggaaggcactctatgtaagataccaaattcgtgcaaaagaaccagtcaaggcttgatattcacccctaattagattggattaatttcattttagtgtttagttgattctcaacttggttttaaaagattataaatttggacaaagcctcatcttttgttctcaaaagataaagacaagtatgtttagagaaagaatcaacgaagcttatatagtacctatatccatttgaagaagttatgggtattggagcccataaatctttgtgtactaactatagtggctcactgtacgaagttgtagaagttggagaaggtagtttatgcaatttacccaaataataagcttgaaaaacttcaaaaataaaagaattatttttattatgattcaacttgatattacaaagagataaagcaacttggacaatcttagaggaaggatatccaagtcttttatgccataactcaaaggaattatctttttgtgaaaaagtgtgtgcgttacattgagaattgaataaattagtactggagttatcttgaacttaatgcaggttggagggttattggttggagtcaagaagatgaagttcagatgagtcatacttatacaagccattatcaagcttcttatgcattaaaatgttcaaagtaaaatggtctttcacaaggaagtaagtggggtgaaattcaaagaaaataccattgtcatcagcgaattgagatacgctaagaattatttttggtgattgaaggcacacgaagcaaattattaaggacaagatgttgagattcataagggaaaataaatgaacaatgatcaatatgtttgatatgaaaacctgctccactgccctgtagatttgttgatctctaaagaactcattgttggagttcagatatcgagcagacggtgtcaattgattggtggcacctgtgttaggataccaacttggatcaacaatcgtgttttaagtgctaggagtttctgtatctcagcaagattggcagagccgttaaactgttggaaggattcaagtctggtgaaattcttgtcaaaccagtaaaagcattgttgaacagtgtggccaggtttatgacatagttggaactgtgaatttttttcccagacaaaaaatatgcccttaccacaagaggaaccacctctaaaattaccaaactggcctcgagattgagagggaccacaggaagaatttgtaggatatgaagagatcccaggtggaccattgaagctatgagaattggtagcagggtggctgaaacaaggtagactaccacgagattggtaagagggattagaggtggaccaaaaccatgaccattgttggacttgttttgagctagattaacctcacttttggtgatttctagttccttagctgctttatcaagaaacattgattgagccattaacactgctttaatttctacaacattgtaagaatccttgtgagtatttaaaggtgtgatgaacacattgtaatttcactagcaagaccattaaagattgcctcaatgtgaggttgaggagattgttattagtg

SEQ ID NO: 113636 - DNA, 1815 bp, Cannabis sativa
ctattattattattccctctaccacttgttgaagtgtgtgcatattctcaaatatatatatatagttttttttttcttttatataattatatattatagttacaatagtaaggattttattagtttaaaatttttatatgaataatagtgtcaaaaatatggtttaatttaatattctgttgcaaatgtttgaactttcaatttagttttttaaatagaaatacacattttttttccatggagatagcgccccacagggaattacctctaatggagcgggatttctcgtctaaaaaggttagatatgtttgttgattcaggactctccaaggttggctgtgggattggggtggcaattcgggtttggtagaggtggagatcttggctgtgtttttttattttgttatttaagttagtgtattgtcaatctttgacagacacaatatggtattttggttgcttttatcacaattgattcatagtagtgtgtttctagtactgctccattcatgtgccaaaaatttgattgtatgcaggctcaatgaaattgttctctctcttgagagattaatatgtaacctaatgatcatgaatatatatattttgaaatatggaatttttttaatggaaaatcaattttatttataagcattaatttctatcgtaagtaacaactcagttagaacaaattccaaactaaaataacaaccaaggtataagataacaactttagcaaaactacaagctactacattagttgatcacttaataaaaaaaaatatttctcaagtttgcaaataaatttttacattcttcaacgaaggacattaccaagcaaaaataaccttcaataagcatgccataagtatttcgagtcactaaccccaaaccataacttcaaccctcctcaaacaaagttgcatctatattaatcaaaccatgatgaattcatatcatatatactttttgcttaattaacacataaaaaattttatttttgccagaacaattcattaatgtgctagcaaaagttatttttaccaacacatatttttactgacaaaaatgtcattattttattagcacatatttttgctgcaaaacgtatttttactagcgcaatttatatttgtgctggcataagaagctgtgtaaaaccctctctcataatactttctactagcgcgtagatgtgctagaaaaaattatttttgtcaacacttttcattttacactgataaaagttttaataccaactcagatttgttaatcctctttgctagcaaaagtaaatgttgttttaccaatataatacctaatttttattctaatacaaaaatacgctcagcaaaaatctcattttttgtagtgtaatattatagaaatatatatatatatatatatattaatttcttttttaatttttattatataaagcttgcataataatgaggttgggtaggaggcccaacaattaatgactttactaattatttttattaacatctctctctcataaaatcattagcgtgtggacctcacatttttctcttaattattttttaaaaattaacaagtaattacatttatatataaatcaatagtaatagtactagctagctaccctagccccaacaatattattaattaattgcaattaaatcataatcgttgctgtattattatatatagctactacgaaatatagtctatgagtaagaaagattaaataattaattattaattagttagctaataaataaaagactaattagtgatttttctgtctgaactttaacatgtattaaatcgtgc

SEQ ID NO: 113637 - DNA, 2258 bp, Cannabis sativa
ttgagtttatggacacaaattttaattaggatttatatatgtcattcctagttgtttagtgtttggattttttataaaacatgtcttgtgtaactgtttgttatataaaaagaaataaataaaaaaggtctatatttgcataaaacgagtttgcttatgattatttaatttttttcttcttctttgtgtgtttgtatattgttagtgctaatatacgaagttttttttattcttctgtttagacagctgtttctgttgtttatgtcattctctttggccgtggaagctcttcatgcattcattgaagatgaatctgaacacaagtaagatgtccatgctaatacttgataacatatgagaatatttgttatggaactttatttatttgtttttggtaatgtactttgcgacccttactttcgcaatccctgttacatctgttgcttatcctagtttttccagttgattttttttagctgtcttgtgcagttcatcattattccttttgagtttcaggctcatgccaacctaggaaattagtcgtatgaaaatgtttagctgaaagtatagttctgtgcatttttccatatgctcttactgcattttcatactacagtagctcggcttttagaattttcatatgatatgagcatgcgagactgcatgatgtctatctgcatgtatgtctttaagttatgtagtcaggatgggtttattagttatgactacagtgtaattgttgcaatgtttgtgcatttaagcgtagattaatctatccatttgtatgtaaatatattagtgctataggtgaatattattttgtgttttttattagttcatcctatcctgtctgtgtctgctaataattgttaatttataggcactacttgattgtatcggctgtgacaaatttgctggtgaaccttattggtgtttggttcttcaggaactatgctcgtataaacttaagtaagttctttgaaacatcttgagtatttgttttcattcttcatttctcttcctgcagagctttcctgccctttatggcatccaaggatgctgattattatgttagtcagcaatgattgtctgacaataatatgtggtgattactcacctctttggaaagttgtgttgtggattctaaacttctggttaaggagctcactgatgatctaagcctattgaagctaacattttttctgcttaagataaggcatgatgttacatactcaagcaacataatttccctttccacctaagacaatgcttgatatgttttctaattaaatgggctggaatgctactatgaaaatatctgagacatgcaaatgaaccctttacgaatgtgatactcacaggactgagagaacaagataatgataggcatccaccaagggggataaaatggggaattgatagaactatgatggtaaaggggtatgtgggtatttttgtagttatgtttagtggatgagctggtttagtttgttaagttgggtttatgaatgtataaatatgcatagcctcttttctcttttctcttaaagggtcccttggcgtgttgattgttattttgtatgagcgcttcttgaggaagaggtgaggtctctagaatggttcgagtctgttcttatcaataacctactttatcaccctttggttggattctatcagtcaaccaatcaaagcatttttttcttctctgcatctagtgttaagcatgatgatttttgtgtacacttaacaatgtttccttatccagtttttatgcgttgcagcatacagaaaagctgaagatatgaactatcactcagttttcttgcatgttcttgcagattccattcgcaggtattatattctccttacactccttactctaatgtaaagcttatacatgccttcattttgaaaaataagaagaatgcatgagtgacttcgtttgttattttcccagtctctatgcacgtccatctgaaattgttttgttgggcatttgtgtctcagtgcaggtttgatattggcatcctggttactgtctcttgggtaagttttgcttcatttccacttccagtccaacttctctttcattttcattcatcattttcaacctgtatttgcagtgttcaaaatgctgaagttctgtgccttggactagtctcagttacagtttttatgcttgtaatgccgcttttcaaagcagctggtggtattttgcttcaaatggctccaccaagcattccatcttctgcattaag

SEQ ID NO: 113638 - DNA, 6049 bp, Cannabis sativa
  modified_base (3657)..(3673): a, c, t, g, unknown or other
ctctctctctctctcactctttctttgtttgtttttttgcaatcatatatcattatcttgtatcttacttagaatgtgtacgtgttcttatattgtgtatactaaacaaataaaatggcaagaatcaatcattgattgtaattgtatacatttattattcgatatttttaccccaaaattatgatttatacgttgttgtaccccataaatttgtattttttttttaaaaaagaaacgttcattaatcaaaatttgatctctcattcattacagaaaatattattagcccatttactaccttatggaccataaagttacaagttttagcaataatacaaaataaacaagaggaaattacactctatacttactttttatttcatattttaatttttaccttcattttactactctttaatttatacccacttttataagttatatttccattatgtactgcatcaaaaagtctagttttgataagttttgtgaggttatatttgatactttgattataaaagagtgtatttatcaattcgtattattttagagttatatttagttaatgtgtaataaaaaagggtagttttcaacttatctcaataaacaagtaatgaaagatgaagcaattcttttaccaaataaggagtagttttcaatttctcatctagggtctagcaattgagagaatcaaccactagcttagaatcactttctaccaagataaacttaattcctataaactattcacggtattataaagtgatctttctctcaagtttcgtcacacgtaaaataaaatgataacatgactgcttatctagtttccacataatgtcaacgccaaatgaataattaatttaaaaaataatttatttatttttaatttagttttacataattttcttaatcattaattattatttttttttttgaaaaaatcattatttttttttttttttatgaatcagaaattgtattagctcaaaaacgtttgtttacacccaaattgtaaatgtatttacaaactttgaaaccattgtgtgtctatattcgagactctttttggccaaaacatctcaattcttagcttcaagttagccttcaaatcaatgatcatagcagtgagcgattgttcttctttagtccatagcaccttgtttctcagcccccatatactatacaacaagctggctgttgcaacagtaaaaaccaggcccctgaacttagtttctttggatcttcctagccatttgatgatgttaggaaggcttgtatgccttgttctccaccctaaccacctcttgatttcatgcaagcaaatgatagatttcgggcattcaaagaacaaatgttctatggtttcactcctatcatagcagagaatacattttgtatctgtgataatttgcattttggacaatcggttcctagttttcagtctttgatgcatagcaagccaaagtataaaactgtgttttggagcattgaaatgactccatacctgccttgtccattggatttttgggggagcttgcaccagaattttgtaaccgattgctatgttgtattgctgcagcatgttgctagggtgctgagttgctttgaattggtctttgagcctcactaagcacctccaataccagctggattgacttggtgcttcataggcccaccaatcactatcatgaagatagacactattaattcaccgcatccacatgctatcttctttgtttgcagtagcccagatgtactttcccatagcagctttgttccaagatgctatatccttgaagccaatgccaccggctgcttttggttgacatatgaaatcccaagcaattgcactaggcccatgatactcagctttggcattccatagaaagttcctgcatattgcttcaatgttattcactactttcttgggcaatatcaagacttgataccaataggaatgtatggccatcaagactgaatttaatagaaccactcttcccgcaaaggagagaattctagagctccatactttgattctagctatcattttctccgccaggatctcacactctttcccagatattctttttgcaccaattggaactcccaagtaagtgaaaggcagtgactgatgctggaagccagaaatagtcatgattcttctaacatgatcctcaggcatattacttctgtacatggctgactttgtagcatttggattcaatctagatgtctcagagaacaatttgaggtcttttaataggtaatacacactcttgaaatctccatttcagaaaagtaatacatcatcagcaaaggccaaatgatttaggtaagtggctgcacatctgtcatggaagtaaaagtcttctttttcccctattctccctattattcgagtgaggtattccattcacatcacgaataaaagaggagacattgggtcaccttgtcgaagccctctttttgactcaaaatatccatgtaaagttccattaaacatcagtgagaaccttggggttctcacacaggtcatcacgagtttaatgaacttagatggaaataagagtccctgcatcatttcttcaagaaagtcccattctatagtatcataggccttctgcaaatccaacttgataatgcaagaaggtctattggtcttcctcctatagtgtcttaataaatcttgacaaatcattatgttgtaccctgtaaacctccccttaataaagcctccttgattcatggagactaaattcattaattatttttagtataatgatttttaaaaatacctaatatttatatttttaatgttaaattatactcatagcgttaatgtgaattagcaaaccatgtcatcattttgcttgtcacgtgtaacaaaacttaagagaatgataaatttacaatactatgaatagggccgtcttaaacattttgaatgtcctgttttaatcttaaaaatttggctcataacaaaaataataagtacaatcaaattcaagttcaatcttttatttttttgatagatgaagttcaaaaatttaattctcaaagtttaagtaaattttttttttaaaaaaaatatttttgacattatatgtaccttagctttaccacaaattagtttttgagtgtttcatttttttttttgcttggaaaagctatataggattttgaactattttcttttctctcttttgatttttggtgaaaaaaattaaaattggataaaaatatataaatacatataggatgcaaaaatttaaaattgaagtaaggaaaaaaaattaaatttattattcaattgaattgaatataaaaggttttaaaaaaaatgaataatgtactaccagtaacggtgagagattttgggaattgggagtgatttttttttttttttttttgaaagcagaattgacagtgatttaaaaagttgggtgtttagagctcaaatttatatttttctaaggcttttattgtataaaaaaagtttgttccagttgaatagtttcatagttttttattataaaattatttttgaaaatattgggtaattaggaatttttcctcttgaacttggacatgtaccaaatcatgcctcctgaacttttaagatcgttaaaaataccttctgaactattgagattgttnnnnnnnnnnnnnnnnntccaattttagtaaaaaaattctaatatggataaaagatcagggggcatgatttagtacatatcaaagttcgaggagtatgatttgatagatatcaaagtctggagattatagtttagcacataaacaatcactgaaacaataaaattgaatgtaatcagacaaaagtccttaaatctaacaatctcaatagtttaaggagaatttttaacggttaaaaaaattcaggaagcatgattttgtacatgtcaaagtttagggagaaaaaaatcctaattaactgaaaatatttaatctaattagattttgtgttgatttagatttggagcaaagaaaaagaataaatgcttgaagtgaaagagtggataaggcccaattgagagcttagaaattgatccaacttccttatatatgtattattttgaatggctggatagggaagtatcatcaaagagaaatgggctcacaaatgtccaattctatcatcagccaatgctacaatgtaaatctatatcatgtccatcccatttaattacaagagattaaatgaagtacatgcccactatacatatctcgtatttcatatatatatctttgaacaataaagatattgtttgattttagttggaggtagtgagcatattcagtattgtaatttacattttgttatattaatattttcattgttaaattttttaaaaattactcatttattcttgtaaaatgttatttcttagaaaatttatcaaatttaagtgtgcatatttttgtgagtggttacctacgagtgcgatgtgttggtggtttcaattagcaactaataatctattagcttttcagggaagatgtgggaaagaattctaaaaattcctagactgcctctatcttcaaaggacagtataatatgaaaagcaacggtgatggttaatttactgtaaagaaagcctatgtcttggaccaaaagcatcgattaaatgaggaaagagatttatggagatggatttggaaacctagtctgcaccctcgattggccataatgctatggagatcaattaatgagactcaacatacaaagatgaagctcccttttattgagaataaagacattacttttgtgagaatgcagaggaatcttgctgtcatattttcaaggactacccactagttagagcagtttggttgtccgggccctatccttgtcttatgcactagatacaaggtactaacatgttggagtttttagaagctttgattcaaagtgtgcaaggggaaaagaagattggagctgctctcttatgcaacttgtgtcttttgggagatttggtctcaaagaaatatactctcagattaggtgggagaagtgtttcaacaaaaaatattggtaaaaaggtttgttttaggttcaagagcttctcctaaactgaagacattgatgataatcatcatctcagattatcaatggttccctctgcagctgatctttttgttgccactttttctgttattgaccgatgctttctggtctaaaggggaggcaggtcttgctgctatccttattgacaggtgcaatggtggctggagagtgatgcttcataagtataatgcaatgtcggccatggaagtggagacttgctattttctaggctcttcaatgggcaaagcaagagttggtggatgaagttgttctattttctgatgctcaagtagtcgtaaaagctttttctgataaaaatttcccccagactggcgatttaaacacacatccattgttgttttagaattaattaagtcttttagcagttgtcatttggtttatcttagtcattgtgacaatactttaggagattatttagcaaagagagctagactgccttatagattttcaaggggaggggcaccctgtttctccttttttttcttctcgttttaaatgaatcaatctttctctcaaaaaaaaaaaaaaaaaattccattagcttgttgcgattagagctacataaattttaatttacaacactattgtttacattaattgaatatatatgtaaaaataatttcaaacaataactaataatgttttttcttcaattatttattgtatcatttttaaataaaaaaaaatgcacctaacataaaattaagtatacgtgcttagcttttttctagttgtatagtaaaacatctattcaagaatacacttagaattaaataaattatattctaattgagaggttataactaaatagagttatactaaaaaaaaaattcaaaacatcaaaaaatatcaatgtaacaataataacaataaataatcttcaatactacattataatagaattatttttgagtaaatataatatttatatgtgtattacaa

SEQ ID NO: 113639 - DNA, 5404 bp, Cannabis sativa
tgttttacctttcttcgttgtaggagttggacctcttaagaaccggtgtggcggaggcgacggcggcggctcggtcatcggtcatggactcgacaatgctcccactgaagtattccttctcctgcgcctgaagattcccgaatctggggttctccgacatatagttaatcatatcttcgtccgccattttcactgcgttcttccacataacccctctcccaagatcactctcacttctcctaacattactataactacttctaatgctcctttgggatctgctcatttcatcactcggcctcacacacggcgagcttttcgccttggccaccgctgagctgccacaggcaatgagttggagaaggaccgagttacgactcggaaccaccgccgattcggatatgactcgatccactaccacaccttcgtcgaaccttttagaacggttgttgctgttgttgttgtcggagtcggtggtggtgacagttatggtttgttctgctttgtcgctgatggaggaaggtttctgggtccgattctggggttcttcgagttcatcagtggaaactcctctggaacagcgagaatggggagttgtggagctggtgtagctaaccttctcttcatcttcgtactcttcgggctcttcttcctcttcgtagtcccgaacgtcgtcgtatttggggtacttctctgttcccagtgttttcggtcttgtttggaagctgaagtctctgcttatctgaatctggtttaatctttctaaaacatacatgaaaacaccataacagtttacgagtcttaaccagtctaacttttcatagagaaattgttaaatgaaaactaaactgagtattactgaccagaacagccttcaactagttcagaacctttgagaacaaattcagctccttctgctgaataaattatatcattttcagccaaatcgttccacacataaccattcttgtagctcctacaaaacttaaccatattagtcactaaaaataaaacaaagtacaaaaatcacagagcctttatcaaaaaataaaaaatgtcaccttttgcaagaccaagagtagagtgagggcattcctttgcctctaagaagcgtaagcctatccattacatctataaatgttcatcaaagcaagccaaaccagacaatgtaagcaaaccattaccaataacaaaataataacaaaacaaagcctggctagctagccttattacctctcaaacgaagtggttgatcagctaaatgggtaacttccatgtagtgaggatgttcaaggtggccatttcttgagagatagtaaacaatttggacttttttgactggtttgactcgtggcctgaggcagacttttgctctgtccgggctggtttctctaagtcttctagaccgaacttccatattcagatttataaagttaacaacccttttgctgatgcttttagttttcttcgtttggagcaagagacaagtacttaacacaagcctccaatccactagtactactcttatatatctgtttaaaacaagaggttgaacaagagagaagaattaggatgaagatgttagaatattaatggttgtgacagaaacatttcctcaaaagaagtaatatttttacaggttgatagagatcgtctttaaatgcttttggagctacgtgttaaatgaaagtaaaaatagagagcgagaaagagaaagaggggtctatctattagctgaggcagataattacatgaaaaaaagttatggaaaagtgtaagttttttactgttttaagcatgaattttgacttttaatccagctctgatcccaaacacagacagaaaagccataccatacaccatttgattttattttatttgttaagaaaataataaataaatatatgtgcatagtagcattgatgaagttgacttttgatcaaagagcatttttgtcactcccaaataatgataacacgatcatatatattagattctgtcaattgaaaacattatagaggccgaggtccacatgacctgcattttttttttctgagttaggacactcctatgtggctttgtgtatgtttttcaaagattattacgatagtaaagatcgagtgattgtcgtttagtgctgttacctatggtctgtgctaagatgatcaggttgaaatgagaagcaagaagtgggttagtagaatctcatagtaaaaatcagtttccgacacattgttttgttttgtttcttttctttttcttttttcactttacctgactgtccttactgtctatagtttctatttatttcattttcgagcaatcatgtaaagtaatactgcatatcttttctgtataaataatggtaccaataagctttactaaagtaagctttttgatgattaacagtgaaataattaacttcaaagtttgtctagtgcaaatatgaaatattattacaggatttaggtgattaatgtcaattagtcgaataattacccctagtagttttatatctagataaagtgtaaaggatttcaaaatatcaaagaattatagacaacagtgatttggcatagaatgcttgatccttgtgatcatgacttttatttatactgagaaaatacagtcttgtgtcacaagaacaataaaatcaggtaacaaactttctgactaactgaaataatagcctttaactaacaactaaaagtgttttaatagtttggtgcagtactgatattatccccctcaaatgaaaggctgtggaacctatttgagtttgtattttagataatgaaaaggatcaataggtaaggccttagttagaatgtctgttatccttcaatagaaggaacatatcgaatatatggagctccttggcaaggatctgatcatgcacaaaatgcatatcaatctcaatatacttacagcgagtatagaaaattagatttgcaaccaaaacaactgctccttgattgtccacccgcaaaattagagatttagtaaaagtgacttgaagttctgatagcaaagagacaagccatttgattttaaaagtagcattggcaagtgcacgaaattcactctctgtgttggatcaaattatcccctaagaacataacatagtcacttgtagactttcgatcatctggaaaactagcccaatccgcgtccgagtagccatataaggacaagtgaagagctggtttcagtagaaaaccttcagatattctacctttgagataccgcagcaatctcttagtggcttcctagtattgtgataaattcaacacgtaagtgtacgtatcgtttttacaagtaatactcaagtaagtgatatccttcccgcaagaactatagctatgtaccaattaattgaatggaatccccatgaataggatcaaaccttattccatgatatttacataggatttctctttctttttcttaaaaaagtcctcgagggggcttagttgatccataatttatatttcgtcttttgtttcttttttgtttatttagagaaatatatcgatcaattccaatcctttatatttctactgattcttttccgatcgagatgtatggttcgatggatatatttgacaattgaaaaataaattttgaaactaaataatctatgcaaaaattaaataacaaagcaataaacaagatttaattaagaaatgaaatataggaaatttaatttcaattccttccacttcttattttgataatgcaaactaatattctttttctatctagtatgacagtggattatacaataatctatattatgattaagacatatagaatctaaattatatgacactatcttacatttctgaggcataacacatataatttgttgggatttatgtcttaaaagtaagtaattaatgaataataaattagataatatatgaaatacaattataagataaataatacattaattataatagtataattattaaatatctaaaaatttattatctttaaacaattttttttaataaaatgtaactaattaatttattattcacatcaaaagctcccaaaaggatatttttttaattcggataaaactaaaatttttgaaagcgagatatttccagtttttcaattttcggtaaatattttttatttcaatatttatgctgatgtggcacatcaatatttgtgtaaataatttgttgaaggtatttttgtaaataaaattaattttatgcataatattaaaaaaaaataataagtaatttttctccttgaactttcaattatactgattttgctccctaaaatatatggctggttaagaatcattcccgaacttttacatttacagaaatttagtccttctgttaggttccgtcccattattttatttaaatgatgacacatctttgtaaattagcatctttgtctcctaaactttgacaactatcaaatcatacccctcaaaataaaaatgagaaagatttaacattttctttttgcaaatttaaaaaaaattaatttagatcttaagaaaaaaaatcattttgaatgattaagataattaaaaaataaattaaaatttaaaaactaattaagcgatttaaaaaattatttatttttaattaaaaaattcatttagattttcaaaaaatatattaaaaaattaatttttgtaaaaactaaattttacgggaaaaaacttgagtataattatttttctcaaaaaaaaaaatatagatatgtttaagtaaatatatttttttagtttaatttataattatttttcattgaatttttaattagttgtctttatttgttaagatatgagtttataaatataaataaatttattttttcttcaaaaaatctttgtttctggatttgggtggattgggaaaatggcttaccgggtgtcgttgaagattattttagagagttgttcacggcttcggagattgattggggtagggtcacggcttgtgtgcataatcgggtgtcaattgctatgaatgagtcttttactattccggttgacgctgaggaggttcggaaactctttcaaatgcatcctgataaatctcttggtcctgatggctttaatcctgggttttatcagaagttttgggatatcgttaataaggatatcattcgattagttcaacacttctttacttttggtgaatttcctaatcatttaaaagaaacgaatattgtgcttatcccaaagaagtctaaacccgaaagcatgagtgatctaagaccaattgctttgtgtaatatggcttataagattgtttttaaggtgctggccaatcggttgaaagttgttcttcttagtgttatttgtgaaactcaaagcgccttcttacccggaagactaataactgataatatcttaatctct

SEQ ID NO: 113640 - DNA, 1422 bp, Cannabis sativa
ctaaaaaagaattattcttttagaaaacaatttagtttaattaaccattttaattacattttttattactatttaaactaaataaaataattctaattttctttacaattaattttataaacaatataatcttcttctttttttaacaatagcatataaattgtatgaattcattaaagacaaaagccaatcaaaagaaagattaaatcaagttaaggtcatagataagtcgataggtcggcccaccaaactttagcgctattattgacgttgaaaagcgattaactccgtaccatctgataagcgctagcggccaatgaatacatgagcaaaaagtaaaaaaaataacaccacaattatagtagtttacttctcttatcgcaaaaataatagagctatgtttaatacaaattaatattaaatacttttcataaagagaattcattctctttcaagcaaattataccaaattaatacaaattagccataaccacaaattcacacaataagattaatatttaattcccattaaatatgtaaattaaattaaataatattttgataactatttttttaagaaagaacttaacacatcctttgattcatttctctcattttcattggccatcacaatggttagatcgatgattgggttagatgtgtctcctttactgggagctattgctttttgcgcattctcttgtactttcatagatcccatcttagtttgtaacctagtctttaattcttttgttatggtgattctcatagacagcgctagctgttgatgctgaaaattagctcaataaaaatttggtattatgacagaatttttcatcaagttcagtctaatcgaaatgtaatttttctctcagttaacacaattccctttcggttataatgattatctctggttcatcagtctccgagctaaaaatgatatcaaggatgtaattcaatagagttttgacaagcttggcgtgaggaagaattcgtcccccttttcgaatgaaggagtctcctatttataggcacaaaggatagttggttcttcacttttctccttatctgatttgtccacgtgaatcatctcgttttcgcttcttcgcgtgatttcctttcttgttttcgctttctaagctcttcaagctctgcactttagtttttgagtatgctctacatttttctctggttgagctctgttccccttgagttatttttctcttttggtgaaacagtgtgtttctgagtgcctgccacattattatattagttttattatttttattatgcatagtgcaaaattacttttatacccttaaggttatttttatcatatagggctcgtttggtacgccgtataaaggtcgtattgtattaaataataaataacactatgtttggattaagcaatgtattgta

SEQ ID NO: 113641 - DNA, 3399 bp, Cannabis sativa
aaactaacaacttaacttcctaacagaattttaactgaccaaattttaacactccccaagataaaatgtatatgtatgcaatttcatcttatctttgaggtgcttgaactggtttcgaaataagggatttgttagaatatctacaagttgatctttgcttgaaacataattggttttgataacagatttatgcacttttttctaaccaagtgacagtctatttcaatatatttagtcctctcatgcaaggcatgattagctgcaacgtgttatacaattttgttgtcaaagtgtaaaatggtagggccttcatgttgatcttcagctcttccagcacataaagaatctagaccaacttacatgttttgttggccattgctttgtaccctccttcagtagaggatctaaagatggtgtgttgcttcttgcttttcaaggagatgatggattccccaagaaaaatatagaaccttcttgttgatcttttggtgataggacaagctacgtagtctgaatttgtataagctttcaatctaacgtgagagtttactgacatgaagatcccctgaccaggacttgctttgacacattgaaaaactctttgatttgtcttcatgtgactattccttggattaactaaaaaatctgatcacctatttattgaataggatagatcaagtctggttatggtcaaatattgaagctttccaactattttcctttacaaggttggatctgtcagattgcctttcccatcttgattaccatctttactaagcttcaaatttccttccataggagtagttacaggtttacgtccaaggtatcccaagtcttcaagcacttgatgtgcataaggtctttgagacacaaaaattcatttatctgatctagaaatctatagacctaggaggtactttaattttcccaaatccttcaatttaaacttgctattcaaaccactgcctagaagcctggctaaggccatatagagacttatggagtttgcaaacagcagtaattggtatcttcatgcaaatcttagagaaaagtattattaacatccaatcatgaatagcaaataaggctagaataaacttcatagtaactagtttagtcataagggaaaaagtatatgtgcaatcaaatccctcttgttggttttagcctttagccacaagtttagcattgtacctttgaatggtatcatttgcattaaacttgatcttgtaaatccatttacttcctatatgatgttgattaggaggtaaattaactacaaatcaagtacaatgttgagtcaacaatcatcgagagtggatggttgatcgtaacttggcttctaaggcatctatattagaatccatggaattatttcattctacaatcccttgagtttgactacacttagctagttcttggtgacttgaaatggataagatagtagctctgaatgatggagagagtctgttgtaatcaagaacttgtgataaagaatgtaaagtacctagggaaggcacctgtggaggatccagtgattgattagtagataaaaaacaatgatagtcattcaaataagatggcttgtgtgaaacttgagttggttttacaatagttggtggagagaaaataatagaaacatcagattagaaagttgatagatcaagtaaagatgaagatgaaacaggcataatagaaagaaaaaaaatctgataaacaactactaaattagtaccttgaacaaaggcggacatttgttcatggaaatgcacattcctagatgaaaaaagttattggtgttgagatccaaaaattttataagctttcattcctatggggtaccctaagaaaacaaaagggacttctttaaggggaaatttagtcctagaagcaaataaggtagatgcataagctaagcatctaaaaacttttatgtgttcataactagggactttggtataaagagcctccaatggactttttttttgtaaattgggactaggaattcttttaattaggtatgcagctgtagacacattcaccctaataatataaaggaagataggattgggacgaaagagctcttactacattgagtaagtcctaatgctttctttccacaacagattatgttgtggtcttttaacacaagagtgataatgaattattccaagggattgaataactcaggaaattgtagctccttggaattatcagacctaatttcctttatttgaacacaaaactgagttttaactagttgaatgaaagttggaagggtaactttagcttcaaatttttgtttaatgagattaatctaggtaaatctagaacaatcatcaacaatagtaataagatacttgtaaatttatgtggtgaaagtatttaatggccctcaaatatcaatatgaataagattaaaacatttttcagcaatgtggttcaaagaaagaaatgcaatttcttttgcttagtaaaatggtagacaatgcaatgaaaatggggacaaggataatgtctgaattacaaatttttatttaaaggatgttttttcaaaccagaaggatggccttatgtaacgccctagtatgtaaggcacattacgtattttctaatcattgtactaaccatttctagtcaaaggattttgcaataaggtgtgatttgcacaaaaaatctgtaataattaaaattttattaaaataaactgatttaaaagtttacaatcgggatcccgtttctaactgaaatacatacataacataatattctaaaaatatcgtctaacgacaaaaacactagttacgccagcaaatctttcatagatctcaaccctctagatcaagtcaactagatattcaatcttcaccgaagaccttcaaccaccattgttcagttcttttttctcataacctacacataaggaagcagctgtgagtcgacggactcagtaagaaaagcatgacataacacaataaatatctgacttgtaattgagtatacatacacccaattattataagtctactacccacatccaatacatataactgagtctcaaatgttcttaactaagcaccaattaaccataataccaaacttgccactcaatactctagtcgtactagttttggtagacagacgtagctccattactgtcacagtacaaggagtgaactactataaatttgatgtgtctctcttacaattacttaactacttattcattctcaccaatttaacgagcgatggctcaaaaatctagtccaaatttttgagtcaacaaggttaatttatatctgtcattaaataggagaaagaagaatggttaattagtattaacaattgggtaatcaaagcaatttaaattatatccattgttaaatattttatttgttt

SEQ ID NO: 113642 - DNA, 971 bp, Cannabis sativa
aaaaaaaaaaaaaaagaagaaattccaagttaaaatagaaaaagacaatttaagtgaagacatggaaagtttatattatatattttctaaaaagcatataacatgacaagtgagtccatatatgtttaagttgaaccactcccctattatttatataactagacaacgtaggaagtgtcatgttgtgatgtttattttgaaaaaaaagtgggaatttttaaaatcaataaaatatttgtattctttttttttaaaaaagttaagctctgagctaggtggaccctaaattataatccaattttttttttatataatcgtgtatattgtaattaaaataaatatatgtatcccagtaattttcaaatatttttgagtaatttacgatattgatgaataataaagttcaaaaaattaattgcacacatacctattgtttttatacacatatgtaattaattattttaactctatttttaacattttcaattatttacaatgagaaatattaaaagatacttatcagtgatgtctactactaaataatattaattattattttagtacaattaaatatcagatctcatacaatttaatttaataactattaaataatatcattaaatatttataaagtgtcgctgtaagataataataactaccattaatattaatgtttaataacaataatcatttataatttctcaaaatttatagtaacatatcttgttataccgtgatattaaaaacatataaatatatgatccaataaaaaactttcctagatatatagttgaaagcgacgaccatgactggttcaaagttgactttgcttttgtcaagtctaatattattaattacctcatcatcaagaaattatatcatccatatataaatatatatatatatatatcatttcacaaaaaatcgaattaggtcattattataacggctttgactgcactctaggattt

SEQ ID NO: 113643 - DNA, 5053 bp, Cannabis sativa
  modified_base (4363)..(4365): a, c, t, g, unknown or other
atatatatatatatattctagtgatcaccaatcaattaagagttcaatctcaattctcagccatgcatgttaataataataataataataatttttattaaaattattttcgtggatgagaataagatcatatctatatgtatatatgcagcaatattagctagcaataatgttttaatgggcatgcatttgttgccatatgaaacacacataaaagaaaactagctcgtacatatttattaggccatgcaccatgctgctctctacttcttcatatatcttacacgtatacatatatacatatatatatatacaataaagtattgtttgaccccaattatatcctcatctctaaataaaattctaaacatataaactaacaatttaagattcaactcaagttaaatttttaggtaaaaaaggtcaagagaggacatgccatgatgccacccaactcatcaagaatgaaataaaatgatcatgatcattaaaagtcattcctagttttgaaaataaataataaattaataataacacaaaagactagggaatgtgacatttttcagttctctaacctgtcaagttatatatctatatatacacattaatatatatggatatcttttcaaactaaaactcttgaaagataatctatatatatatatatgcatgcaattaattcaagtacatatatatatatatgatgatgatgatgatgtatgtatgtgtatgtattagtaggtataggggaagccccacagtcgagtgtgttcacaaatatttgtcaaaagcaattctaggtttgtcaacttaatcagtgtgcattccacgtggcttcaatattagtcgcatgtaagacacatgtcatgcacatgtaatattattataatttttattttcagactatatacgtacaaaaatattgagtcttgtataatttaatatgattttttataaaaaaaatcgctaattatttaaatggtattaggtactatttataccttataacaatgcttttatatgattacagaaatacttaaaggtgttagtgcctaatactctcctttttaagtattatattgttactggtatatacatacaaaaatacgtaatattacatataaaaaataccaatttacatttttgtatgtaatattattataatttttattttcacactatatacatacaaaaatgtaaattggtggtgtttaacattttttatggtgctatgtgtttgtaatgaaatattaagtcttatatattttaatataatttttttttttataaaaatcgctaattatttaaatggtgttaggtactatttataccttatagcaatgctcttatatatttacagaaatacttaaaggcgttagtacgtagtgcctaatacttttctttttaagtattatattgttactggtacaattacgtgtcgaattctatataatataatttaataattataaaaaatattactaactaatcgtatgatattatctcaaattagtgttgggcaccatgtcttatagaaatgctcttatatatctacgtatttatattaagaaatgctaaaaaataccaaaaatgtctagtaacttaatattatattaatattattagtataattaagtattaaatctcatatataatttaatttaataattttttaaaaatatcgttaaccaatcacaaaacaccacatccaaataacagcctaatagccaccaattatatatacacaataacaatgatgaatattaatatatggatgagtttgtttgtggatgtcttataattcctatgaaaattaagtcttcaatggttagtgaaactctacttacccaaatgaaagatgtcaagagattaggtgctaaagagtaaaagctcttttaatcgtgttagtttccctaacaaaagacttaataaaagaaattataataattattatattttcttaattaattataatatcatcatattaattatatatgtgtctttttcatatgggtagactttgttagactactatatatactacttcaactagtattttttggattgcatggagcaggggtttagaaattaataattattattattatatactttaaattcaagtgtagtgtagtcaatatatatttatgttcatattattattattatatattcaaaaaccactaacctgggcgggtgacctaaattttatgaccaaattattacttttttcttttgggttaattaaacattttaatattattgtgcatgagtgtatataatatatatatatataatgacattaattattagaagtaaaaagtctaagatttactatattaaatatttctatggccaaagtttgcatgtttgagtggatcagtcaaaatatggcaatatataaaatcaaaatcaatcagtaccattttcaaagctcaagttggtagaaaatatattttccaaggttgaaattaaataaatttgattaattagggctaattattttcaattaaagcattttcaagttcatacagtttaatatttccaattattctttatactatataagttagatagaagtacattaaaataatattataataataatgataattagctccaagttaatatttctttgtcatttcagattgattttctgtaattttatatatttaaatacattctttgttataataatgacttctgaaattaacaaaaacttaacctacatattcaaattaaaaagcaatgataatataataagtaaataaattttcttcaaaaagtaacattttaattatgatgaggcaatgttaattataatgcacattcaatcaattatatataataataataattggtttaaagccagtactagttttgattttgtaagattaatttgatctaatataacacatcagatgttctctgtaattgataactttcaataatggaaataaaaataaataaattgtagtttttacattaaagaattttatatgtgacaatatttatataaaatttcatattttattaatatttactatatattaattttttttctttatttcataagtaatttattgttgggtcgaaactcaaaattcataactcccaattttgaaattttattttatgatattaaaattttattctctaattctctgaatatctctgcatgtctaagatagacaataaatttttataaatgaaaaaaattatctactataactttcataaatttttataaatgaaagaaaattatcaactaacttttattttaacctggtttcccttaatttttttttttacagtatatataaaaatattaaaatttaccttatttgatttgaaaacccagtgatgtaagtaaaatacattcatgttataattttattataattagctaaagatcttgtactgttaataaataaattaattaatattcattcaatacattttatataaaaatatgttaaaatgagatcttgttatgttgattgagggtttttttttttttttaataataataagaagaacttgtttttgagtttgagtggcctggatttttctaaatccatcttatgaaaattgatgagttatacatataaatatatatgataaaatctatagcatgaccaataaaaaagacaaaaaaacaattaaattaaatattactgcaaattggccggtacttacctacaaattgaaaagaaaaagaagaaaaacaaagaaaattaaaatttttgccacatttttctttctcacaagaatcttcaatcattatttcaattattttatgtcactaaagggtgacatatttctttatctaaagaagacaattatttttttatttattattatctaaaataaaaaagaagaattattatcatatgcatatataggtcctaaacatgccaaacaattgggttacggtaggtttggctatatatgcttctaataataattaacttaggtaataatagggtaaatattattttggactttatgttttgcaaaagttactgattggattctttgttttattaaatgacaaattaaaccctgtatttttcaaaatagtaaaaattagaccatgagcttaattttcgacaactttttttttttagtataaccaacttgaagacaattcctaacatgaacaaatacagaaaatgtaaatagttttctcataacacttttagattggattattattaaattttattttaacaaaaaatcagtttatggtcctatttgtaccattttagaaaatacagggtctattttgttaaggaaatttacatagtatactaacttttactatttttttacaaaaatactgtcagacggtattttttannnttttactgtgttttttttataagtttcatactgcattatactgtgttaagtttcattggtgttctactggtgttttttagttgctctactgttgttttgagttattctactttgtgttttaatggtgttttataaaaacacagtatttttgaaaagattttagtctgacagtatttttgtaaaagctaactcaaatttcagtatttttgtaaatttctcttttgttatttaacaaaacagaaagtttaattgataacttttgcaaaaacacagagtccaaaataatatttattatttctaaaaattttagttcactcttaattatagtacttgtttatatatatgtttagtttattgtaatcaacattgtactcgaaatatgattacaatttcaatatttggttttcttttaaactttggtaatgctattctattgtaatgattattacatcattacttgtatgaaaaattattacactcatatgtatactttataaattcttattatcattacttaaaattactattttactcctatatttatacttttcttacaaaagtcgaataattttattaatttaccacttattctaaatattccttttcaacaacaaactaaacatagaaatcaattcatattactattcttattttattacattactattatgtgacagtcagtagtccc

SEQ ID NO: 113644 - DNA, 4144 bp, Cannabis sativa
gccttcttcttctcttcttcctcaactttccatggacaccataaactcaccttctctgcaagagccatcgaccccaagattgccgatgccgctttaccagtcaacggctcccttccttcgtctgcgtcaacaactctatcaaagtaggtctattgttgctatcttatttatttcatatggtatatctgtttagattgtgaccatttttcgttaatttcgatgtttgctttgctgcccagagtgagaaggcatacgatatcagtgttcgttggggacgagagtggaatgattaacaggattgcgggagtttttgcgaggagaggatacaacatagagtccctagcagttggtctgaacatagacagggctctcttcacaatagttgtctctggcactgaaagggtcttgcaacaagtcattgaacagcttaataagcttgtcaatgtcttgaaggttctatctctaatctataatctattacccctaaatcatcactgacttcctgaacctatattgttactggattcataagatttagagtcaagttttatgtatttgtttgaatctatatgtgtataacaatgtcaattatgattcttcggtgaacaggttgacgatatttctaatgagcctcaggtggaacgtgaactcatgcttattaaagtcagtgctgatccatcttaccgtgctgaggtacttcgaatttgactataactataagactatgagaatctttctactttctagtgattttgagctgagttgaagattttttgggtttttacaaattttcagattatgtggttagtagacacattcagagcaaaaattgtggatatatcagaacactcattaactattgaggtaattatcaggacaccaagggtacccctttgtaataggttttcctattttattttatttaaatgaacaataacaagcaaattataatgacttgtgatattttatgacatttcatgatgaatttgaattatcaaaagctcttgactgtgtttagaatttcacttttaattacagttatggtattgttttcttatgatctccaggtgactggagatccaggaaagatggttgcattgcaaagaaatttaagcaagtttggaatcaaagaagttgccagaactggaaaggtttggaagcataaaacgtgtataaaatacttaataatgtttttgagtagttgtctttgactttgttgtgaaaaaacaaagttaatctctaaatttatgaaattctttctttattagatcgccttgagaagggaaaagttgggcgcttcagctccattttggcgatactcagcagcttcatatccagatcttgaaggaacaactcctgttgatgctcttgcaggaattgaaagtagatcaatcaaaagtgaatctgataagtctgttggggtatgcaatagtagttaatatttaatctgaaatgtctcgtctttttttctgtttaattctttcttttccttttcccaatagattcattaactcttctatatctctttgttcataaagggtgatgtttatcctgtggagtcatatgatgtctctacgttcaatcatgttcttgatgctcactggggtgttctcaatgatgaagatgtaagaattgtcaccagcattgatatagggtattttaaaaaagatatgtgtagtgtgcaatcataagtcgttagtaattatcatttatcactattataaagcataggaaacactgttgttatgttgtcaacatactcaacttccctaactagcttcagggcatttatttttcctgtgtgcggaagtttaaccatgacagactagagagtttcttgctcaatttgctagatatgatgtatttattttttgtaagaggaattgtgatttgttcttaatttcagacaagtggttttagatcacatactctgtccatgcttgtcaatgatgttcctggagttctttacattgttacaggggtttttgctcgaagaggctataacattcaggtagtttgctttggctctgtatgtatgctatgtccatcatgtttcttctatttttatcacatgtgctccttttaataccttgatgctttttttcaaccagagtttagctgtcggccatgcagaaagtgagggcctctctcgaattactacagttgttcctggtacagatgaatcaattagtaagctattgcagcagctttctaagcttattgatcttcatgaggtaagaatcttagctttctaaaagattgctttggttcatacgagttaacatacctggtacaagttagtttctataattttatataggattcttagcatggttgttgattttatcgggattagaaaaatagtctttagattgttccttatgtgttgctgttattgttcttcacctagctgaaaaattgtagttgacaatagtgtttagcaggggccactgattaattaatgagttgcgttcgtcgttcaggtccaggatcttacccacctaccctttgctgaaagggagttagtgttgataaaggtggcagtgaatgctgttgcacggagagatgtccttgacattgctaacatatttagggctaaagctgttgatgtttcagatcatacaataactctggaggtgaatctccccttaagtgatttttatattaatcctagttcatccaaaatggcctattgtgactgattactcatttaaatattattcagcttaccggagatttgaacaagatggtagcactacaaagactgttagagccctatggcatctgtgaggtgtgtcttgcaatttcattatcagatttgagaatatgttagcttagatgctgttgctgtaaacagagtaggcctagtagacggtgttatataccctatattttctcttgcatcattttgtgatgacattaacacttcttccaggtggcacggactggacgaatcgcactggtgcgtgagtcgggtgtggactctaaacatctccgggggttttcttatccagtataatctgccagtgatggtggaaaagcatcatgagagcacaatgtctgagaatgtagacgaatctgtttggtgtgctaatgtgttaattgacttggtcactgaaagggagatgtaagttgtaaagctcatgtatgcttttgtaaattttggctaatatttccatctgagttagttacactgtttgttttcattggtataggaacaatttcacttaattttcctgaactctctttacaattccctttgtttttgttttcttttttctttctcaaaaaataaaatatatgattaatatataaattgttataaaataataatatattatgttgacattactataaccctcttggcgttcttgatgtaaagtttacttgaaatgaaatagaagccttgcttttcctctcatattattctctttagtaaatttatttttgaatataccttaattagtaaacaactacgtttaaaaaaatttaaattttatatataaaataaattatgtattttatttgatgataattaattaataaaactgtattaaattttaactttattaattttttatctaatttttaaaaaaatatataaaagaattagatgtaaaattaagccaactcgatctaacgatttagaatttgggttttatttgtgttatgattaagacaataaagtgctaagcaaactctcttttgcactctcttttacactctctttttaattgagtgacatgtgtaacaatctaaattatgtttataaatagttacaattaagtcctcatttagtttttattaatgataattaaaatgagtcatctcatttttttattttttattttttttgaaaactaataattaatctatttatttttactaataatttaaaatttaaatgtgtgattctatttacttgtttgtttgttttttagacaataaaaaaatttaattaaattatataatttttttattaaaatttcattttttcaatagataatatgtaccacaataaaccatttttaatttcttttataataaatattggctatttactttataaaaaatggaaaactatttcttttcattcattttttttttcgtatcattctttaaaaaaaattcttgtttttatttt

SEQ ID NO: 113645 - DNA, 9220 bp, Cannabis sativa
ttttttttttttttttatttggggtaacaaaactagagtaaagacaataattatttaatttattttaattttgggtttggagtaggggtagggttcgagaatgaaacataaggctctttgtgtcttgactgagactgagaaattggtttaatgtagtatgaaagaaagtgttgcgcgttgtcattttcgtatggtattcaaactttgttttctcaatacaataatattcttcatttcatccatttcaaacaaaattaataaattaaataaaaggccataaaaaaaatatggggaaaaagggtagacaattgtgttgatgatcagatgattattagtgagtggtgtctttgggaagcgaattttaaggcttttaaaattttcttattcaaagtgcaaaataacattattttacacagaaaatcatagcatggaagcatacaaatcttctcaagtgcaagaaaagtaactttttggtctaatttaaacattattagactcttttatgttaggttactcataattacctacactaagttgtgagtgagtgagtgagtggtttatgaaagcttttatagtatctttcttttggcgttctaattaaacaaatataccccataatgtaagcaaagtcatcccaccattgccttttcatccgagtactattcttcgtcggacctagctaacacgtcaaagtatttcaaaggcctccaataatcccaatatcattattaattcttgttgtatatttaggcaatttattcaatcaattctcccaacccaaactccttttgtttcttgtgcgacacaattaataataaaaagctaataagtgaagtgtgttttgtagcgtggtgagttaattcataaaacatttccttctagtgtggagatgtgtgtggcatggcatgtgggataagcaggcatttctttttaataatagaaaaatttcttccaaatgaaaccctgcttaattgcttgctcttatccacttctcgtgagaataattatcaatgaaaaggatcaaataaatttactttaaactattatcactatttcagtaccccaatatgttaccttttgccccatatagaaatgaaaacaacaaattaaaacaggaaaaaagaaaagaacatttcctttctcactttctcttttgttgtaaattagatgggcaccacagccaaatgtcacctgctctaggtcttttatttattttaattattttttggtattaattaaatttctatacaaataaatttatttggacaaattgggtccttttgtatttatttaatcatagctcaattattttgtttgggcattaaccctttcactccctataataaccaaactttggcctatccatccagtctgaacacatattcagcacctcaaccatagacatagagtataatatatcttcgaccatctggattatatattatagtttacttgatacatttttgttaaattaaaaaaaaaaataggagtaaatttttattttttaattttgtgggtaggttgaatgttttacctactattgttggaagatgatttaatttgccgacattggaaaatttgtatcttattctgttttcaaataacaaattaatcataaccttataataaaatattttgcacactaaatataaagaagaaagcaccaaatattgttaaaaatcaatggctctcaactttagctttccatgcacataaataaaagagaattgttttttttttcaattagtataaaaaaaattattaaaaatatatatatatataactattgaaactttttccacctatatataaataaattgtaaatactttaaatttagtattgtcaatttgagatatatacaagtactttatattaaaattattatgtaggtaattgtctccaaactcacgcactaacattgtttattttattttattttgaaacacaagcactaatattattgttttgcatctcagtttataaagatacagagtcacaaaaagtcattattaaattttccttttccaatactgcccaatagctgtcaatgtatatgccaaatctctaattataaaccattataattaattagtaagaaaagaaaaagtaaacaaaaagtccttataattcttctttctttgcattatatattttttagagggcccaacaccttaacaataggacagtcccaaacctttagaaattaaagaaaaatgaaatgaaacattgaatagaagaagaggactatactagattacatattggccattgtttgtaggtgaatgtgacaaataatttatgagggaagtagacaaataaaaatatttttaatttgctttagtcagcatttagtgtacaataataataaagttagatccctatggatgagaaaaaaaaaatatagtactactatccatcaattcaagtaacacacattacatacattttattcaataaaatcttatacaaaacaaaattgtccccacatttgttttaaaatgccaaactgccgattcactttgtatgctctacatgtgtcaatattaacaaaatattaatatatgctttttgttttggttatgagtcatgacgactcgagtaaattaattagttttgcatcatataattttgtgttattgtctttcgatatttttttccttttctttctcaagtgttagaattagtcgattgtgaatccttttctcaaaagggaataaaaaaaaaaaacttgggcagtgggatagtgaagtagagatgatgatgaattgattgaagaacttcccatattaattacatcttaattagaacaataatttaggttttcttttattttttttttacataaaaagtataatttaaacctaaaaaaaattatgttgttagtagtaagtgcagtatgtgttttatattatatacataacatttgtatatgccaattattaatgtgtaaatatatatatagttatatataaaaagaacatttgtatatgccattgccaacccctttatgtataatatgtaatattattaatatcaacgtttgactcgctcgctcctaccgtgcatggtggacccttttaatttggtggggctttagtagacaaatatggtggggtctgtgtcctcatcatcaagggcatcaatcagtttgagagaaggtttcaaaatataaataataaataaaaaaaaatagaatctctaaaaaaaaaaaaaaaaaagtagaatactcctaatttcgttttaaatatttatatctatatttctcatttttcagattaattatttaacattttgctttgggagcagtcggtaactttccctatttctagagtagactaagtccaaaagtgattggccacgaccttactaccttacaagaggggaaaaaatcatagggtctttaggattaaatcttttagtgctgtaagaaattatatatatatatatttagtatagtgggatttgtgcctaaactcttatcaacttgaatgatatgtagtagtgctatacataagtactagtcaaacaaattctaaaaacattttaaaaacacttacgccataaatattcaatactttttttaacaacaacaaaaacaaaaaattactcaaatatgtgaaaatatttttaacttatcatatttgctccttcaaaacattctgaaatgcattggtacacattctgaaaataccacatgacagcagtgtgtagtgggcgtgtgccctgaaatccctgatttaagtgtcttcgggtggcactgccactcaccgaccacacccctgaggaaacccacctttttcttcgattaaatcttcctagcttctattcaaaactaaataaataaataaaacttttctacttaattacctaggataattctacaacaaatgacttttattattttgagcattgttatagggttccaaggttcctagtaccaataagaggtggcgttcaataattatttagcggatctttataatattttgtaagtaccatggtttttatggcaacttatgttggttgttgttctatctgttgagtttttagttacatctttcctatatttgataattgttcatttaagcctgtgttagttgtgtttgttaaatctgttttcacttatcttttgctaggtcaactttaaattcgttttattagttggtacaactcattgctagctgtgatgagttggtttattgttggttatgttggttgtaccgaagtggtggttattgttatagtacgaattttttgtctagaaatacgagtacaatctcgtaaacaactgacatgtggacccggttcctgatagaaaaggatgatgtgtcaataaatagtttcagtagagctgacctcacatgatgtgaactagcgagaagatgcgaccgagacaaggtctagtcgcatactatgccctgcatagtataagaataagcaggaccaagagaagtcaatactggtcgcgcatatactgattatatgcgatgatcaagtatatatctctcttgtgacgagtaaagaacgtctctttatataggtttggtccgaacgactaatgtgttcgacgactcgttagagacttgcatgtcttatgctgtcaacacatgcataaagtgttcgactgtgcaatcaaattaatgtgaatgcagacattcagacaaaataggcccaaaggcctatcctgcgagtacaacaccgaagagcccgtgagctcgtgtgttagaatatgaaaggacaagtggcgacttatcaagtcgcatatgttgctgcaattaattcaagaacggacaaaattgttcctcatttattctttaaacgtttattttgattaaatattgtcacttattgtaaaacaattttaaaccaatcagttatgtaatcctaaaggacacttgctttctatataaaggggtgatccaaatcaaataaattaagctgaaatcattacctgaagtggactaagtagaccaagctatgactgaaccactataattctcttattttgtctttatttctcctttcgtttttgtctatttagtagtctatactttgagtattcactattttaagtgagtactggcgcgtatctattttttttggtattcaagcagtccttgaatactcgcataactgttgttgagtattctattttactttgaatactcgtaatatttggtgctatctaaattcttctgacaacatttggagccttctgtgagaatcattatatttctaaacttttggaggagaataaaaaataactatagattagatgaccacgaacaacaaaaatgaatcttgcaacgttggcactctcaatgtttccatttttggaggaggaacaaccccagttgatgttgtcataggaggagtaagacgtacaactgtaactcccctcaacctatttcctcaattcttagggcatgttggagaaacctcggcactagcagctacagtgggacgatttcttccaatcacgcctgctgtcacctctgagtgaatcatccaactgacaatctcgcagtatacaactatttaggaacaaatgtgtgcattacaagcagagaaagagatcgggttcaagcacgacgtccaccacgagtcccaaattgacgtcgcactgataattagttaattaatgatacaaggcatcataacaaacattctaccaatactcgtaattgcatgggaatgttcaggtgagactgaccacgctatactcgacctgaatcaacctattcgtgaccctgtacgtagtagactcttgatacagcacccgtcacagcaaattccatggccaatttcatagtaattgaccaacattctacatacattgcagtaataggttgcccaatcctaaaagagatgaagatcgtaacttcaacctgccacctcacaatggaattccctacacttgcagaagtaggatttgtaagaggagtccaattggactcaagaggatgttatagcactacagtcaagattgcagagaaaaataagtcgtgcaacaagatatatatgctcgaggtgccgcatcctcaacatgaatcattcaaaatcgatgaaatctcgcacgaggagaaactttacttagaacccagagtcctcgatcactcaaatacaacacaagccactgaagaaacaatagaggtaccaattgattccttcgataattggaaagttttaaaaattggtactaaacttagtatgcagtagcaagaaaggatggtcaattctctcaagaaaaacacggatgtctttgcatgaaaacattcagatatggtcaaaatatcgcctgaggtcatgtgtcaccgtttgaacatcgaccgtgatgtgcgagaagcacgacaaaagtgtcacaaaatggaccctatgagataccaagcgctgaaagaggaagtggatcgcttacttgcatatgatggttcataaaggagtcattctacctaaattaattggttagccaatcccgtcttagttgcaaagcctaatggctcgtggtgcacttgcgtcgattttatagacttaaataaagcttatccaaaatacaacttttctttaccgagcattggccaacttgtcaatgcaaccgcaagtcatgagcttcttagcttcatggacgtgtacttaggatacaatcagatcccgatgtacgagccaaactaggagcatatctccttcatcactgatcgagatttgcattactataaggtaatgcctattgggcttataaatgcaggtgtgacatataaaaggttagttaacatgatgttcgtagatctgcttggaaaaatgatggaagtatatgttgaggatatgctcataaaatctcaatatgtgaccgatcatgtcgttcatatgaactcaatgttcaaaatccaacgccaatacaaaatggaactcaacccgcttaaatcgtataaattagattagattgagtattttttaaatacccctatttttcatgagttagtataagtaacattttcatgagttagtgtacgtaacactttattttctaattgctcacaacaaatcttctgatatatttgatattatttccacaactagtgatgatatatagtgaagccgcttggcattgatttttcaagctctatggctttttttttttcaaaaaaaaattgtttgcatacgtggggacaaggctttctaaattaacacaaatatttgagcacttttcatgttacttcggcaactaaatgcagtgtcatatataatcatcattttggcttttactttttcttttttgttttcttttcttttttttttctgcaaagagtggcttttacttaggatgttgaactataattatacaagtttttttgtccccttctataagacttggtggtttgcacatgcatattacttactaacacagacaattgtgacgaagacacacattagtacatcatcatattttcttatacacataaatttatataaaaacagtaccctatctaatttcaactaatggaactgcccaataagttacatacacgagtctcagcaaaaaaaaaaaaaagttacatacacgaaattaagcatttgtccctcccaaaagaaaaaaattaacactcttaattagcagttttcagaattgagctgcttgtatttacatatctaattacacaatagcatccaacattgtttatgctgatgcgtatgtgatcggtgtcactatcactggacacccactttttagtcttgaaaacattgcccacttctcaatgcttgagtcttggtcaatcaccttccacctgaattcaatttcattgtcagtgtatgatacatttaatgtaaataaatacgtaaggctccttgctgaattttatataccaataaaaaaaggattagtgttaacactacacgaaaaatatacactagcgccggtcaacatcgttaaccgacgcaattgattggagcataaatttagcgtcaattcaaaacagaagccactactcaatcgatagcatccattataataatagcttagaaaatactaagtttgagatactcaacaccatctgtttgtgcctgattaatgctcatctgaatcttcaagctgaattaactaaggttgcttcactttctcgtgaacatcatccaatggcacttgtagctttttctcaaattttcaaagcatattatataatgtaatttcgagttatatcgatatagttatgacaaaaatattatcaatagtcgtaacaagatttcaaagattctaagaaaattgcaaattgctttaattagagacgggtgttttcattatgtgtgcaaaacaaatgtgcccatacgagcgaagttatcttctcacacatataattttttaagacaattatttaaacattgtcaattgtgattttagtaagtttttgacctctaaaaactctgaaaagcatttgatgacaaatgaaaggtcaagattacaagtttcttcaagtgcttttcttctttccttcttttattgttttcaattttaaattaatggatgttattatgcttattatgaattaaactttatctctaacgttttaattaatgtaatctctttatactatatatagatatttagttaatacagtttttatgatttatccttcttcattgtgatttatttaatttatgtgtaagactttcgggttctttctcatcatctacataacttgtatgaatttgaattaaaatctgagaggaagtgagaattaaattgtaaagctcccacttcagctgtatagtctcatacttatacagtatatacaagtatgtcattttgactgctgtctagaatgacgtctggtcctacaaaacaacacgagtctttccaatgtgctttgtcctcacttacaagtttcttaggaaaactttccaagaggtcacccatactaaattttttctaggttaaacacacttaactttagagttctcaagggataggctaccgaaaagaaaatatatcttgttggcataggtagtacccataaatttatttaagtcctttttatctctgtagtcttatacctacatagtgttagaatcatcacaattgtgatgtgagattgcaaagcttactgaatctttccctatatggactgttatagtgacggtcagtagtcccgtgatccgtaagggaaaatactgggtaagctgtgcaatcctacacagcctgggaaaggtcaagtgggatgattttga

SEQ ID NO: 113646 - DNA, 2696 bp, Cannabis sativa
  modified_base (1067)..(1068): a, c, t, g, unknown or other
aatggtcggtcggtttttggattagaaccataaaaaccgaaaactaaattttagattttttgtgtgtaaaaaaccgactaaatcgaccgttgctcacccctagttggaatgactcatatctcattcagacagtggatgtgacatactttatatgggatgacatatctgagatagaatgatataaacataaacaagatggactacttaaatctaaaatagatgatacatctaaaatggatgacttacatccaagatagaagatacaaccaaaatgaattacttatatctaagaaggagaatatatataagactaaagacttaaataatttagttaaaagaagttgcacatcaggagagatatagattatagatacttaagataaaataaatgacacttgtcaatgtatgtaaagacaccttataagaaataatagacatatgataaagtaagatcttgttatgttaagttaacacttgagtaaaagagttatataagtagaggaactactactggtataaaagtagagggaggtctgtgggggttaaagaggcagagagaagattaagaaaatgactgatttttttatgaatgataaataattttttggtcaaaacaatgtttttttttttattgtggatataacagtttcatatatcatatatgtacttgtattagtagtatgttttttggtacagttttatatatgtacttgtatattattttatggctacagtacatggaaattttgtttccaaacttataaataatattactaattatatgtcatgaatttcaatttaaatgataaaggaatgttaattacaatctcttattataatattttagtaactttcatgttcgaaatcacatgtcgaaatatttttttttcacaacgttattcgttatagttacaatatcatttttgtaaatgtttgaaaaaattcgaatagtttacagtaccgaaaacaaagttcctgatatttcagtttaccacacattcaaaaaactttaaacgtattttcggtattataaactattcgaaatttttcaaaaatttacaaggatnntgttgtaagcataacgaatactcccgtaaaaaaaaaattaaaaaaatataccaatatatgttttcagacgtgaaagttaactaaaagattgtaatatgaggttaacggtagcaccgtagcactcttttaaatgatatagttgacaattgaaaagttgtaaataatataaatgtcgaatttgaaacattattactctacaatattaatgtcattttgaattactcttaaatagtaccatgtaacattaataccttataataattgttgagatataaaaattttagcatatttatttaaagaatgatatcaatttttaattttaataggaatgcaattactacaatttaagtatgtgtgttgatgatgtgttatccctttcacacttctattaatttgatttgataggaagagtgacagagtagtatgctgtacaaatttgagtcacacgaatcatggggagtgtagtttactctccacgaaattagagtatggctaagtaaactatttcattttaataaagcaaagtagtatggcccatgaaatggtagcttttgtcaagatatgcattatgtatgtaccttgttcgtgaaatcaaaccgttcgattgattgaccaaatattctttgactcctgtatttgcctaaactcacatattacttcattggggaacacacatttatttaccaacttgacctatccaacggtccaagtttctccaaggactgaggttagaatatctgccttttgtgggtaattttgttttgtgcctttatttatagcatatagcaaatgggtggtgtttggtttatccaaatttgttaaagatggtgcgactcttgtcgtatgtatgtgtctaagctaggtcttaatggttatcggccttgcctaatgaaacctaaccaataaatattgatatcttctaagctaccatacaaaagagatgatcagaatgagtgagcacacatatgtagcaacctatttcaatctagtaccaacccaaaaaaataaataaaacagaagtagatgaggtaaaagtctaatgaggacaatctttttgttggttgaataattcatttcagtttagaaaaatattctcacactttcatgtcttatctttttatgatctagtttttcttttttcttttaggaaaataataatctattattaatatgaattattatgatgtacaatggtcctaacaaatagaaatacaaacattaacatacttttatttgcttaagcatttgtattactaacactttcttttgaagcaatgagcaaacatattaaacttcagaattattttgtgtataaattgtggagattaattattttcaacatacaaataaaagtacaatatttgtttttttaaaagtaaaaatgtgtttggtaattgttaatggttaacccccaagaagctttcttgaagccgttcttggctgaagccatagtttttgtttgtagcttaatgctctatatcttatttaggcatttcaaaattaagatatcctcatattaccttaaattttggtgaaaattacatgaaatataaaattttgtaaaaaagttataaaaatatggcatttataggtttgccactcttctatggtattttttcacatttaag

SEQ ID NO: 113647 - DNA, 1429 bp, Cannabis sativa
  modified_base (1346)..(1348): a, c, t, g, unknown or other
aaaaatgcttaggaaaccctagggttagaaacttctgggattcttctttatcatgtcttcatgcagttttacagccataattattgtttctgaaatgcatagcgtgcgtctttcatctcgcttattctaagcttcatgaactttttttccctaactcaagaaaattttctaacttcttgagttcagacttttctttaaacatagttgttctttaatctgttgacttcttgagtactaagtgaagccatcttgtagtagtgtggaactcaatttggcgtaccattgcctcgaggcttatttgagaccatagatacttttgttaagcttacaaactgtgtttagaggagcattataaccagggggaattttcatgtagacttcttcaagaagttccccatggaggaatgcatagttaacatcaatctggtgtatggtccagttgtgaatggcagctaaggccaaaaaaactttcaaggtattgaatttcgcaacaggtgcatatgtttgggaatagtcaataccgagtttttgattgaaaactttagcaacaagacgtgctttgaatctctcaaccgcaccagcttgattgtatttaaccttatatacccatttacaacctattggcttgtgaccaggtggtagcttggtgatgatccaagttttgttcgtttctaaagcttgagtttcatcatccattgcttgaagccagtgtttaaactgagaagcttcagcataattttgaggttcaagttgagtatatgctgcaaggacagcagcacgaaactctggatggagtttgatatatgatagaaaaggttctattggatgattagttgaggctgtgtgacaaacatagtcttgtaggtgaataggtttagatatttgtctacctgttttagtggtgataacagggctaatagatgaaggtggagcaggttgtgggcaatttattgctggtttgtgaattgtaggaactgatgcaacaatgttttgtcaatttattgctggttcattaggtgcagctggtgcaacattttgttggtaatttgttgctggtttaggagtagcagcaggtgcagcagattggtggcaatgtgttgctgttgtatgagttgcaggaacacatgcaaagggttgttgggaagatgttgcagttttagtagttacaagaactggtgcaacttgttgttggcaaggaattataggttgagagagacatttgtcaatctcatgtgtgggagtggtggtaagatatggaaaaaaaatttcgtgaaaaattacatcacgagaagtgtaaatctgctgagattcaatatcaagaaggacattgttgggttttatgcccnnnataaaactcatttcaatacaatcagatttacttattaatatagatcagaaataaaatttaatgtttcatggttcacatgat

SEQ ID NO: 113648 - DNA, 4185 bp, Cannabis sativa
aaaagagtcatatttttcatagtgtaaaatgtattggttcaaaaaaaaaattttgaaaatgtttaagtatagaaaatcaaatttcccattatatttatacatgtgtatggtaattttatttatttttatttttattttttacattttctttcacatacctctctttttctcataattttttttttaactaggcctacatcgaggtacagatttgggggtcagggccaagatcgggatccagggctcgaggttgggcctcgagtctagggtaggggtaaggatcagagagactgaggctgagatttgggaccgagacctgagatcgaggtcgatatccaggatcgaggccgaggtctggcactggggttcgaggtcctccaagttagggtatgtgcctggtgagatccgtgcccaagttgggtctaagtaggagtgtttgcagtgtgagtggtgcatttttagcctatttttttttttaccgaaccatacatgtggtttgaacaattttctaaactgcatcgcactatatagacctcaaaattgcacaacaaaaatgtggtgcagtgtagtgttagcaatttgcaataatcactaactaatttaagaattaaacaatgcaaaacaaaggtttataatgcaaaaaattcataactaaaaatattcaaacaaaacaatgaagatgacataaaactatgatacaaaatgctaaattaactcaataaataatatagtataaactatagtacacattatatattttaaaaaaatactttcatactaacatagaatattgattaatttgtaaaacatgctcacatttttcattaaataaatacaaacttatgtgtacataattaataaatgtaatgcttaaacaaactaacactaataagattaaataaaattataagttaaatataaatataaattatattgaaaaatatcagtatttttctaagagcggtgcggtatggtttaaacaacatttatgaaatctcaaaacaaaaaccgcaccacactgcgcagtttggtaaaatttcaaatggcaaccacaccacggaggtcctaaactgcatattttagtgcagtgtggtgtagcgtggtttggatgaacacccttaggtccaggattaagatagagccaacgtccagagtccataccagggtcgaggttgggtcttgtcaaggtgtggaatattgaaggttttttttttttctttacaaaaaaaatctaaaacaatttttgaaaacatttaaccaattttgaaaactacccatactgtcatctcatctgttctcattactgaaaccacaattataaaaataaaaaacagaaacaatgtcagacaacccttaaacctctaaagtttttagaagtgcattatgccaaaatgttaggtcacaacgcaagtacttgttgatacttgatagtgaccaaaatactgtgaatataaaacagcacaccgtaaaaaataactgaaatttggagagccaaacattctggcaaacaatcatatattcataatgggaagaatagcacgaaattgtaatatctattgaagagaataaccatgtcaacaaaacttctaatgaataaatatatatatatatataagtagagtctactttctaattccatgcgctaaaagaatgagatatagcaggaagaatttttctatttttttttcttttccttttaccttttctcattcaagagtgcatgcataattaacagggacgatgattatttgaacttcataatccacgcttatgccgttgtcggaaatgtctgagaatgaagctatcggcgtataaaggatagttcttcctaatcaggcccttgatacatttccaatatgaaaagtcaaccaagcttccgtccttttgaactatgaacaaacatcgtgatctttcaaaatcaggatgataaccaacctaacaattcaaagggacacacaagattacattagaatatgataaaattatataattactcaataattaatcaccccaattagaacatcttgattgcacattctagatagcagataccaaaatctcattcagagaacaaaatgaagatgcatgaatacatcatcctacaaaaatgttttcagataaagatacaaaacaattaaattcacacaactctaatatttttcccaggggaaaacaaaatctaggcatatcatatgcagagaattaccgtaatataatcgattccacatccaatcttcttctcacactctggatggaagggaagcaacttctcaataacgattttctcgtgctcaggacttaacctatctccgctttgatatctgcagataatattacaaatttgcacatgacacaataagacacaatataattttataaatgtataacaaaacatgaaaaaatactagatattttcagtaagtaatacagcaaaataattaggcagaagttactgcagctctagttcaaactttagttgcctatcccactgtgtgaaagcaactaattaacagatatccccattcaacagggccaccagttattatcacatagaaaaattactacctttttccaaagtcaagagaaacaatcttagcataaataagcaacaattcgagtactttgtggtgtttatattacacttagtagcaaccaagctttaactccatgataaagttttgataatttgtgtaagtaatttttggtatttatattacagttagtagctaccaagttttaatcctataatagcgttttggtaatgaaataaatgttctctttggtgtaattttattaaaaaaaagaaacctctgtgtatttattccacatgcctcattgctcatgtgtgagagtaatatatggtgcttatattacacactttaattctgttttggtaattggataaatgctttgtgtagtaagatttataaaaacaaaaaaagaaagcaccaattcggggagttggtatatttagaactaaaatccccaaccttagttcctaagtaaaagtaacaagttacttcacaaacaacagacgaataagaggatacccagccattcccgccaaagtatctatacccaaaatgtgttccatagacccaattgcacatctaattttttttttcaatgaattgcatatataaatcttaatgcatagaaaaatagcttctttttttttacatggacaaccattgcttaaattatgtcggagagcaattacaatcgattcaatcaaataccaaagccaaatagaacaactcaatttacattagcaatgaaatgattcaattttaaattggaaaaaactgtcagtaccttccagaatgaataagcatcctaacaaatccaaccagaggaacagtgtcctccaaaatcttgtcctcccaatccacccacttttcctcatcttcgtcgtcctcataaaccctcttccgctcattttcctcttcctcctcctcctcctccgacaagtcctttatcggagacacggccggcttcctcagtaaatctgggccgaacacttgttgcctttcgattctgctacgaccaccgtctgcgccagtctgaatggcgcataaacgatggtgaggaagatacgtagttgagcgaaaaggaaatgataaagtgacgagacagtggagagaagagaaagaatgtctgtaaaggtcagctattgggggtggtttgggtatggaagccatgggagattgcatattattcatcatcaccagccatggatggatgaattaataaggtttagttttgtgtaccagataagttgcaaaggaaacccggctcggctggcagtggctggctctacaatctccacctcctctgctcttattctgtggttcccaacttcttactaggccggccctactatcttgattgatccagtcgaatacttctgggctttaaaactcaggggtccaatgggcctccaacttagttacttcagctaaccttagctattgggcattcttgagttgacaacacattttttattttttttaaataattagataaggtaccattttttttttaaaaaaaattacattttcacgattttttttttatacatttacgatttttcataaaaatagcacgaaaacaacaagaaaactacataaaagtaacatctaaataacaacaaaaaataacacacaaataataaaaaatcaacaa

SEQ ID NO: 113649 - DNA, 1690 bp, Cannabis sativa
cttaaatgtgaaaaaatgccatagaaaagtggcaaacctaaaaatgccatatttttctaactttgttatgaaatcccatatttcatgtaattttcacaaagaaaaatgaagttgtcaaaattaagtaaaaaaaattgtaagacaaaaatatattgatgagttaatattattttacttattgcaattaggttgatgttttgttatatttatgttgttttgtacatagttgtatttttattattttagagttgtttgttaaattgttttatggttgtattttttagttatttattttattttactgaaatatagtatttttgtaattttgaaaatttaaacacaatatttttataaggttaaaatataaaatacttcgtgtcttaatatttttatgaattttttctattttacagtatttttttaagtttctctgtaaaatattcactaaaccaacaaacataaaaataaaattacaaatgtcttaaatgtaaaataaaattaattttatatgaaactgaatataaaaataaaagaaaagtaaaaaaaaaatgaaagtgatatacttcacatataactttaattacacagttccactttacgagtaaaattgataaaccaacaaacattatctttcgtttatatctgtattttaattttaatttaatttcttttttgacattattaaatatttcatttatatcttttgtttcaataatttcaccatcccattccccactaaatatcaaacttataatattcttttttaaaaaatatatatatcaaacttaataataataataatttatttagttgttttaaaaaatatattttatgtaaagctggttttaaaaattatttatataaaaaaattgttgaatttgttcacgattatactacacagacaaaatgaataaatattgacttattctattgccaggataatcggtactgcattgaagatttgtcacaattgtactcttaattaataaatatcaataaagcgtgatacttgtcaatggcagatcatgcctgtataatttataatcatatctttaaaaaaaaaaaaaaagaattatataataggattataataccttaaaagttgtgattatatgtggacagaaatctaaagaaacaaaaaataactatataataggattttattacctcttaaaagttgtgattatgtgtggacataaatctctccaacctctcttaaaaaattataaaaaagagagagagagaaaaatctctccaaccagagtgaacaacgtggacatatgacatatttaggtagctaaaggagtttagttgttgctagtattctcttatgtttcaatattattattgatttaattaaatattaaatttcataaaatttaatataatatatatcgttaatcaatcgcaagatgataagtctaaaaaataatcatgtctaataacaatactcattttaaaatgcaaacactcttttgacttttacaccctctctttgagaatgataaatgtcatatttttagattgtttaggccttttattatcatcttattataattatgctacctaaataaaattaatatactagttatttatttattgctgaataaatttaaaaaaataaattactaaaaataaaggggtaagttgaaaaatgcctcttttattcatcaattaatcaaatttacct

SEQ ID NO: 113650 - DNA, 2447 bp, Cannabis sativa
aaatataatacaaaatgcattatggaatatattgttagaggaatttagataccatcaaaaactgcaagtattaaagttcatttaaacatttgaaaataaattttttattactcatgacttacaataggaaaatttgaaaaaatatacatcaaataccttaatattttatccctaaactaatacatatcaccattgaaaacatatgaccactttatcaaaaacccaaaaatacccctctcataactcaaccccatctctctctcttcgtctatctctctctctctcaaccgaaccgcacacaacccaaaacccccctcaccaccacccacaaagccggcccctcaccaccgtccacaatgccggtcacctcccaaatcaaaatcgagcacttctctctcaccgcctaccgcttacaccgctgtcccccttttttttgtcattgttttttttcttgtgtgatatattatttgaagtattgataggtattgattttagggttataatgtataatgtatgtgtttatgtgtgcacggtgagttttgttagatttaggttcgattcaggttcagatctgcgatttgggaaaattgcagtttggggaagacgatgggccgatgggggtctgatgcttgtgctgaaaaaatttagtttggggtccgacggtttcgatggggggggtccaatgcatgtgcgtgctgggaaaaatatttttgtgggtccgactggtccaatggggaccctgattggggtccgatgcatgtgctgaaaaaattttttgggtccaatgggtatcttattttagccctgggaagctcgacagtaaagagaagaagagaaaggggaggggtaatctaaatgggggtatattaggaatattttaaaatatgtcatatcccacaaatattaagtgttatatgtttagggaaaaaatattaagtatatgtaaatatagaaaatcaaatttccccttacaatactcaaaaaatatattgtataattatatgtgagtatgtaaataatttaaaaaagacacaaaaattatagtagttcactaagagcttgactagtctagtccacttttaaagagatcactttgtgtgtattttattattcaaccacaactccctttgaatggaggtggatgcacctattatagatatggttacaaaagtgtggtcacaataagacagcactactataaaattgggtttgtttgactattttaaatagtcgggtaaaatattcccgttggtctctaagatcgatgcttattcgaccgcctgggaaaactgggtagaatatgtgacggtgaaacaccaccaggtaaattttttctcgattctgcaaaaccgttgggaatattgagcaatatacactactagaatcatgggcgtcaccaacggtatcacttacgccataaactccacgaaaagtatgagtatcaccaacgccatttaagtgtcgtcagtgataagaatatttttttttgttgcccctattaatgacgacaatgtcgttattgataaatatattaatgacgacaaagttgtcagtaaaatatttttttaaaaaacttactgttgaaaaatgcgagctttttccctctaaaattaaacctcgaaccctttgatctaatctctcatttcatttttatctttattctcctctctctctctctctctaacctcattatcttctccaaatttcaaaccgtctccatatctttccatgtccaaactctctccatctatctcttatcttctctctaaaaaataacaaaaccatctctatcacttgaagcttatccggaccaccaccacgttgctaccgcctccctctccattgcctgaagcttcgttggaccaccaccgcgctgctgccgccgccatcttttggtaatgtaattttattactctcattatgttctcataaatattagtttaatatttttatatatattgatttgtattttatgtataagtgtatttatatgtatattattttatatttttttattttattgtgttaggttttagggttcataccggagtcccagtggaagagtagaatcaaatttagttttaaaaaaatattttttgaatccgatatgaactttagacctcgaatcttatcacaataatacataacacaaatctaatttatttgtatagagatttactttttttttttggcctacatatcaagatttctttgctacttttcgtataaacaaaatgaacatccaatataagaactcgacataccagtgtcttctagatcatcctcaagacttagaaaaagagtgggcttttagatttaatgagatgaaaataattttctaatcacagtgtatttcaactcatgagacacatgtgattgtgattgaaaaaaaacacaacacactagtatgtgtgtatgtgagtcgtgtagagagagagagagagaga

SEQ ID NO: 113651 - DNA, 1782 bp, Cannabis sativa
  modified_base (863)..(873): a, c, t, g, unknown or other
aggtactagtttaccgagtctagcttaatcatgccttagacgcataattctttattccaacatatttatcatggtataacattcaacatcttttaactaccagggtaataacgctagaccaaacaacagctcaaccctaatcccggttcttaattattcacaatcacaatatccaatatgagcgccattgcgcttaactgtatgtgcatagtactgtcttacctgatgtcccgcaatagtaggattccaaatccccgggtgctcctgaccaggtgccggtaatcctcaagctcaattcaagaacaaacccaaaggccctcaaactcaaagcttaatccaagccaatatcaagcaaattctcttcaagaatcaaatttagaaaaagaagagggtttgagggagagagggtacgggctagaggaagcaaaaccagaatttttccatttgatttactcaaaatttcatcttttatcaattgacaaataaaggtcaaaagatcattttgcccttaggctaaaatcacacacatattcactcacaagggaaaaaatgacatctcacatataataaacccaattaatttttaaattattcatcaacaattaaaatgccaataattcaactcaaattgtattttgggcccgaactcaattcggcctgaaatacccggttgtgactataccgcgccaacctatcagaacacacctgaaaaagacatcacatgcatactatacaataatatagttccataagcacgtaaataaattaatttcactgttttacccttctcgagttaaaattactaaaatgcccctggctcactaacgaggtcttcacatgtcataaatcatataaattctcannnnnnnnnnnatataataatataatttctcaattatcataattatctagttagggttttgctaatccatttcataattctagtgtattacataagtggtaagataaatccttccttactcaaactcatatatctaactcacttagatttgagcttcaatttttttgttggcactcaattcctagtttcatcggttctatggtcagtttaaaatatttaaacttcgttgaagctaagtttgagggaaaaatcccccaccaacttggaaatttatcaagtttgagtaacattattcttaccaatagggaagttgacatgttatatgctgatagtcttcattggatatctagtctttcttcactagaatatctagatttgtcaagtaataacctttagtgcaacatctgacagttggctaagctcattaaacaaaatcccttcattgttagaactacacatggcttggtgtagaattaccaatagtcacccctatcaaatgttaattttacttctctagagtttcttaacttatcagacaataattttcaatcttcattgctgaactgaatttccaatctcgctaagcttgttcatcttgatctaagaccattctttttagatgattcatttcttaaaaatggtcctaagagcttatcttctttaagataccttgatatttcttcttctaatcttagctctctaccagatgtgttttttggtcttaaaaatattcacactcttatacttgaagataactatctcgatgtttcagttgtatgtcatttatataacatgactttatctgaaacatcttgatatatcttcgaatattcacataaaaagaccaatattcccaactgcctttattttcaaaaatataaaaaaaattattaaggttatgataaatatgacataaaaag

SEQ ID NO: 113652 - DNA, 4098 bp, Cannabis sativa
aatcaaaattaatactaaaaataatctaacacttccctttcttggatttgattgagtgtagaacttcttgagcaaggattgaactttcagcaatccatcgccctgacataaaagctaattgaaaaggcaatatcaagcgatcaattacacttttcatcctgtgtgtcaaaatgcgagagataactttatagccaaaattacattaacttataggacacaagtgatcaaaccttgaggcattagaattctttggaataaggcaaaggaaagtatgattcagcttcttgtttaagatatctaattcaaagaaacttttaaccatctcacaaagctgaggaccaacagtgctccaatacttacggtagaaaatgcctgggaagccatccggactaggcgcctttaaagggtgcatcttaaagacagtgtttttaatctcctcagcatcaagaattctaccaataaactcattttcagcaatcgtaaccttgttttcaaacagtgttaaactcacttccaatattgctcccttccaaatcgaaaatgtcacaaaaatgtttattgaaatagttcctaacatcttcacgtttgttgagccaaactccaagtttctcttccacacttccaatgtagtttcatccgcgacggatgatggtcgaggtgtggaagaattttgtattcgcatctccaaaacggagccaattttcacgagattattgccttcgaattctgtccattctcccttccatttcaattatctccaattgaacttctgcttccttttccacacttgcttgggaaatcagatcaccttgaatccctatcaattttctcggaagctccatcaaccttctatcactaaagccgaaaacctcttgattccatttctttagatcgtacttcatacccttgagtttccccaggagtttagcagctgagcttccattgatacttttcatccgcgaattcttaataattttcccacaatcaggctgtgaagtccaaacttctaggaatcgaaacagatacttgagtttattcacttcgcccataacttgaagacagatcagagcatgatcagatcccacaataggaaacttaaccacccgagccttaagatattcagtgcaccaatttgcatcaacaactactctatctagccgcttatgaatttgattgtgagtatttctcaaatttttccaggtgacaaatcctccttcacaacccaaatccaccccccgtattgaaaagaaaatccctaaggaactccccttcttttctgttaaagctttgacccccctccttttccgaagcatcaagaatgacattgaggtcacctataaccacccacgagttgttacaacaagagatgttgtttgtgggccattcccagtaaggttttttcaatgcatgataaggagtaccatatacacaaaagacgtaccaaggaggtagacccccatgaagctgcaccttaacacagcaacctgcttcgaaaacttccgtaatattgcatctgaaacccgttctccaagccacacaaaagccacaagcaatgtcaattgctggtatgcaacatgaatttacaaatcccaacctattcatcacacccaccatagatctttatccaccttagtctctgagagaaagataatgtcagcgttactatctcgaattaaacccctcagggttttctccgtcgcgggtctacgaagttcgcggtaattccacgaaaggcacctcataatgatggtgggggcatgcttgcggccgcctcctcgtctgaaccaaaattttattcataagtaacttccatctccacacagttagccaaaatctcttccaaatttccttttgcagtcgcttcttgacttactaaccatgttatatttcttcctaccacttcgagttttaactcttgaggatcttcttgtggagtagagcttctcttttcctcttggtttcctttctcgattttcaatcttagatgacgatccctcatcgcccacaccaatagagaatttaccattggatgagggaatggcttcattttccctgttactttcttcagttgcagggcataaaggcggggaaaaacatgaatttacaaggaaagattggtaccacgtgtgggctttcctcttcctattattgcccagtaaatgagtaatcatctccgaaaggttgggggggtttgagagaagggattgttgggccttgtagaggtttaagtaatctagtttgtagagttgaaaaaagagttttcgggcttccttatcatcattgggctagtaaattggggtaggttcaggaaacaaatgtggtttttgagagacgcacaaccaatcatgaggtacttcaatgctttgggcaagagttgggcccaagtcaggtatcaaatcctccccatgttgattgttagcaaaatcagggcttggtaaattcaaaaagttttggggtaccgccaaaatagctccagggtccccaccatttgacatgttgagcataatccatcaccttgtgtacccattcctttctccacattcccactactcgtaccaggatcgtactaatgattgtccttctcgccactaaccttgtccttcacatgacagctcaacgccggagcttttaccaccaccgtcttctccccaatcgccgtcgactcaccaccagtagtcgacctggatttaaccaccatacgctgcttccacaaacctctgcgatttcttccattcagctcccattcagggggtgtcccctgtttccacagacatcttgagaactcatttcccctttgagttgaaacaattgcttttcccaatatcacttttcatccataaaccgtacatttgcaccgcctccccagtctttagagtgaccattgtcatcggagcatggcatgttttgtcctagtgagccaacttgccacaattgaaacagagcatgggtagtttttcatatttaatctgcaccaaggactccggtttcccatctgcagtcaagaaaaacctcgccggaatcgaatgagatacccaaacatcaatccatattcttaaataacctcttcgaactaactctgctttcctttttccatcgacttcaacaaatgatccgattttcttagcaacaatgggtgcattatcatttgtgagacttcaagtaaggagcccgtgtatttagacccagaatttggctactgcgaattctccaactcgaaccttcccttccactggccaaggtttgatgttcagaagcactccattcaccagccaaggcctcttctgcaggacataagagcagtcatcctcatgttcaaagaaaaaaccaagaactccattcttgcatttcttcatcctccatggcccaagtctacgccacacaccacttagaatcgttttaaccacagaggctggcatatctttgcaccctataaccttttccacacaagccttattagtcacaacatcctccagcgtgatgtcttcaaaaagttctagaatttccattttcaagggcattatctcgctccagtagtttgttcatgttctcatctactgtttccaccataacatccttacttaaagctctttccatggtgtgttcagctgacataaagacgacacactagaaaactcccaaaccaaaacaggacatatctcagagaaagaaaagaaagcaacgtgaaaagcagtagttgtaagaaagaaaaggcactgtttcataacaagaaagggtatatacgaaaccctcagctcataacaagctagactctacatggagccatttccttccacttaatattaactagtatacatatatatatataaactaagtattagtaacatgcaatatattttcttagagttgtattagagttactactacctaattattaatttaaataataataataattaaatctaatagaatatttgattatatttttaaaatatataaatttaatcaaattttaaatttatttatgcaaaagatattaaactaattttattaataaaataagtaacaatagtctaaatattttaaacaatataactaattaaatatttgttataaagtatgattaattaattgaattaa

SEQ ID NO: 113653 - DNA, 3728 bp, Cannabis sativa
  modified_base (28)..(45): a, c, t, g, unknown or other
atatgatatataatccaattcaatatannnnnnnnnnnnnnnnnncgacctaatacggcgttccaaacgggcccttaatgaatttgtcaaacttatgatcattacttgttatttgttaaaataattttctatatatgaagatattgtaagtcatataatatatatgtaacaaggttgcattgactaccactttgggttgctttagcaatgatgttccattattatttttaactaaaggctttgttaagcttcgttgtcttgtctgccatgatctttaattcgaacctaaagtggcatatcccaaataattttttattgctttttctaaaaaaaattaaataaaatgtttgtaattcttagacaaaggaagaaagcagaaaggtgttttctttttatctaaacatatatttatttatatatatatatatatatatatatattcctttgtgttgagattcactaattaatatgcacactgttttagtggttatttatgtcagccattttggacacaattcatgttcatctcatctctatacatctccatatttaaattttaataaaaattaatacataaataatatatatttatagatgatctctgatcagttaaatattattcatatttgtgatagatagctagcattttaattagaatttaaaattgactatatatctacataaagtgaaacctttatttatttatttatttattttttaatggaagattgacaattttattaatttaaagaatcagccaatacaatacttaacaactccgaagggcagttgttcgaattaaaaacacaatctgtcattaaacaagcactacgcgtaaggaaatgcaaatttattaattgatacatatgtgattatcttctaaagtttttttccattgaacagttggaaaataattggtatatttgcaaattttctatattttccgaaaaaataataatgcctttaagttgagtcaattcactcactatccactcttatctctttcttaaattttaagagaagagaggaccccttttataggtacagttcaattatatggtgatcaccagctgtgcaactcactcacatcccttaatttaaatttagtatttgtcaaatgtccatgcaattagtaataatcaatataattaattttaaattaattgttggctctatatataatatagtcacccttttttcttttatcttttttttttttaattaatattgtatattaatgatgaatcaatatcatttcaaaataaaaatctctaaatatgttatctttctaataattacatacatcactcattttcgatatctccttatataagattcagccggcattattgttgaaaaagttcacatgtaattaaaattaattagaagataaaaacaaaacgctggcttgttgattgtgtagttttgtaaattgattgatttaaagtgtagctatatagatagatgttgaaattattaatttggaaaaaaaaatataaataattaattatataatattattgcatgaggttcatactttttttgacaaaaagaataaaaaagggcaatgcaaaatgtaaatacttttatactcatctaattctcaattctaatgagccattaaactccaaattcacgtgggggtactaaaagatttctcttttagcaaaacctgatctagcttgtgattatttatggcatattcgtggaaccaaataatatttgtttattgtataatatgtattatataaatggccaattaactagatgattgtctacctacatatatttagagaaggcacttttttggattaatatctaaagacatagaatttgaaattactaacaacaaatgcataggacaaagtatgtcttctctcttgatatatgtaagcccttataagcgtagtcggtcaagtgttgtttcaatcaaactcaatcgattgaactatatacatacatacatatatatagagagagatatgtgttttcgtgattttaggcttaaaggcagttcaatcatttgtcgaaatgattcagtgcatgcatagattttcttggcatgaagtactcgacactattttgagacacaataccatctcttaattttaagggtgggaaaaaaaaaagccaaaatcattatatataattaatcaacaaaaaagccctataatttttgattcaactacctacgaacttaatttttacacacatatatatagctagttaattagtagtacagctaaatagtaaatatatgcaagttgattttaattcactatactaataatattggacgtgaaagattgatgttaacatgaatgaactgattaattattgatgatcaagccatacatcacattcacatatgtaatcgaaaataatatattgaaatcttcgaagagatcatgattgattctgatatatgcttccaaacaaaagattgatcgagttcaatcattaactataattgaaagaaaaagataaacggtgatacaaattattagctacataccaacgtaaacgaatgattaattatatatattattatttgaagagtggaattaatataataattcattcttacgcatattatacagattctagaataagctattactactatatatatatatatagataaataaatatttttatgtatctatatacacacacaatcacatgcatatacactatatattaattacacctaacctaaatacgaagtagcaataaataaataacaacaaaattaggaatattatataatatattttatttctagcctacattttattttattttctttcttttcacattttaagaaatagcctacataaaataatatatttaaaatatatgtattttaagacaaaaaatattcttcaaattaacatacaagcagtgataataatttttttaaaaaaataataattaaatgtaaattttaaaaattaatatataaatatatatatgttgtttctagctatgtaatttaaatatctacaaattatatatatatatatatgattatttattattataaattatattcattaaaaatccttataaattagctatatataactaaatatattagtcacaaaaattataattttttatataataggacattgtattataggtctttaacacaaaaaaattatatataaatataatcttaataagatcttactaatattttctaatatatattcttatatattgtatttcccgctaatattattatatatatgagttcacttttaatagatattacactaatgaataggtaatattaaaaaaaattaagtttttatacttaatttttttatttaataaaaaaaaattatcatttttacattatatatatgaactaattcatgttctattggctgaaaaataatattaaaaaaataataaaaaaaagttgagtttgacttatatatttctcatataaatatatttttaatgtagtgtaaaagaatgtattttttttatattttttttaattaagtaactaaattaaacatataaattaaaattttcttttgttataaatttaatggtttaatatttttaaaattaatatttataactaaatttatttaatacacgattacttcaaagttctatgtatatatatctattctatataaagtgtgcctatataactaaattcttggtttatgagaaattcatgggtgtgactttttatttatatttaa

SEQ ID NO: 113654 - DNA, 2149 bp, Cannabis sativa
  modified_base (1741)..(1756): a, c, t, g, unknown or other
ggggctgagagtacatagaattttagatgaactcactctgaggaagccctcaaattcaatctcattgctgaagtcagaaacttggtcacctaagaatcccctgatctcagcctcagaatacatttctttaaacgcttttaatttcaacattaaagacggcaaatctccaactgtaaatttaccattctgattcttcattgaagtgaactgaagaccaaataaagaacaaaaagggggccaaaatacacattagagcagaacacatcccttatttaactctaaattgattaccaaattcacaaaaactgctagaatccattcaataactttgttaacacacttactttagatttgagagttcgaagctcaacctgtgtgaactggctatgaagccactgatcagaaacaactacacccgaataacttgacatctcggcaacttgctggatagaataaaacaaaccaagaaaaagcatggacatttaagagcagtatggtatgaaacatcaagtatcagaataaaataaaatagatgtttatattcttaatattcagatccaaaaacgctatcaattacaataaaacactcaccaagaaaggacagggggtagttgagctccttctcttaccaacctgtcctactagatatcacaaagggcaatgtgtcataaataagaaaaatcttgataaagcaaagaactttgggacaaaaataaaatatatctgtagttaatgattgtccataatgagattaaatgaattgcataccaattgtggacatgaaaactcaaaggctctattcaagtgccaaccaatgcaaatcaatgattcaagtccagattggtgagtagttttatcttcacattttttattctttgacagatatcaaaatacaggactgggattggcaccgaattatataagaaccacaaaacatgaataaacatgtattaatctcattaaaagctacccatgcagaatctactgcattggtcataagcaatagaatgagcagaacacagagttaaggattgcccagatgaacaaagcaacccaaaaaattaaaagaaagctttatacacaggaacactcaaattttatattcattgacaggatcttaatgatggaccaacgtgcaaaacaaatgatacccaacaaagaaaacgtagaacaaaagaaaacccagaagtccaaacctgtagaaaaagaaaatgtaaatactcatgcagtggagatgataggattagtccttgtagtcccaccttcaagattctgtctgattagtatataaagaccccaaatgaggagatgagaggttatgtgttcagattttggagagaggtatggtatggatgggatggcccctgcggggaatccattttccttcttaagagagcaaagtaagaaaacaaaagaaaacaaaacaaacgacaattgggaaaaataacggtttatggttcgggttcggacccgctaaagactaaacaaacagtatactaaagaagagagcttactgtacgattgagattgagattgagattgaggagggaagagaagagaaacgaatctgttttcacttgcggttattgtacgcgcttgtgtattgtaacaaagttggaaactcgctcttgttgctctacaactcatttctcaagtttacctttttgttcttttccgcaacagattttgttactttgtgggcacacatgacaatactttaatttatttttatttttatttnnnnnnnnnnnnnnnnttatttatttatttatttacatttattgatacgagatggctacctagtagatcttatgacttatctcagtctttttaaaattaattgtaataaataatacaagatatgcacaccacaaaatcgagtacttttcacggggcaccaaggtgctagagcattgctatagtgaaaataaaattataattatacataattataatccttcaatcatggtgtgttcgaatggaattcatcatcgttctgccatcgtattggtgtttattaaggaaaatttgtttctaagttcattagtattttttagtgagtgttctgaatcacaacaaaataagtgtgtataggcagaaggatatttagccaacaagtcaattatttagtcaaaaggtatacaaaaat

SEQ ID NO: 113655 - DNA, 3117 bp, Cannabis sativa
atgatagtgtaaaccgcttaaactgcactgcaccacactttatttttacagtgtaatttttgcagttttaagatctcgcagtgcggttgcggtttgagaaagtataaaaaccacatatgtggtttggtttgaaaaaaatattacaactcacaccacccgcaccgcaaacacccctagtccaatgttgctggcagggtcacgggaacctcgagctcgaggtttggaccaacgttagaggccacagtggccttgatttcatggcagacaactagaggcagcttgttgaggttcagccgatagagataagagagcaagagagggagagtttgagagagagacgatatccggtgttggcttcgactgggcttgttgggaattatgggattcgatctcaatttatgaaagcacctttgaagtctcattgggttgcaattaagcgaattctaaggtacctagctggatcacttcactatggtaatcttgtggcataactgaaattacattgttgcagtctttaatttcaaaactttacattcccacatctgtaactccaactgtgatgatggctgctaatcatgttcttcatgcccgcacaaagcatattgaaattcacctttactttgtgagagacaagatccttttagcttcaagtgaagcgttcctacaactgaccaaattgcagacactctcactaaggcaatttctagcactaggtcccgtttcgagacaaacaaagtgtgttctcaacttcccacacttagtttgaagggcggtgttaaagaaaaggagtagttagagttagttataggttagtttctgttatgaggtcagttacaagctgtcagatctaaccaactcttagtttctatataaaggctactctatttatcagtgtaatacaattcttcaatcaattagaaacaaaacactgttatttacctctcctcttcattttctttcaagctcacatttattaaattgtgtatggtgtatacattttgtgttgaaatggtaactgaaaactgtcttcctgccaccgctggtccgccgctgtctagacaaaacacaaacgccatcaccaccgctgattggataataacgatgctcctccagcatcgccgtcgggttttaatttcagcaatgggtttgatagtggcagcactaacaacttggccaatatgatattagaagctctagtttcaagtctttttccttgctttcatgtttttttttaatgtgtttttttttatgttgattggcttctaattgcaagcatgatacctacatgtttttcacattcctacaaatatacttgaaaagaaataataatttagcaatattaaagagatatgtattagttaggtattgaaattgtaaagtttttcttctttttttcttctaatcagccatttacaaaccaatcatcattcattttcaaaatttcaaaccttttactttctatatcaatgaacaagaaaaccaaaagaagaacaaacaggatttttactgtccatagaatagtgtaccaaattgatgccttacatgtttgcttcatctttacaccccttattactatctactcaaaaatatctaacagcattcaagggaaaaatggaataaatttcacattcaaagttaatacgttacatcgttcgtttatagattatgattctgtaaaattaaacacatatataaacttatatatttatgtaattacaaggtttatcattgttatttgcactttattgtacaaaaagataacacaacaaccaaacagtgaaataattacatatataggtataatagaatgaataaggattaagcctaaaccttgtggaggtggggacttgttggtgactttgaaggttggtcatccacatgaggatgttcctgctcagttgaagaagctttattctcctccgttgggacattgtcatcacttgatgctgatgcagctgccttgttggtgaccctgctgaaagcaccagtcacccatgtggcccctgttaacacatacctgtttttcatgatggcagagccagcactgctcaccttctgttcagcagcattgaaagccgacttggtcttctccgaaacccgaaacttgtcatccatttccctcactttctcattcactatgcttgttccaacactgattttgtcagtgaaaccaatcttctgatcaagagagacaactttggctgtggcagtggatgataactggtgcttctcatcaaatgactttgcctttcccaatgcatctttgcccagagtgaaccctttggacagcatgctcatcaccacatcctctgctcttttcacagcagattgatcaccaccaccaccattaccaacaccttggttggtttcctcaacctgatcaattcacaaaacaaatcaagtcaccaatagaaacaaacctataacatatacacacattcatgaagaatagatggggaataatattactgttggagtgggggaaacaagtacagaagatgggagtttatactctggagctagatcaacagtgacaggttgatccactattgttgctccctgaaagagacatttatacaaacatgatctgatcaatacaagtaaacccttttattaatgaatgaaaaattaattataaaagaaaataaaaaatgtgtatcaccgaaagaagaacagcagtttctgctcctttgggatccttgaaagtaacatatgccacttgagaccgttcattctcgctaaaacatatttaacagacatataattatatcagaatataatatatatatatatatatgtgtgtgagtgtatagattagaagaaaatgaattatatgtattaatggttgttaccttagagtttcaagatggagaatttctcctgaaaaggaaaagaattcctttagatcttggtctgttgcacctaaggagacattattcacttttattgtttttgtctgtattcataaaccaacaaataatatatataattattagaaactgaaatatttcaacaaaaatatacatataggattcaaatacagatatatatatatatatatatatatattatgacaataatattacagaggaacaacaatagatattaaataatccc

SEQ ID NO: 113656 - DNA, 1353 bp, Cannabis sativa
acttttttctttttgtgttacaactaaagatttataagtcaattaatacataatgattatgagatctatatattgagctaatgggtgaaaaaaataaggaaacttacttagctggtggcttagttagatctttggagagatttttgtccttgttgggggaagtagtagtagtagtagcagatgaagtagttgtaggattagtagtagtagttgtagttgtagtactaacagtagtagcagtacaagtctttttaaggttttcagaagtgataagatcttggtcaatagagttgtgaagatagttcagtttgagatcaacagtctccgaaaagcctctcttcccggaagccctaggagtagttagttcttggtcggttacagtattagtacagccgccaggcagccctagacacagctcagtctctttgaagttcaaatctcggtcgccgccacctccgccgagcatattagtcatgttccgacggtcacttataacttccatcaacaccacccaccgccaccgcaataacaagaagaagaagaagaagaaaggggttatattgagagagagagagagagaggagtagtagtagtagttgtagtaggagtaaattatttgtctcaatgatatgttatatatggttattattatatattgggtttattttgtatacaaataatatatatatttaagtggttttatgggaattgaaagccaaacgctgtagaattatgtatatataattcatcttctctttttgtgtcttcttcttataaattactctagcttaattagtacaaattctctattattgtgttttttggctttggcaaaggcaaaaggcaagagatccccaccctttgtgaacatacgttaatttgattgtctgattgcatgtatatgtcatatcgagttcattgtcgtatgacatgttgacaagtggatgacttatgtgcgttggatttcatgtacaaaactttagcctaattaatcatacacatacacttggttaatattatattattacctacgacatgtcatctgccgacttaggtacgtgtgcatcgatcatagcttatatatttatatttactgtaaataccagaaaaaaaaaagttaagattttagcatatagtaacatattttgttgacgtatataaacagtaaaaattaaatttgataccctaattttttctttatgaaaacgtaacagcatatattcaattatcggcctctaattatatcaattaaaaagaatagatgatatatatatatatgtatatttcatatacataatatatatgcaactaaattattattgatagtaaaagggtttcggtacatgtttactg

SEQ ID NO: 113657 - DNA, 1103 bp, Cannabis sativa
atataattttatataaaaatattgcatagaatataatttaatataatactatacaatacaatacagtgtaatacggcgtaccaaacgaacaatatatgtacgtaatttagcaaaatggaagagtctttttccttttagtatattttttattcatcaaaaataattatctcattaattatagcaatatcttttttatttttattttggtgtacatttgtctaattagtttcatttgcctttttatatatataaaaaaacacttgggttagttagcagatgacacaaaaggccaggcacgtttgtgttagtgtaaccgtatcaactactaaccgacgcaagtgacaccatttgcgtttgttaattgttaggtaggaggtgacacagattatatcagctcctcacttagcgtcacgtgtatttgcgtcaaaaagattctgacacaaaagatgtttttgtgatggtgcccaactgacacgaaaaatatttcctgtatagtattatataatgactactttcaactttttcaatcagtaagtgatttcactaaaaacaattaaaacatacaaatattaaaaatacaactacatagagaaagaagagagggataaaatgaacataaattactcaaatctaaatattacaaataaaataatatgaattaagaacaaagaattaaaacactcgaggattactaacttgaacaagattctataatcttaaggatactttttgggattaatgaaaatataattgagactaaaaatatgaataaaaatgtgataaaataaaatttaaaatacataaaaataattattaaattttttctcaacttgcactagaaatttctacctttcaattttaaaatagaaaagtcattttactaaaatagaatcacatggattcatttttattttatttatttcattaatttgttcaaaagcatatttgtccctattttctttgcactctaagggacactcttggtctttaaatttatcaagccttattttctccaactaactgaagatcaaagatcttattttcacaagagaaatttggaccctctgttttgcaaaagttaccaattggaccctgtattttgt

SEQ ID NO: 113658 - DNA, 4909 bp, Cannabis sativa
agagaaaagaggtttacttgtattttctttaatttatttttaatttctaaatcaaatcctatccctatttcagcataacatatgctcactagaggacaaattagaaatttgattatattaattcaaataataaatcatttacaagctaacatgaaaggacctaaatgcccctatcttaaaataaagataaccttaagaactaggggtattatggtccaaaaacataaccccgaacactctcgaccttctaaatgtccactatataccccataaaatcaaaacttctaaaccacaaccaagtgactttataggccgcacgtcgcattccacaattaccgagcataaaacatgaaattcataaaaattcacatataacataattaatgcatctagtattcaaatatatctctgaaattgggaaaatattttcctaagacttatttatgacaataagccctaattcctacttaaaaacacaaaattacataataattattgaacctcttaattttctgctaattcccatgatttaactatgcggtcattacaatcccgccactttattcataaaccaactcaaaaaggccccgttcaagttagcgtagtgagttccataaatacaaaacaaatgacgctgaaaaaaattacgagcctccagaattacaccatgaaacctcgagtaaaaaatctctataacatgaaccacaatcccttgcctccaagccaaacaaaaacctctgcccattccaactgacgaaatcccaatgacatttgcaaaacccaatcgattcatgataacagtcactacctccattcccaccttagtctcagagagaaacaacacatccacattagtctcacagattaaacccaagagggttctttctgtcgtaggctttcgaagcccacgatagttccatgacaggcacctcatgatgaaggtgggggcatgcttgtggcctcctcctcgccattgacaaaattctgattacgggattggaacctcaacacaattagctaaaatcacttctaagttacttggtaattcattctgttccacattcaagtgctcatctcgttgccttcatctcctaattttaaccctgaggttcttttggatgaagtcgccaacttatcgttgcatctagattaccttccatggccctttttctgagaacccctgttcttgtctccagcaccaatgcaaaagcagtttgctacattagactcttcaggaatctgctcacctctttgctaggaaaactaggcaaagaaaacttcaaagtaggaggatattggtgaaaccatgtatgattttttttctactgcccaacaaatgcacaatcatctctgaaagatcaagtgggttggaaattaaagaggcctgactgttgtagagattggtgaagtctagtccatacagttggaaaaacatcttttgggctttagagtcgttattgggccaacaaataggagttggttctaggaaaagatgagatctttgggaccggcataaccaagagtaaggcacctccaagctttgggaaatagaaggcccaatatccgaaattaaatcttctctcccatccatcaaagaaaagtctggttgtggtaggtccaaaatttcaggcccaattgggaccctaaaaattcaaattttcctcatttcccacctcagcagctgtaccttcaacattcccatgcacaatattcccacgatcctccatcataatgtcagaagaatacagggtaatggccatgccacctcgtactgaatcacctttttgatagctcacctcatcgctaacgacacggtcctccaccatcacaggttgtttgcctctctcaactctggtcacaacttgggtaatctgcccagaagctacatttcttgttttccaagtgttcttacatttttctgactgatattccactcaggaacctccttagttgatgtgattagcttagtcacgcccttgcccgccatattgaaatagttgctccttcctttgtcacttttaatccaggtgccatacatgtgaacagcattacccgacttgggagtgaccatcgtagtcgaagtatgacaaattctatccctatgtggtaatctcccacagttgaagcacaaaagaggcaatttttcatacttaaattgaatccatgatttaggtttaccgtcagtagtgaggaaaaaacctggaggatatggtgagtcatccaaatatcgacccaacaatggagataccccttctcaccagttcttcttttcttctgtcctccaccttgacgaagttacccaccttttttgcaatgatcagaggattgttgtttgataaacaccagatgggaaggccatggaattggacccaaaacatggccacttcaaactcacccaaccgaacctcaccctccacaagccaaggattgatgttcagatgaacaccattgaccagccaatgcattctttctagtatgcaacagcagtcatcttcatccttgaagaaaaacccaaggactccatcttcgcatttttttattttccaaaatcccatccttcaccaagctcccactataatcttcgtcacaaccgaagcttccatatatgtgcagcctactacctttcccatgcaagccttgcttgcaaccacatcttaaagagtgatgtctttaaacatttctagcatctccatctctagtgcactgtatctttgcaaaaggtggtttgtaatctcatcagtcacgtccacctgaatgttcatgttcttgcctttaccctccatcgcaccaaaagaggaaccaccaccacaagaaacaaagaggcacagggtaaacataaaaaatagaaaacaaaacaccaagcagcccacacccagcacactaaaacgcacaaagaaaaaacttcactgaaacaacaacacaaatagaaacacagaacacaaaaggatttctacacagaagacaaaaggcagtctacaaagactagactctacaaggagccatctgcatcgcttaaattggattgtaatgatgtaaaacatcaaaatcatatcccattgtatatttcctttggattggggttatgggaaaaagtaaatcatattttcttcatttgatgtattaatgtttgtagggtagggacatttatatccttctatttttctttttcattttctctactgcaaaagttgtatatgcttatcgtgttgttatatttgtttatatgctagctaaaagagatgagatctgatttgacaaatcaagacacaaatactttttaatttccttctaggtcctttgttgtaattagtgatgcatatttttggctttggcaaaggaggaaggttcttatcgatatgttttgtgtgttaacttacattaaacctataccacaaaatatggtgtatactttttttttagtaaaattgtaaaatttctaactcaatttgatcatataattaacgattcacattcatgtaaaaaacaataattttattcattctgaatatatcaacatatatataatacataatacataattacccaatacagtatttaatttatataatcatgaagatagctcttgataccaagtattgggggcagaaatcattgttcaaaattgttggacaaataggcaaaccaataatggtagatgctgtcactaaagaaagagaaaggctaagctaccccaggatactaatagaggttagtatcgaccaagacttgcctggagtagtggaatttgagaatgagtatggactgaatacacatgttgttgtatagtatgaatggaagcccaatctatgtaagcattgctttggtatagggcacacggcagaggaatgcaagaaaaaatcactgacaaaataggaatgggtaatcaaagttgataaaaggaatgatactgctagaaaccagctggatgcagagggttttcaagttgtcactaatgggaaaagaaccaaaagtaaagaggctcctgcagaaactatgatagagaatactatcagcattctggctagtagtagtggagaacaatagggcattcaggaagaagtaatgaaggacaaccaagcaaatacaagaggggggggggagatccctctcctagaaatggataagttcctttgttggaatgtttggggggccaacaacactgaaaaacaaaggtcagtcaaacaattcattcaggctcagggtgttggtttggtggggctcctcgagataagggtcaaggttcacaaattggggaccttgtaccttaatgtgtttgatggatggtgtttctcaaaaaaacatagcttggcaccatggaggaaggattgtcatcgcttggaatctagtgaggtacattgtagatattactaaatgtactagtcaattaatgcatttaaaagtctctacaatggatcccacttatagtagctttgttactatcatctatgcactcaatgttaagaatggtaggcaggttttatggaaggatttaaatgagtgggctgcaaaagacaactggcttttgatgggtgattttaatgatatcctctctaaggaagagagagtttgacacaaggtcaagttctatcctgatacagcgtttgctaattgtgtaaataactgccagttagaagatgtgaaagctacggggaattacttcacttggtcgaataaccagcagggtagatgttatcccaatttttacactctaacgtggcatcacctgatggtgacatatggaatcaaccttatgtacctgctcgcaagagatatgccgaacagggcaccacatatattcgctcggacgaagccttcttaattggagagtgagcagtccgaacaacacgcttttgtattttgcaattttgcaatttttacacttttgtatttgattttctcaaaaatgcca

SEQ ID NO: 113659 - DNA, 1700 bp, Cannabis sativa
taatttaaattaattttgaaacaacttaaattgaatcttatctagattggcttctatccccgagcattgataataaaaataagaaacttacccgagctaaccccaaaggaacaattgaaggggttgagtttcatgttgtatgttctcaggattttgaagcaggcatctaggtcacctatgtgccctccaacctttctgtacttgacaagcatatcatccacataaacttccatattctatccaatttggtttataatattttgttgactaagctttgataggtagccccagtattttttaatttgaacgacataactttgtaatagtaagcccaacatctgtacaaaagcttgtgtgttcttagtcaagcggatgcattctaatctacttgtatcgcaaataaaactcaaaatttcgtgacgtatcgtagcatctacaagctggtcgactcttgggaggggaaagcaatcttttagacacgcttttttgagatcagtgaaattaatgcatactgccacttcttatttggttttggcactaggatggggtttgctatcccggtgggataaaaagcttcaatgataaatcttttcattttaagtttattcacctcctcatttagtgtctgtgcgcgttctttatcaagtaatcttctttttactgcatgggctttacatcaagatcaatgtggaagacatgagtggatactgtggggtcaattcctaccatattgtcatgtgaccaggcaaatacatcaaggttcgctcttagaaattatatcagtgctgatttttttttagcaacaaaccttttctaaatttgactttcgtggactggttatttggatcgatctcaacctcttctaactcttccactggcccaacatttaaactttgctccccaaggcaaggatccacatcttcatccgcgccataggcggatccctatttagtcatggcctttcctttctctgaactaaaaccaaatttttcttcttttgccttggctgaggaaaaattataacattcctgcgtagtcctttgattgcctatcaagaaaccaaccccattttgcgttgggaatttaacacacaaatgataaacagaggtaactacttttaagtcatacaaggctagatgccccaacatgacgttaaaaaagcaaatagaatatccacaactagaaattgtgccatgactgttgtcatatttggcaattttcccactgtgagtggtaggcggcacgttcctagcgaagctatgctgtggctgaagaacttataaactagctgtgggcatagaattaaatctttgagatgaagctccattgtcgatcattgttcgagccagtaccattttatttgcaatctgtgcctccaccaccagaggatcgttatgcaggtaactcacaattttggaatcttcatcactaaaagttatagttggattttctattcgtgcttgcttaggcttcctcttccctacagccaagactacttctccttgctcgtactaaatagttcgagcgtatttttcccttacattcttgaaatctcatgctatgtgttagtcccctatgataacttgtagattcccatcatgggtagtggcatcagtgggttttgattatcatcttgtggtaggggtatttattggatcacatccaatggatttggacccatccgatccaatccaattatt

SEQ ID NO: 113660 - DNA, 1754 bp, Cannabis sativa
tctctctctctctctctcggaatcgattaaatactagtaaggttaatacattaagattaatagagattaatttatgagatatgtataatctaatgatacaagttaaaagaccaaaacacattaagagaacgtgcactttaaacttgtatttgtaggatgtgtttgaactttctctcgggcccttaaacttggttttgagtaaactaaaccacttgaaaagttctgggtcgattggaagtgtcaaacacatattttagagaaaaatgcacagttttaagagacatgtcgcctggaacatttttggaattatgaaataaaaaatacaatcaaagtcccaggagacatgtcaccaagtttgggcgacacattgcctagaggaaatatgtcgcctagtgtcaggcgacatgtcgcctggaccatgacgatgattccccaattgcaattttattttctgacatctcaacatgtttcccagtggtaggtgacatgtcgcttgaagccttgcatggaaaatttcagggtttcataaaatgcaagaaatgatccaaataaccttattaagtgatctaatcacatggattagtattaacgacgatccctaaaaaatataagggtgttaagtgagtcaaactttcttaatcaatcattttgctatctctcttagactctctatatttttttttctctaaacaagttttctacctctctccaattgctctagggttttcatagccctaaataacaagtcttaaagtctcagatcttattccaaaaagaagacattagcaatctacgggaggtttggagttaagatttttcgaataacattaagcttaatgtgacaagcctcttgaagatttgatttttccaatcagattttggttatctctaacttttatcctctttgtattttagtttgatcctctattgttaatcctttaagaactcttttgattatatatattgtttcttttatcttattagaacccttattgaaattttataaattccaacaaaaattacaacatatatataatatttaactcactactacaaaaatagaattttcagttagtttagaaccgactgtattacctcttttgtcggctcagataaccaatgactatgtgggcactataaatttgggcactttagccatcgatcccaatcgacgctataaaaaagtactcaataataaaaaatgaccctttagcttcagttttgacaaaattcgcagccgaaggcgttctagacgaagcaaaaggggtaaaaaataattgaaggcaaaaggctccttatggcttcgataatctgactcattttttaaattataatcctgattgtatttctaacggggagatgtcctgattggattacaaattattattttagctaattgttattaataaaattctataattgacaaacaaatacattataaatatcttccaattttcaaagaaagtaaataggttgatgacttgcttataaattcatatgaactcttggagaattacaactctagggaaatatttagggttttgagatcaataatattgactaaatggaattaacttatgttttactgactgaattttcagcatctctcgtttgcgagtaaggctcaacttattccttttattttgttaggcaaaaaaaattagggcattttacaattttgtctacattattttaattaattacaaaatatgtgcaaagaaacttatcatcattttctcatacatttttatata

SEQ ID NO: 113661 - DNA, 3391 bp, Cannabis sativa
cccaaagaaaaaacaaacacaaacatacaacaagtaaaatatatttactcatccataccattaaaataagtatgaacatgcacaagaacatgaagaacaaaacaaaaacattcaaaatgagagaatttagaaaacttacctcttgaaagcctccttccaagactccaagtctcacttcaccaagttttccaataaatgtgagcaagaatgatggtaactcctcatatttatagccaaaaaaaggtagtggatgagtgaaaaatgttactcatctagaagtcaatagtaatagtaatatatgaaagggtaaaatcaactattgggtacaaaatactatctttaattacatgatggtaagttcatacatatatatatatttaaataatatatatgttcacaaaacacacattttatggtgctcatttagtcataataatatataatttgtttatcagtaaagttatgatgctcaagtagtaaacatgtaatgtgagttagatagacgaacatcacactcaacatatatataaataatggtactctctacgatggcctcttgccttcatattacatatacacagtaaggttggatggtctactcacatatatgtcacttgaatagaaaacatgagactcatatatacatatattcggaccaagtgaagaaaagcatactcaatgctacttttactccacggtccacctaactaccttttgaatgtaaatgtacatttagatagagtgactattttttttatatatatatatatatatggtagtcaaatatgtgtcttcaaacaacaattagacaaaagggacaagaagcacacatcacttcaactttagagcaatctacaagctagatgatgttagctaccaaaaaaaaaaactaaattagacaaatgaacacacaagtctcacttatctatctcctcccattatttacatacatgtatatctccattaattataaacatactatgcctgtttatctcctcccattatttacatcatatctatatccactaattatttacatacatgtctatctcctctcattatttacatacatgtctatctccactaattatttacatacatgtttatctccttctattatttacatatatatttatctcctcccattattcatagatatataaaatgtatatctatttcctctcaatatttatctacatatccatctccttacactacatatatatgtatatctatctccttacaatatatatgtctatctcctcacaacatatatatatctatatccttacgcaactaaatgtatattttcttataccacatatatatatatatatatatatgtatgtctatctactcttctcatctcatattttgagatagatagccaaatatttttatttggcccaacatatggcttttataagcaatttatattcaaacatatgtctaactggttaaaccaacaagacgatttagcctagataagagtcctcttgaagaactaattgttcacataaacattactcagccaagacagccacatacacgcatgcggcaaggaccacttaaccaccatgcttgaaccattcaagcaactttcttgtctcaaacagcaagatatgggtacaccgcttgacttaggcaggtagaccacttggctagcacccaggttattcaatagtagcacctaatttgatattattaactctttagagagggaggggcaaattgtaaaggtaaaaagttacttaatatttagaacatgtttgagaaatccaatatacaagtcagacgggcccattagtaatgaacctaatattattaggccaaataagatagccagacaaactcactgagctttaaaatagacaaataggtgagcttatgggtcatgagccagttaaccccataatcgagtttgagtctggccagttagcaaaacgagtggaaccaagtagatattgaaccagttagaaagacggttaccgctcccataaaattaggaaagcaatcaacttgaacgagtccaatgggtgatgtggatggagggcaacgacactgagagaacacgataaaagaaactatacggcataagcagggaatcgaacattcgatactcctactactcacttgctcaagcagatagtcatcctttctaaacttttcccttaagctttaccaccatatttgttcattcagtcagtctgtctactcgtccactcatccatccgaataccattacgtatcatttatttctgttattattatttttattacaatcgactgacttgagcatcagagtccctttggttggtaccccactagtgctcccaattgaacttttgtctctctctttgttcttgacggttgctggtgctcgaattccataattatagatttcaccctctacaattatatgtttaatatataaattctattaaatctcgaacatatagttattcatgattattgtgttgttaacatagtagataataatcatgatcatatgcttcaaactatttagtcccacaatttatcagtgcatcaacgatgttgttttacttacactcatccgtctactcgtccactcatccatctgaataccattacgtttcatttatttctgttattgttatttttattgcaatcgactgacttgagcgttagagtccctttggctggcactccaccagtgctcccaattgaacttttgtctctctctttgttcttgataagttgctagtgcccgaattccataattatatatttgaccctctacaattatatgtttaatatataaattctattaaatctcgaaatatagttattcatgattattgtgttgttaatacagtagaaaataattatgagcatatgcttcaaactatttagtcccacaatttattagtgcattagatttacgctgacgtgataatcaacgatgttattttaattacacttgtataagtaatgtcctttctaaggcattagcaaagtaaacttgtatcaaatgtatcgacaatagattagattggactgatattgacagtgtaaaagatatcataaacttaccattaagtcttttctaagtcgatgtcacttagtcgatcttagactaattgatctcaatcctgagatggttaagttctagcttaattgtactatacgagttctttgacttgttcgtgacccgcttacccgtatgactagcccatacttacatcttggaaattcggtagtacaattgagtggtagcgttgatcgtagatatggaatctatagcttctataaattcaaagtgaaataatggtttcctttgagcttggctaaacacaacaatgatagagtgctcattttagtaattacattagtttactaaaatatcatt

SEQ ID NO: 113662 - DNA, 2215 bp, Cannabis sativa
cttataccaacatcataaaatccaacataacatttggatcaaacaaaaaagttaagaaaaaaaaaagggaaacctttggctcattgaaaggcatgcacttcttattaagattgaagaaaataaggaaatttcaaggctaacaatgatagctatgctatgcctaaaacagatacaactcaaattcattttccaacataacaaatgccgaatcgaaatagagacagacaacaactagccaaattacatggaaaacttagttaaaagccccaacaccagcatcagtctttctagcaagctttgtccactcggtatggaatgcacccggtcgatcaattcgctcgtaggtatgagcaccaaacaagtctctctgagcctgaacaagattcgcaggaagcctggaacgcctgtaggtatcgaaataggaaagactagcacacattccaggagtgctaatgccagccgatatagccaacccaacaactctcctccacgcagcttggcgctgaaccatctctctagcgaaatccgggtcaacaactaagctagcaagattaggattcctcacataagcctgcttaatcctatccaaaaacacagcccttatgatacaaccacctttccaaatcctagctaactctcccatgttcaaattccaacctttctcattactcttagccctcaacaaattcatcccttgagcataactacaaatcttagaagcatacaaagcttgcctaacatcatcaataagcctcttcttatcaacaccagtcataacaacagacccagtttcctctttcaaaccagcttctttcaaagccttagcagcattctctctctcctccttcaacccactcaaatacctacaatccaaagaagcagcaattgtaggagcagccacagacaactcagcagcctgttgaacagtccattttccagtacctttcataccagtcttatccaaaatcttatcaaccaattcaccatcacctccatcatccttaaccttgaaaatatcagcagtaatctcaacaagaaaactctcaagctcccctctattccactcagcaaaaatctcagcaagttcagaatttgacaaacccccaacattcttcaacacatcataagcctcagaaatcaattgcatgtcaccatactcaatcccattatgaaccattttaacaaaattaccagaaccaccttcaccaatatatgtaacacaaggaccatcctcaacttgagctgcaaccttatgaagaatatcttgaacattcaaataagcctgatgagacccaccaggcataagagaaggtccattacgagctccctcttcaccacctgaaacccccataccaagataaagaatccctttttcattcacctctttaattctcctctcagtattctcataccactcattaccaccatcaattatagcatccccaggctccatatggtcagacaaagcagctatagtctggtccacaggagcaccagccttaacaagaataataacagatctaggtctttgaattgaaagaacaaaatcacgaggattgtactgacccaagagtgggagattaccttcttgatgagcacgatcgacggtttcatcgactttggaagttgtacgattgtagactgagattgggaaacctttgtcagcgatgttgagagccaagttctgacccataactgctagacctgctaagcctatgcgtgaaagggctgttgaagcttccatggatgaaaatggagatgggtttggtggatgaggaaggaagaagaagaaggaaggtaggtgggtatgtgggtgggtgtaaagtttgaagctttgggagatttagatataaggaagaggagttcttgtcctttggggagattataggcgaagagtggcggactcgtcgagggactgaaaggacagtcttctcttttttacacaaaccaaaatcaaaaccaacttactcaaaacaaaatattattattaattattttttgggaaatttgaggtgaagaaataaaagtttaattttcggttacactttcataattaattaaattttggaaaatgttacaatgcaccataaaaaaaatgctattggtccaactaaatatggggtgttatataatttaatataataatttttagggagtatcgttagctaatcgcaacgcgacatgtcgagaaggtggtaggcaccactggtgccta

SEQ ID NO: 113663 - DNA, 1401 bp, Cannabis sativa
  modified_base (26)..(44): a, c, t, g, unknown or other
aagttcttatttaggatgttaataannnnnnnnnnnnnnnnnnntaagatcctggtaaaataatgtccaacataaacaaagtatgatcatttttggactgagtaaagccctgttgtagtaaagtggtgctgagttagcataccactatcttgaagcttgttttaagctatacaagcttttgttcaatttgcaaacaacattttttggtatcactccttttggggtgtaaccttgaggtagtttcatgtaaacatcctcatgtaattctccgtggaggaaagcattatttatgtctatgtgatgtaagtgcaaattgttgatggcagcaagggcaaagaaaattttgagagtattaaattttgccacaagggcataggtatcaaagtagtcaatacctggttgtagtgtgtagcccttggctaccaatctggctttgcatctttcgattgagccatctaggctatacttgattttgtatatccatttgttgcctatggcatgttgtccatttggtagagttattactatccaggtgtggtttcttaaggcatatatttcaacatctattgctgtattccaaaccttctgtttgcaggcttgagcataagatttaggttctaagaattttgatgttgctagaacagctgctcaaaacttgggtgataacctgctataagaaagaaagttggtaagaggatgagctatgctattagttgaaatgaataaatcacaattataatatgtcaagtctgcaagtttatgtattgctctaccagatttggaagccatgggagggtgctgtgctggaatagtaggacaaatatctgaaatgttaaaattagatgtattggtgtctgctgcagtggaatcagtagtagaataaaattgaaagaatttgtcaatgttaattgttgtgttagattatttgagtggaaagatagattcataaaaaacaacatctcgtgaataaaaaatgtgattggtttgcaagtctaccaaggtgtatgctttcatgttttcttattaacctatgaaaatgtatgctcttgctcgaggagcaagtttatggtcagaattgacatgagatgcatatgccttgcggccaaaatttcttaagtgagtgtagtgtggttatttgagatgtaataattcatatgatttcttgtctttgagagttacagatagtgttcgattaaggagataaacagcagttgtaaccgtgtaactccaataagaaagtggtaaatttgactgtaatgccaaagctcgagcagcattaaggatatgttggtgcttgtgtttgacaattgtattgttaatttacatatcaatttactttttgtgataaatccaacacacaagtatacgtatcgttttaacaagtaatactcaagtaagtga

SEQ ID NO: 113664 - DNA, 2694 bp, Cannabis sativa
  modified_base (2631)..(2631): a, c, t, g, unknown or other
gacatttgcaaaaacacggtttttcaactttatttctggccagaagaacaactatcattgaacatctctacgagctataattctctactcctgtgagaatttttggcaccagtgtagctgatggattatcagcattagaaagaaaatatggactgcgaggatcaatattaggacgtaatctatcttcttgatcaagaacagaataacaatttccatgatctgaagctccacgagtagtgcttcgagttcgagtacttcttgcccttgccatggcagatcagaggacagaatgaagagaaaaatttagaagtagaagcggaagaacaaagaacaatgagctcacgaatcacgtggctttgataccataacataaatggaacaattgagacatgaaaaatgaatgaattctcattaactccattgaagaacaatacattatttatatacaccagaaaacagagtgtgaagctaagagaaagaagtttgttacataactaactcctaactaaattagacagctcactaactaactctaactaacacacacttcaccttatcaatcttaatactttttatgttctctcttttacatgaacaacaatggcacggaggccttatctctctactctctcttgttgatacagaatattggattcgtaagtctcagaacttggagtttaggtctttataaagcttctgcagtagtagcaagctcgatctgagcttgagtagtctgtaactgttttttgttgtaattagttagtgagagttggttgaaaaagacgctgatgtaatcttttgctgatctggaaagaatctgagagctttagttagtgtaattgatcaacagcttatatgagaatttatctaacattgtctttttttaaaaaataaaaataaatatagaagaccattaacgtcagtttaaaatgagtttggttaatgaattaacatattctaaaactgatgttaatggttaatttggtttgtaacattgaaaaattgacgctacaaaaattttgtgtataaatatttctactacgaatataatataagtgagttgggttgccaccgctaataataggaggaatccttgtgctattgaacatgtgctctctctttttttttcttttaccaaaacaaataatttttgtttatttagtaggactcaattaagatgtggttgagatttgttttaaaatcaagaaattatatagcaaaaagaaaagatatataatctatataggtctctttcgatggatgaatgaatgaagcactactttaagatgtaaatactttcttccatcatcttcatcgaaccctacaatgtctaatactaaacaataggataccccaccaccaatatgatcatacaatttagctttatatatgtttatatgagttgtgtatattgtgtttggtgtttgccaactttacactcagcttgctaggcccttgagcttcttttaacatttttatttttcatgagtagcccccctaagctgcgtgacccaaaagttttggccaattgaaagggcaataagaagatattttcattattagctttatgatatttatcttcccttttcttctgtcatgtcatcttatggttttgctggctaaaatccaattttcatgccaacttagtcatgattaggaaaatatttgctacctcttaacaaaacttactgatttggaaatgactttgattagcttttgacttatatataaaaaagaacaatcctaactaattataatagtgagggaatgttatattattttgattctgtttaaatttatattcgtccagtttaactaatgccattttcaaaaaaaaaaaaaaatacaatcaagaattgaactttgtccccaccccacacgcatacacttaaccaccatgagtaacaccaaaatattatcttctatctcataaaccagcataaaattaaacatacttatttgagtataatttcgattattttttaatatttactaaaatatctctgtctaattgcattatagatcttatacattaaaaaagggttaaatttaattacatgttacaccaagaatacaattacaccaaaaagttaaaaagaattactatttatgtttaataaaagaaatatctacataatattatttaattaaaaaataaattcggggaagaatttaggaaaaataattttattaatttaattattattcttttaatcaactaaaaatataagaaaatggaaaaaaggaataaaattataaatgtttcgaaatttaaagtttttaactaattaattacaaaaataaaataaaattttattttattatgtattatgtaatttaaaatgaaaatatttcggtaatatatatcaaaaattctgtttaatgtaatttttgaaataatttggtaaggtatggatttattgattttgttagagtagagttttttttttttttttggtaaacgtaccatgttgttttatttatttttcttaattctattctataaaaaaataattttatagagatattggcggtaaaactaatataactatacaatttgtaacaaattgatttttttatagtaaaattctccaaatctcacttcactactacaaaattgggctttagagncggtttttaaggggttttggcgtcggttttggcgaaattcgctaccgacgctgttccaggtga

SEQ ID NO: 113665 - DNA, 1770 bp, Cannabis sativa
aaggtacttactcaaaaagatatggtgaccaagattttgagaagtctcaccaaagcttatcaaggaaaagtagttgtcatccaataagacacggatcttattgtaaccaatgatgcatgatgcatgcaatgtcacaaatatcacaaaagaacacaaataatctcaagacgataaatttctgatgtcgaagatcagttagaaaccgcaactatagagcatacttataacatgaagagattatgattttttttaaaaaaaattaatttttttttgtttaacttgttcccaggcctatttgattctacttactcacaacttaataataactctccggggttaactattaagtgtagatgagaagtttaccaaattttctttaagcaaaaattgcttatgttgaaagaataagttttatttttttagtttttttttttcaagtattttcttaagcaaagtaaataaaattatagctaactaaatacaataataaaaaaatgacaaaaacaatagtagataattataaaagttaggaggcactaatgctattactagaggagatatgtaataggaggcaaaaatacactcagctatcaagaatttaagaggcacaaaatgcactcaactaccaaaagaaaaagaaaaaaaggttataaggtaaaaattgcactcaactaatgtaggagacacaaaatgtcatcaactaccaaagaatatatataatataataaataatatataacaatatatagaaatagtgattgaatcaagataagtaatatataatatacaattaattatacaactaaaaatacacatagccaaaataaaaactaagaatataactaagtatgcacgtaatgcacgtaacattaacctagtgactaaaagtttctttagcaaattatttattctactttaacattttttttttgctaagaaaccacaaacactttattcaaaagacgaaaagatactggtgagcacatggggactcacctcccaaaaattaaggaaacccttacacgagtgatctaatccccatttagtaagagcatgagccgaatggttcttagatctaggaatccaaaaaaacttagcagacaaactagtcagcagacttaaaaccttagaaaacaaaaaggacacgttccaatgaggggcaacaacagagtaaagcgcaggaaccaaacttaggcaatctgaaagaatatctgcctcctcaattcccaaactgcgtagcacttctacacccttacaaactgcaaccaattcgccaagaatcacagagaggaaggggatcttagcagcaaacaagaccaagataccactagacgcatcccaaaccaccacaccaaccgcaccactactctcttttgtggcaaaatccccattaaccgaattctcccaggcctagacaggatccaccgagtcttaagagagtgaccaccaacagaacaagcaagcctactgcttaagattatcttccaatagctctagaaattctcaaagattttctttttctgtctgaaaacccccattgaccattgttatgaaagttggaattcctaaaaaaccacatgttatgatatagcacagttgcaaatagagaaaactcttccctatcaaattgtgggtcggggctttgagaaaacaagttgaaaattcacttcaccgcctctgccccggagagtagagggaaatcatcgatacaaatactccacttgctacaaaaccaaagccctttagtaataggagagagagagagagaga

SEQ ID NO: 113666 - DNA, 4014 bp, Cannabis sativa
tatatatatatatattcaccggggtgcagtcatgacaatggacaagggagcaagaaagtggcacacatatcttattaatttgtcattttgtcacaagagtcaaatatatttaaaaattcaaaagtattaaactatatacataattataaattaattaattaattataataagctgtactgaactatgtatatatataagtactaccagtcgatatatataaatacatatatccaagtagtcattggaaaaaagcttgtgcatatatgtacattttgaatacaagtaaacagatattgttgaagccaattttattaatgatgatgatgagtagtagttacagtagtacaatattatttataaccatgatttttggcgtaatgggttctcttcttcttcttcttattctcatgaaatatttcttacctaatacaaaacctcaaaacttaccagctggtacaatgggatggctgcctttttttggtgagactcttgcttttctaaagcctcacaattctaactctttgggttcttttctccaagatcgttgcctaaggtacgtatatatatatatatatatatatatcatcataatttcttaattaattaattaattaatttgtctgtacttataattatatgatatgtatgcaggtatggaaaggtgttcaaatcacatttatttggttcaggggctatagtttcatgtgatgttgagctaaacatgtttattcttcaaaatgaagagaaactattcgaagcacattatccaaagtcaatgcatggtattctaggcaaatattctttacttgttgtctcaggagatgttcacaagaagttgaggaacattattgtaagattcatcaactcatctaagtcccaacccaaattccttgcatgtgttgacaatttggtcatttccatgctcaaatcctggaatgaccgtacacaagtttccttctttaaagaagctaaaagggtacgtatgtacataatattaattaattaatgaacactcacctttcatattaagctaaaagaactaaatctgcttttatatataacatatatatatattaattaattattttggatgcagatgacactgagtgttatggtaaagagtgttttgaatattgaacccgatgacccattaactgtacaaattttagaagagtttgaaacatacatgaagggttttgtttctttgcccatattatttcccgggacatcatattacaaagcaatcaaggtattatatatagaaaattatattgtatacttatatgagttagagactctaattttaataaattatgtgaggttaattatatttagtactttaattatagagagtatttattaattaaaattattttataattgtatttattattaattcataaaatttgataggagattttttattttggaaatattgatgtaaattatataaaatgatatattatactcaaattttattttttctaaaaataaaactctttagttaatatattgattaatcaaatccaagttaggttcaaagaagaccttaatatattttaccataattaagcttaacctactattagtaataagttattaatgtataaatatgaattgttttcttttttttttttttttcaggcaagagagaggctttcttcaattgttaaaggaataataaaagaaagagtactaggaaaaactactaggaacgaagtgggtgaagaagaattattcttagatatgataattgaaaaggaagagaatctaagtgaagaagagaaattgagcattgtattggatatcttattaggtggatatgagacaaccgcaactcttatgtccttacttctctactttatttccaatcaacctcatgtcttccaacaattaaaggtacaaatattattttgtctagcttttcataataataattataaacattaatgatataatgtgtttatatatacatagctaaaaaaattattaactatattataattatatatacacaggaagagcaccaagcaataagggaaaacaaaaaagatggggagcccttgaattgggaggattacaagaaaatggactttacttcccatgtaatatattaattaattaagaacacaatttaattacttattatattaatgcaaatcttcaattagtgtatatataatatatataatgttaattaaattactaatgatgtgatcaggtcacatgtgaagcgatgaggtgtggaaatgtagtcaaattcgttcataggaaagctcttcaagatgtaaaatataaaggtatatatctatcatatatgttatataagtattaattagctagctatattagtaacttattaagataataaaactcattatcatcaaatttcagatattgtgatcccatcaggatggaaagtgtttccaatattcacaggcgtgcattttgatgaatcacttcatgacaaaccccacgacttcaatccttggagatggactagtactgtacgtatatatataccattatatttatatatcattaattatgtatatatatgtatacatgatatatatatatatattattaataacaggataataataaggagatgagaaagaaggtgacaccatttggtggtggaccaaggctttgtccagggtccgaactagccaaagtagtcattggattcacccttcatcatattctccttaattataggtaaagaataatcatttatttaaaataaccaaaatcatcaaattaattaatactagtctatatatatatatattttgaatggctagtctatatatatatatatagtctcttctctccttgtattttcttaattattattatatattatgttgctgttgacaaaaatgacataaatatttattaattgcatggaattactatgaggcagggtttagctttgtgaatccctcctatttctttttatcaatgtaatattttaatttaactaatatcttacacatactactaaattaatttcaacctaatatttaattaatacgattacatatataataataacaattataattaatgtgtcaatataatatatatctatatattttaacataatgatcatgaccactacattatcattatgagtatatatattaataatatataatattgcaattaatttgtacgtacgtaggtggaagataaaagcagatgaatccccgcttgcttacccttatgtggaatttcgaagaggtttgattttggagattgaaccagctgaaaacacatacataaatattacaaactaatcatatatatatatatatacattaatatattatatatggtggtacgtacgtatacaatatgtccgtatatgatcaagtcccttctcgggcattagatcaggctatatgtatttgcagttataattgtgagaatttttgttgattagataaggatggatgattaattacacttcaattagctttattattattatatattgtaataatttgcggtgaagcctctaatatttgtaaatattacatatgactctgataaaaaaaattataaaatatcttattttacgattttattatagttatattattttttttttggctgttaaataccaattcaaaatcacatgacacgacgatatattaattattagatcacatattcaataattattatttactctattttttaattaaaaatgtataaatttgaataagaaaataactaaatcaatttttctttaattaaacaaataaaagtttattttagagcaaatcatatatatatattttttttaatttaatacacatatttttgagttagtaattaacaatcaaaaagtaaaataaaataggctatttttgttattaggggtcatatatttaaatttaacatgatttcacagtaaatatcatttatataatttgtttacattttttttttttttgaatggaaaatgtaaacttcattaaccaacaaactccgtcaccaaa

SEQ ID NO: 113667 - DNA, 2050 bp, Cannabis sativa
aagactaacatttgatcaggtgaagcataccttaggggaaacgacgttagaggttctctttttttcaatatcctgccctattttccgcctcttgtcaattactttgcaatctcctttagtttggtgcttctctttctgggcatcaatagccttgccacgcactccagatttgcaaagctggttctgtcttggggatatcccctcaatagcctcctcatgctttgatagcttctgagaaagggccttaggatcacagctttcaacatatatctgctctttctcaaaggatggcataatatcttcaaaatctatttctttcattccgccacttccacttggtatattcacatgtatagatttaaatggtagacatacattttcttcttctccaaaaatactcccagaagccactgatctcgcttcctccagacctcccacagttctttccttctcattgatttcaatatctaaagctgtgaaactctcattagcgtttccattcttcataagtgacatatctatcccttcactatcatccgggcacaatgtgaccacacaatttgttctaatatccccatcttcaacagttccaccacttactgttagattatctaaaatgcttgtcgacaaaactagctctaggttaggtttaaatgacattgattcttcatcacccttacttttaatagacacattcgtatcagtttcaccctctaaatgtctcatctccgtcagttgacaacttctttgtcttgcatcccatatgcaagacgaatggtttgtaaaactaaacccatttaccatttttaacatactaagtggtatcgtatttatgcctcggcttacatagtcagtcacctgaaattgaaaagatacctgcgcaacacatttgcttcagtagttattaagaaaataatttggatttcaagggtatgtacaaaatccatgtagattcaggaatcagagtgaaaatcacagtagatcttgtctcaaacaaaatcaagagctcgttaaaaaagaaagtaatttatattttcctctttcacaacgcacatcaaatccaacaaaaccaagcagaaataaattagcagataaacccatttaaatcaaattgcatcagttgtacctttggggaagcatactcgagttgtaaaggggatcgattcgctacattcgctgaaatcgataaattagcagctaaagttagtacaggttaaaaaaatgaaaataaaaaacattaaagaaatagacaatgtaattcttgtaactaccatattcggtatttaaaaccaatcttcttttcgctgaaggtacgaattcgcagtctgaaactagccatttccgcttctttaagcgcaatccaactgaatcagcaccacaaaaatcggtcacaaacggctgcgacggctgccgcaaaagagcgttaacaaagtttgtgatcgcagcggactggatgaaagccctagaagcgacgggagaaggaatgacgaacagatctccggttaaagagatcggcgagttggggatcgagcagaggtagtgaacgaggtcgggcgaggaggggaatagcgtgcagagagaagcgagtagaggagggcgagccggacggccgaatcgtaagagcaagacgagaaaatgactggccttgtggtagtcggaggtagggacggtgctgagttgggagggagtttccattgaagatttgatgaggatcaaatccaaatctagatgcagcgacaaagagaaaaagaagttagtgagaaatggagggttttttttggggagatagtgtggtttggggggcgggaagaaaaggcgccaaaatgttcgcacgtgtaaatttcaaagttaccacgtgcaggattcgcgccataatagtatttacaactggaaaaagattcgcgcagtggatgagtttttcttttttttttttttgaaaaagcgcaattaatggatgagtattattatgactagtttttttttttttgccatgattattattattaggaaaaaatttaaaaatatttttttaaaattgttttcatatagt

SEQ ID NO: 113668 - DNA, 2199 bp, Cannabis sativa
atatatataaatatatgtggattgtattggatcgatttacatgtcaatcaatattcaatctacacaagtactagttttagattttccaatctaatacaattcacacaagtgtggttcgcacttgtgcaaattggattgaattagatcgtgcagattagattggattggatattttataaataaccctactatttagtactattttagaaaatacagagtctaatttattattttacaaaacagaggatctaattaattatttttacaaaacacgagattcaaaatcatatttatccaattttttatttttacaactcgtattatttatatcgtgttcctaactacatgtgtattgtgaatacgaacacgatatgattattattcgtgtcaaagactccaaacataattatacaatttcttattaggtaacacaatacaatatgataacacttttaataaatatatcgtgcaacacaaacccgaatctcacatattatatgtgttgactgaggtttttagcaaccaatcaaatgagataatgataagagctttgggataagtgatgcaattaatttttacgtggtttgggcattaatgagccgtagtccacgagtctctgttattaatgagagtatttccttacagagaatgttctttgtgtcttttttctctctcctttttccgatcccctttctcgttttcttagggatatttacagagattggtgagaataatcgaaaaggggtaacttgtctttgagagcctgttatggataagcacaagttccctaaagatacaaaatagggcatgtacctacatagtaggtgtcgtagaggttaggtgagattagccttcattcttccttgattaatgtgattcttcataatggagtcatcactagcccctttgattatcgtgtaatcgccctaaattaggcttacgatgtctaacatgtcctcttatgggcgttcccagacgctttcttcatactgcattaaatgtgaggtgacttttcgagtaggtccctttcatcctagaggtaccttactatatcttaactcccagagaagtaggcgtgcctttcgcacttatccgggagctaacgccctgacccatacttgccgcctcttctatacgatctttaacttatctccgggtgaggtgtcttcgttgtccacgtgtcatacatagcatcagccacgtaagggtaacatttacccccaagtcttatttagtagtaggtaaatcagacttgtgagccatcttcggtcttaataaataaagtggcacgtgccccaggcgcatgggcagcatttatgatcgtcatcattgatttttatttacttttgcaggcaatgattcgtttcttgtccattgacagactcttccattaatgctggtgtcaaagaggtactcaaatgtttcaaccgccctttcttctcttcatacccgttcatcccatccgttggatcataaaatttgaatcgttacgaatcttcgtcgtacgatggtgcctgattaacactgccttgcatccctaatggcctataaaagccaacacttttctctactgggtcattttcaccactttgtaatttttagtctatccaacccattcgacaaaattctagacacctctgatttccttctgctcttcctccgccgctgtcagacaaaatattatcaccgagcatcatcagcctcttcctcactatctttgtgtaagtttttgctcatacactctctcttttttcttttgcttgttagggcaaatataaatgatggcactttcgtctgattgtgcttggtttctttggcacagtggttatggtagatgttagtgtgacgcccacaaagtggggcgtccgacaacctatgctttttgttttttagtcattttatgctatatactgctttccttgtatatgcactgccatttttctagaaagttgaaaatggcaatttcttgttcgcttgcttttgggtgttcgaagcgacttttgcaccttttttttatttttttggtaggatgttttgcagccgatgtttgtcttagagaatctctagattccttttttcggcatgcatccgcagggggcctctttccaacggttaggataccctcattcccctttttgatcctagggtttgacatgggggctaacttgtaatgaccgctctagtaatgtggattagtaa

SEQ ID NO: 113669 - DNA, 2698 bp, Cannabis sativa
cgcgaagcgcggatatgttacctaatttacaataaaaatgagaacatttaatcagaaccgtctagttaaatatttaagtaaacatttaaaatcattagttaaatctttttatagaaatagataagtaattaataaaattaaatcatagttatacatgaagatatataaagagacgtgatttaaataaaaaaatctaaattaaagatgtttaattttttaattatgatacaaataaattgtgttgagagcacataaagtatttattgagaataattaactgaattctttaattcaattaatcaaatctcattaatagtgataattaaaagaattaattttgaatgtaaaaattaaaagtttaatggtcataactatcaaatacaataaaagaataaaatttgttttttagagaaaaacatcttattaattattttagtgggagtatactactcactaaaatagtattggattcacaaatgattattattataattaaagaaattaaattattcttaactaagacaattaatattctttacaataatcatgaatccataaaactatataaattttgattaatgagacttaatgaaatacatgatatagcacaccatgttggacgatataagtccacgacttgggaaggaaccgtctccacccctagttcagttcccaaatgaaccgtccgtaagtttcaccacctattcatttagaatagtgatgatgctagatatcaggttctggggaacccctactcacttcaaagtcgctcgaagagctacctgataagctctcagaggtggaactagttgtccggactgagcgatagtcttcgtatagaagactaagtaattcctcattgattcggttcatctgtgcagaaaggaagatggaggtgaacaatcagagagcataaaagacttggataaaaaaaataggaacctaagggtattaactgaatagcctaagacaaagtatcactaaccagccagcttaaagttagttcaacaataaccggacagagtttctaaatagattcgaatatccggacatggtctctaacagacccaaagtaccaggtaggagtcctaacggatcaaaagtgtcttattttcaaaattaaagctaagttctttgtgttcttcgaatcccgaagttcaaagtatcaaactacagtgcaatattcaatctttattatcaaaaagtcacgcattgtacatcctaaagctattgaacatattataatgtataaaaactactctaaagcacgagaatcaaaaagttcaaaagcttagaaactcatcaatgacaaaactcaaaaacttgggaaagtaaaagagagggttttgagaacttacccacaaacggatggctctaagctgacttgaggctgctcggcgagggtgattctctaaaaactgaagaccgtagcactaagaaaatcaaagactccaagaaaattttgaaggtcacgactttcggagtttagaaagctttgagaagatcttttgaaattgaaaagtgaaaaatgagaagagaggactgaggaggtgagacacttatatagattctaaaaaattaattttccctccaaaacttaatggggagttaatgccacaaaaataagcatgcatgagagagagaaggccaagagtttaaacatgagaaagtgtaagctgtcactcgatttctcacattgattgacataaagttgataactgatgcaatgactaatcaatcgaagaaatcgaagtgtgactgtgcacagctgcacggcaaaagcatcataagaccagacggagtgtaaagtccctattcgaacagactttcagacagggacttagggagcaactattatctcaattattactattatgacgtggcatttccatgtcatcaagtccaatcatacatgtggagataaaccactaagaaccgtccagcataacgctgaacaactccttgaccgtcaagcctcgaggtcttaagacaggataacagaagctaaagataggattttgacaagatcctggtcggaccatcaactggctgaccaagggagaacttcaaacaaaatcgggcagcttccagacaaggttggtcggccaactcataactttcatcctgacaacttgaatgggttgtgggtttttttccatgggctttctagaagacttccaatcgcctctacaacttcgaaacgacttgaactgcctacaaaaataggaaagcttcaccagaatgtaactgtcctattttctagggatatgttctgtctgttatgtattttgaataacaacataccctactactatataaagggacttcacctcacataatgagggggatttttctctagactctcacacgaacttaagagctcataagccctaaggctttcaactctctcttttcttctcatcacctcataagtgtactcatacttctcatctgtaacacacattctcattattgtaacactaaagagagtcatagctagaaattacaaggtttcagcctgtaatttgtatgttattatctcaagagtaaatactacaaaaggagagtaggtcattacctgatcaaagagatcgaacctctataaattcttgtgggctaattaggattttttttctcctgaactttgacatgtaccaaatcataccccctgaacttttttggccgttagatcggaaga

SEQ ID NO: 113670 - DNA, 1864 bp, Cannabis sativa
atttaaattaatcatcaacatcaatattaataattatctacctacgtaccaaacggttgtttaacaaaatataaactatattcctttgtaagtttgcggttgttgaatcaatgaattccgtttaagaaaaacaacccttctttaacaaaataataactttctttgtgtatagttatttttgaaaagacaaaaaaaaaaaaaaacctacagaatgcacctctatttatatttcggcatatgagagaattttttagtttaatttttttttttatagtagtctacattgtaattatttaagactttttctaaaatattgagagatttggaaaaatttaacacatcaaaaaatagagttcaaacagtctattacacgtacggctcctgtttaacccctattttcagtgtgctaaattttttctgaatttctcaaaattttacaggatgacttaaattataaccacaacgtagacgatcataaaaaaaaattagactaaaaaattttttagataccgaaacagatagaaaatccatctgtgaacctcttttaaagattatagaatttttctataacctactaagtagccattttacaaaaaaaaatgttatcaaaataaaaaccaataataataaaaaactaattaaagtagtactaattaattattattattaatacctggattagtggcagcaaatcttatggtggcccagccatttttaggcaccatgacagtattttgcaaaggaggatcaacaagattatatcccaattcatctcttttgggatcaaaattacccaaaccataaccaacaacataaaaactaaacccatgaagatgcatagggtggtcaattccagcaaccaaattagttccttggaacacaagttcaacattagacccatactccaaaaccctaaccctagttccattcatcggcgtttgaagcgccaacggcaaaaaatcgcccgtaaagttaaacaaaagaggcggaaaaattggaaagtttgccctaacaatcccattgatgtgaaaatagtaagcttccaaaacatcaattttgttaggaaacacaaagcttatgttgttcatactagcagccaaacgtgtcccattgggtccttgacacgtgtcattaacattatagccattagggcaaggaaatgtgttgattgaaatagtggaaaaaatatgtttgttgatttcgattggaacatttattggatggtcttgattagccaaactcctaagacttgtcacaaaattgagagctgagtttgtgtcattgtagtaaggaaggtcataataaggaaacaaaggttgaccagtcaaacgacatgccacgtcatcatttacggtgtcgtttaatattttgtattgtagaatggctgttgttgtggtgttatcaaaggtgacattcactcctgttgagtaagccctagctgccatgtagtattggcggttatttcggttggggggcgacatggcggtttgtaacagggcgtcgatggtttgacctggcgagattgttatgaaatttgtggttaagggtttggtgtagctaccatcaattccaaccacagtgagattgtgttgagctatggagaagaagaggatttcgttcattgctgcatttattattctcaataggtatcttttgttttgttccacaactagtttgaatgtccctacataataataataattaattaattatgattagagacttgtttaaaatattaattagtagtaattaagggtacttataataaataaatataacattaatatatatatatataacactataataaatatcttttgttgttattattatttttttggaatttaaataaaaattataatta

SEQ ID NO: 113671 - DNA, 822 bp, Cannabis sativa
aaaaaaaaaaaaaacaaaaaggtcgagcaatgtgatccattggttttgtatgtaacatcacacaagtggatgttttattaacataaaataatatatctatgtatgtatatataagtggaaaagcttaatataattctataaaataatgtctcttggacaagctataaggttatgttattcctagtataaaagtaaaggaattatgttcacttcactcatcaacttgaatatatatattatatataattgtgtttttgtaagactaagatataattgattgaagataataataataaagagcataaaaaaaagtgtcaatttcttctactatatatatgccattaattatcttttggtttgtttgtgtcaccttattattagctattttgtttagaattaataatgcaaggtttcaagttgataagtggtggaatataaatttattgcttatccatgtataagagaaatttttttaaaaaaattacataataaattaataattttaaaaaaattacaaaaatacattaacccaaaaaaaaatttatatttatgttttgaatttttttatttacaaaaatacttttttcagtaaaaataataatttttttttgttatttaatattttatttgtagttgtcacgagattatacttttgattgttttatagttgattcatggttgtcgtgaagttgatttctcgttattttgttattctttgctcacggctatcaagtgctacatgaaaacccacctaagatagaatggagtaacattgtatggagccgcttcaacattcccaaacatagtttttttttttttttt

SEQ ID NO: 113672 - DNA, 5153 bp, Cannabis sativa
tcattttatttcctctgtatttttgttttgtctatttaataaaatccaagtagcactctctcgattgagctgagttttctatcaatttgttatctctgcaaaattaaacttggtatcagagcacggctctaccatgtcgactgagcaaagccaaacagctcaagtctctcctgctagaccaggaaatgggaactctcaaggaagctccggtacacagcctcccatggctgctgctattcctccattggcgactcctttcagcaatactctgagtcagcccttttctcttaagttggatcgaaacaactttccgttatggaagacaatggtcttcactattatccgaggacacagattggagagatacttaaatggtcagaaaccacgacctcaagagtttattacggttgaaacaaaaaatgacaacaatgaagctgctacagagttacttgccaacccaaattatgaagcttggattgttcatgaccaacttctaatgggttggctgtatggatctatgtctgaaggcatagcctccgaagttatgggatgcaggtctgcatctggtttgtggtctgctctagaggaactatatggtgcacactcgaaagctaatatggatgaccttcgcaccaagctccaaactgttcgaaagggaggtcaatccatggtcgactacttgaggcaaaaaagggtttgggccgattctcttgctcttgcaggagacccatacccagagagacatttgatagcaaatgtgttatcgggcttggacatggagtacctttctattgttctcttacttgaacatagaacagatctcacatggcaggaactacaagggtctttgcttagctttgacagtaagctagaacgattgggagctgtttcacctaccaacaaaacactgggaagtccttctgctgcatttgctcaaaagcctactcatccaaacaacataggaggatttaatggtagaggtggtggatatagcaacaactcaggccgtggctatggaaataattcgaattacccagctggtggtggaagaaacaacagtaacaataacaatagaggcagaggcagatatggaagaggaaactcaagacccacttgtcaagtttgtgggaaatatgggcactctgctgccatttgttacaacagatatgatgaagggtttatgggtcagcctccacaatctgagaacaatcagcagagtgacaaacaatctcatcttactgctcttgttgccacaccacaagttctgaatgatgacagctggtatgcagatagtggagccacaaatcaccttacacccgaacctgagaaactcaacaacaaggtggaatacaatggtaaggagcatatggtaattggagatggaagtaagattgctattaaacatgtaggaactggtatattaaagttatctgatgcctctcacttaaagttaaatgacatgctacatgttcctacaatcactaaaaatctcattagtgtgtcaaaactaacttgtgataataatgtctccattgagttctttcctaacttttgttgtgtgaaggatctggaaacagggatggaggtactgcgaggaacaattaaggatggcctgtactgttttagtcctacaccagcatgttttcacaccagcaattcctcccagagtcagtcgtctgcccatgttcacacccctcaatctaccagtaacagtttaagtttaaattccctaaaggatacatggcatagacgccttggtcatccatcgatttttgttttgaatcaagtgttgaaactatgtaatgttaaaactaagagtaatgaaacacataacttttgtgatgcatgtcagtttgggaagtcacacttactgccttttaaaaattccactaaccgtgcctctcaagttcttgaactcatacatacagatttgtgggatgcctccccagttgcatcacatactagttataggtattatattcactttctcgacgattacagtcgatacacttggttctttcctttaaaacagaaatctgatgcacttcaagcctttaaacaattcaaaaatctagttgaaaaccaatttgatagaaagattaaacaacttagaaccgattggggtggtgagtttcaagccttttctcaattagtcactgatagtggaatatactttcatcatagttgtcctcacacttctgaacaaaatgggcgcgctgaacgtaaacatcgacatattgtcgaaactgggcttactttgttagctcaggccagcatgccattaaaatactggtctgatgcttttcaaactgctgtgtatttgataaatcgtcttcgtactccagttttgcaaggcaaatcaccttatgaaactctgttttcccgtgtgccagattataagttcctcaaggtttttggtgtgtaatgcttcccttgtattcgcacatatcagacccataagtttcaattccacactcttaagtgtgttaatctcgggtatagtgatgttcacaaagggtataaatgcctcagtccacatgggcgcatttatatctctcgacatgtaatttttaacgaagctgaattcccttgtcaaactggttttcttaacacacagcagcctgaacaatttgtcaatatgtccactcctcactcctggtttgttcttcctactaatcaatctagtgttgcaggttcttccactgtcatgcctattgttcctacagcagtaccttctccacagactccaacacacaatgtaagtgaacattctttctctggatctcccatacattattcaccttatgataattttgatcatgtgcccacttcaccatctgtcttaccatctgcaacatcttctcccatcacaacaaattcatccccgaggcctacacaccaacagtccactgctcctatcgtgcctactcaccctatgattactcgaggtaaagccgacatttttaagccccgagtgttcatggctaactctcgttttgatctgtctattgtcgaaccagctactgtggctgctgccctccaacataaggggtggaatgctgccatgaacacagaatttggagctctcaaacgcaaaggcacctggatacgtgttcctccatctgatgccaacaatataatcgggtgcaaatggatttttaaaattaagtataatgcagatgggagttatcaaagactcaaggcacgtctcgtggccaagggctttcatcaaagaccgggaatcgactttggagagactttcaatccggttgtgaaagctgcaactgttcgtgtggtccttacaattgcagccactcatgactgggaagtaaggcagttagacatcaataacgcgtttctaaatggagttcttgatgaggatgtctacatgtgccaaccacctggctttgaagatgaacacaatccacacttcgtgtgcaagttaaataaatccatatacgggttaaaacaagccctgagggcatggtatgacaaactcaagacaactctcattcagtggaaatttgagaattctaaagccgatacttctttcttcttgctgaaacaaacaagctatgtcatcatggtccttgtgtacgtggatgacataattgtgactgggaacaacaccaaggaattgaatgttttcattgacaaacttaatacaaccttttctctcaaagatctcggagcattacactactttctgggaattgaggttttcagagacaacactggtttttatctctcacaaggcaagtatattgctgaactacttcaaaaggttcaaatggaaaacacaaagccgagtgttacaccaatcactgctggaaagcccctgtccattagtgatggtgaaccactcaaacatccaacattgtacagaagggtgattggagctctcaaatacttgagtcacactagacccgatatatcctttgccgtaaacaaattgagtcagtttcttaagcaacctacagatgttcattggggggcagccaagagaatcctcaggtatctcaaaggtagtatgcatcatggccttcatcttgccccaagtgtcaatctctccatggtaggattctcggatgccgactgggcctcatgccctgatgacagaaagtcagtagcaggctattgtgtttttcttggtgaatctttgatctcttggtcttcaaagaaacaaaatgttgtagctcggtctagcaccgagtcagagtattgggctctatctcagctagctgcagaaatagcttggctgcagagtcttctaactgagatgaaacttaaactgccctctgcaccagtaatttcgtgtgataatttaagtgcaagtgcacttgctgccaacccggtgtaccacgcaagaacaaaacacatcgaactagatgtgcatttcgtcagagacaaagtgttggctaaagagttagaaattcgctatgttccttcacatgatcagatcgcggattgtttaacaaaaggactgtctcctaccaggttcaaattcttaacagacaaacttcatgtgacagagtcaccctttcgtttgaggggtggtgtcaaagaatttgaatatactgatgaggtgtcatcagagggcaaatctgtcaatgtgaatgagggaatcccgagggatattgtgtgatcatttgtgcaatcatttcctggtctaacaacctttctgttgtgattttgtgcaatcatttgtgtaatacgtgttgcttttgtattggtcattttatttcctctgtatttttcgttttgtctatttaatgaaatccaagcagcactctctcgattgagctgagttttttatcaatttgttatctttgcaaaattaaactctgaaacagatcttttgttgagattaaaaaatatgtattctgatattcctttagtcctcacatcactattttctattcaacattggcttgatgttttaagtaaaatttcgttgctgtgtgattcctttggggaatagagatttagtatgcgctagtttttgtactaataaagcggagactattatttttttaggctacttaggatttttattcctttatatgtatcaaatcatgtctctgaacttttaagattgttaaaaaactattgagattgttagatttaaagacttttgtctatttttagtaaaa

SEQ ID NO: 113673 - DNA, 3442 bp, Cannabis sativa
  modified_base (3285)..(3292): a, c, t, g, unknown or other
tcattgtcgttggctaaaagcgaagtcaacaaagaagaatctgtttcacttgctccactcctttgttgcaagtttgaagcttctccctatttctttgttagtagttgcatttgagatcttctcgaatgcatcttcatccacgcttgatagatgaggtagagagttttttttccatctttcttgaatcccttaaggtatcccattgagttttagaaagaacaacattgtcttgctttgtatgtcctttctcaacaatatctcatacatcttgagctcctaatagcgcatttatcttactactctactccaattgtcaaagttgcttttagtgagcattggaatttaaaaggggatcatttctccacttgctatttttttttttcacaaacttgactctaataccactttgttagaaataagaagaagaatattggaaagaataatgtaaaataggctatattttggtgtaaaatagtagtattacatctttatttatttataggactctataaattattctagaaatattattaaaggattagtttctacatcttttatgcccactactaatacaagtgaaggtacaatctaaaaaattgaaaattactcaaacaaactaataaatataagaatactctatcatgtttagtaaatattgaaatactcactcaagtaattgaagaaatttctaaaaattaactctatattaaataagtttaatatttcaggaagcaatcgtttttgcggatatttgagattttagtaacgaagctaactcgcctacacccttcaatcaatcccagcggacgagctcctcgcctccattccactttgtcgaagcataggtatgttgtaactgatatatgtttcaacttttctaatctgttttgatttaattcagatatgctcaccttgatttgattcttaacatgatctgatcaaatctgatgtgtttagatttgggtacagatgaatatgttggtattctgatttcggcattaactgagaatctaagattttttatttgggtataactatgatttgttgataacttcaattaaatcaatatttctatacgattgctgccaatttgtatctgaagttatattgacatgttatcattataattaaaatttatctatctttggcaagatttgggttgatgcttggttggaaaatggccaaaacacgagtttttgtgtttcttctttagccgaaatttatttggtttttatagaagaacagaataagaactcagaaatttcatattctattggtatggaagcactaacaagtttgaagatcaaaacaagtacttggaaacggcttgtgaaagagtttcattcttatgagaaagaggtcgagagtgaggctgccaagactgccttgatgaaggagaatggagctaacacttatgatctcaagcaacatgtttcaatgattttgataaagacatatttatatgattttttttataagaaatatgagaaagtgatattggtttgattgttttgcaaacacgagaatgtgttgggagaatcaaggatatcctctgttattttttcctttgggtttagacactcattttattttaatttttttggagatttgagattttcgtatctaatgctgattcattgtgctctctaattatttggattaattatatggctgatgtatatatattattagattacctttgatggtatgtataaggcatattattcaatgaaaaaagcttatttttatttctttaatttgtatcttagatgttggatgcttcttgtaacagatggtatgtataaggtatatgcaatccaaaaggtatggtagacgaagcctagcatctttaagaacttgaaattgtgagtgatgttagttctgatttttgctactatatcagtatttaggattcttctcttttatgtgaaattaagtagttctaatttgctacacttgtttaggtttatgaagcaaacgataaaggaattccatactggatagctccagaggtatctgtttgttctttgacatttcttttggactctttcatcttttgatgttaacatgaaattacttctttcttgcagctcatgtatgtttgatgaaaattgaataacgactctaatcttgtttctgcactatgataagttcagagttttctttcttctaaatactaaagtaaaatgcctttctggttcttgcttttctattattttgttagctagatcctataattaattcattttcacagtatctgccaaacaagtgcatatatggtcttgtggggtgatcttgtttgcccttttagctggttctttgtcttttcatgatacaaatctcatggaattgtataagaaaataattggcaagccaaactatccttcttctttcaactggattttatctttctgatttgtttacagaaaaagatgacgagaaagtagttatttacacccacataccctgcctaggtcaaaattggttgctggaagtgaaaaaggacagatggtctctgaaaatggagggagcaaaggaaggaaaaaaaggactaatttcaagtctacctgagatatatgaatttacgctctcctttcacctgattgggtaagaaaaatgaacaaagatataagaccagctttaaatgacattgtgttgtttgggcatggcaagttgatcaaaagcagtaagaatgataacaacactatcaacatttaaaacttgtgttttgacttattttgtttaccttgaattgatttacttttggtatttggtacataattaaggtggaaagtatttaactgtgcgtctctaagtaaagttctttctcaaaactggacaagggctaggaccagagtaccaaaaagatgatttttcaaatccattattcaaattttgcaaatggctatttcgtattttagatggtaaagggttggctgctatatggacaactgcaaacataattatgatgcaaactatacatttttattgtttttttatatgtacacaagggagaagaagagagatagtttaatacttctgtatgtgtaaaagttaaaagagattctgacggctaatttcttctaactgtcgtttcacttgtattgcggtaaaatttttgaaactattaaattggtagtaaatttaagatgttatctggttgattgcttatatgtcattatggactgtttgtgtatatccttgtacttataacatgtttatattggtatatttaatattattatttaaaaattatttttaaaatttattttaaaattaaataannnnnnnnaaataaaaaataaaatattttaaattttgaaataatttttatatttttttaaaaggtaaatggcgacaaaatttctaaaatttttattttggttttacttaaccctcaaaacccaaatttgtgcggtaaaacccccaatactcgtattct

SEQ ID NO: 113674 - DNA, 1992 bp, Cannabis sativa
acaaaacagagggtccaattagtatctttgcaaaacacaaagtccaattgataatttttgcaaccataatatttaccctagtagttattacaaccattctattcaaataatttacatttaaacctaaaaataagatcaaaaatcagttgtactatagacaaaagtgaaccatattttcctctaaatatttatattgaaactcaaataaagttcaaaacttcaaatgcatattaatatataatgaaattctgaaagtccaaaacaaaatgctaggtagtagagagtacatataattaaggataaagattaatattattgagagcaattgacctcagtgcctgtgatctctcatgctgatgatatcccatcaaaaccatatgatagtaagtccaatcgatcaccctaaactcttcttcttcttcttcttcttcaacaatctctgtacctttccttttcctcttcaatttctttgtcacctgcttctgcttctgattctgaggacaaatcttcttgcgaacctcaaaagtccttacttcatacccaccataaaagcttcgtttggtaactctttcttttgactttatatcaccagaaaacggctgccaatcatcaacatctctaggggcaagcattggcgaacaactcactccaataatatacgccattgtaacatcttccattgtgtagttaccttgttcaggtggaaaccacgaacagcaacaaaagttatcgtgccaatcaaacaaccagaaaggtcgtccggggttgttgttgttcttcttcaccagattcgagattcgccaattcttactctgcttcatcatagaaataatcttacaaaccaagtcgtaatctagattaaaattgggtatattgagaggattactcgaattccaatcaatgggggtttctgtatcagtactgaatatgggtacataaagggtatcttgtaaagtacccttaatgtgtgtgggtctaatcgctgagttaacaagaacaagaaaatcatcatattcaaaacttaataatcccaattctgtttgataatgatctaaatacgctaaagggtagagatttctagctacttctctaatgcaggaatataaatcgtgaaaccaagctgagatgtaagctcgagccaagtgaagacaaggatttgtgtccggtggaatagtgaagatttcagttaagaaacgaaaatggcgtaaatcggacatgaagagtgaggtgtataaatcgaccagtgatgtaaacagagaagtgtgattcagagcgacacagcgttcgtgctttttgccataagaacgtactgagccgattcggctgtttttttgaaagtgttcagcggctcttgcgagaggggatttggattcagccattgatacagtgtaaggtttttctaattagtaaagattcaaactttgtgggaaatggcaggaaatcagtacagaaatgttcatcatcatcgtaatctctaaacaaaaatggtgttgtattaccaaacaagtgggtgagacaatgccgagttactaacggaataccatgtcccgtcgccgtcgccgtcgccgtgaaggttgttctgagaatccacgtacggctgaccagcaatattaagattttacctagacaaaatctgcaagaagttgaaaagttcgtagaaaatgaaagtgaacagtttacagtaaaaacgaggaaaaaaaaacttaaatttgtatttatactcatttcgtaaaaattcaatcaaatccgtagtattttgctaataatatattcgatcagcactcactataaattttatattaatatttttttttaataaaaattataagatttattaattaataaattcgttaaaaataatagaacatacttcagaggaagagtcttgcaactgaagcataccacctgtagagaaacaagagtctctcgccaagcaatgagccaacttatttgcagatcgttttacaaaacacaaattgtgaaggcataaaa

SEQ ID NO: 113675 - DNA, 6043 bp, Cannabis sativa
  modified_base (6006)..(6016): a, c, t, g, unknown or other
ctggtaaaatattcccaacaagaactactccagccctgatgtgctcgaggctccaagcacctatcccagatgagccactagaactagcaccatcatactcctcgtgaattgcgctttttggagggaagcagctatattctcccagaacaatagacctaacacgacatcctcgcccttgtttgataccataagcctttagtatatttccaacaaaaggagctatcgatcatatttttgattcgataagctctgcttcgaaagtgactattggatcttgaggggtctttgatttacgagccttggtggacataattttaaaatctaggtcacctggtgcaaaagcaacagtgactcgaggtaaaaataagagtctctctaaagggatagagttagggttcaggctaagctgcatctcgcaaataacgatgtttacccttagttatttcatgtaaaaattgcctatagcgactagaaatttcattctgattggtttttattagatgatccctaattttggaatcatttatctcaagttggatttaggtttttagattttgggttcgaatggaagagctaattcgttaggacattctatttctaggaaatctggagttaaaatttcaaaaccagattgggacattttggcaaaaaagaataatcccaatttctagaagaaatttattcattctaaacaaaaaacatatgaatttaatacacctaaattttctccttaaaaccatagaaataatctagaaaataaatcaaaaaatacctaaacaaaatgaagtaaatgaagatgcaattgaaaacaaaaataagattacaaactctggaaaagggagtagcagaaacaaagaagtaaacaacttactgttttggtaaaagtttctgggtaatggagaactcgtcgagtgaaaatttgatgactggaataatgagttttgagattctctaaaattgaagacgaagtatgatgaaacgcacaaaaaataagtcaaggataatgagggcatgcaaggtgatgagaatcagggatggatttttcgtaggacagtatgaaggttttaaaagcagaaatggcaaaatgaaggttttctctcgaattttataccttaagagtgatcaccgttagatcaagagaaatatgatctaacagatgagaacatagtagaattagaaaagatgggcatttaatgttaatgatattcctcgaaatcatgaactgccaaaattcaaagcatgcaatttttcaaattggacattatgacaaaaatacccttgtaatcatttaagaatctcctttcaattaaaaaataactctttaaggagcaattattatactagaaattcggctacacttcaaaaagtgatacgtctcttgcaatggaatatgaaccacctgatgtaataaaattatatcaataaatgcaagataaaataactcattaacaaaagtttaatagaaaatatcacaactcgctgactatatagtcttaagcgagataaggataaaaggctattaaaacttatattgacgagacacgcacctgtctcaaagtacatagacaaagaagatatccatttattcgaagtagaataaatacaatcacacatggcaatctcggatcacgtatggcgagacagccacctcgcaatcttaactaaagagacttaacgaggtaaaccatctgctaacacttagcattttttccacatcaagatggacaaggaggataactcgggttaagcgagacacaattgtccaaattaacattaactatcaaagaagataagaacaaaaagtagttaagcaattaccaaatattatcttacatgaaaattaaatgaaatgtgggaattgtccacgtttcatgaacagttacatttcaaactgatcccaaataaataactgtcaatctatattcctataaataggggtagattccacaaaaaaaagtatagagaatttggggagaaaaaatattattaattaagtattgtatcttgtattcagaaaatatcataaataagatagactcgtggagtatacagatttgtctacaaaactatgtaaaaatatttggagttatttaatcatttattatttattatttctgtgatatatttatcacgtaaaggctcattaattttggttaatgaaaatctatgttaaccctaagttattttaattataaggtgatggtatcaatatcaactctgaagaaatcaattattgtatgcaaaataagtactgcataaattaaagaaaaaatggtcaagtactgcattttgacactccattttctaaccacaagggcctaacaaaaattatatcatccttgctccacactccattttctagccataagggaggtcctaatagaagtctattcaacctattattcttcaaattttgggaacgaattgcagccaatttagttggggaaagcttatttcatcaacatactaccactagggagttgtagttaagtgatattcaagatcttttattaaacaagaggctaagttgagtgagtccaaatagagaaaattttcattttttaacatttagcatgctttgatgattactaactgagcttatgataaaataagaatttgtggattgttgtggatcataaaaaacataggactacgtagtagattttcttgaccactcttttgccaccaggtcctactggagcatggtagaaactgaaacatggtttcattgccaaggacaattgcagggcctgctagtgttccactccctcccaaacaagacacattgatcagccccaattaccagctagcactcccaaggagacaatctgctcaggtagctgaagaaacaaaggaagatgacgaagctattgatcctgccgcggtgacaacgacactttttcaacaagaacaaaagacaacagatgtgccacagcagtcacagagggtgtccttccccctcaaacgtaccaagtgaaccttcgtctacttacactacttaggtatgagaagtagtctaacgtgtgaatagaatgttttgtataaattagcctagtttagattgtttgacttaaaatcattcaacacacgcaagaatggaatctaatgcaatacaaatatttcagaaaaaaaataattaaaatcaaaattgaacatagaaatgaatcaaaaacacacaatatattaccgagatggtgttggttgcttgatcgtcccttacttgtgtttaaatgcaatgccctcacttcaaaaccttgcaaacaaaaaactattcagattgagaagaaagaaattcatttccaaatctaacagcagccatacagatcaatatatatataatatatctaagtagagagtatagaggaaaaaataaattaccttcgatgagacgcctccgccgctgctttgtcgctgccgacagttaagagagaggaaccatcaagagatcgagagagggaagtagatcaacagatgagattttgagtcggaaggaaagatatgaactgagaaagggcgctactgtagagaaagcccaataatagttttaacatataatcttaaggctcaatattaatatttcaaattgggctattgtaactggtaacatctttttttaaaatgttatcatttaatgtaattaaaaggtaaaattattgtagtgagtgtgtgtgaagggatgtaaaagggagtatccctcttgaaatgatttccctcaatatgagatatttctttgtaatactttactgtgttgagtttgaatcttgggctcattctattatgtactactgattattcctattaaataaagatccatcattcattcattattgagttgagttttttttgtctaattttcaattaagttcaagttttaattttgtgatttgttttaattcggaattatgttttttgtttttttgttttttgtttttttttagtgtatttttttttagtgtaacgttttttagtgtaacgtaatagagtgtaacgtaatagtattttacaatcaattaatagcttgataatttaaaagttttggattcgaacccgtaactttttcctttttctcatccctccgtcactactaagctagccttagtggctttttaaattctgtttcttagatattattactcttgtaacaacctattttgaaagtaaggattcaccacaataaatttatgcataatgaatcctataatttgaacaactttgctttttatatgtaaaaatccaaactaatacatggtagttttccctcttgtttttttccaaaaaaaaaatgatagatattatgattatacaaataaatgagaaacatcaaacatcatgtagatgtacatgtgaaagtgtgctgatacattactgtaaaaggatggaacggatctcacattttgttagtatacgtgacaaaatctgttcataaaattaaacaatataattacttcattaattttctcatctttcgttatatattgacacgatcgatcagcgtacataccttcattaattacttcacattttgagtacatgctccttgcttttcgccaaggtgcgtaataaatgattatataattactatactagcttattcctaacaattttatcattaattaatcttctatagctgaattgatctcgataattatatacataaatagctacatcgtacatatataatccatttattttttgtgttcttcttagttcgtgcagagtaataccgtacgtaattgatcatggattattcctcagccaccactacactattttctcgtccagttgccgatcttcaagaccaccatgatcatgaaaaagaccataataataataataataacactactgttttcgatttgtcttttcttcgagatcaaaacaacattcccgccaatttcatatggccagaaggagatttgccatcgagcagtgatgccgaggagcttctgaaagcaacagtagtggatctaaaaggcttcttcaaaggtgacgaagccgagacacgtgtcgctgccgagtttgttcaagaagcatgctcgagccatggatttttccatgttatcaaccatggagtagatcctcacctaattgagctggcgcagcagcacatggattctttctttaagcttccggtgagtgagaagcttagggcattgacgaagccaggtagttcttccggctattcagctgctcatgcagagcgcttctcctccacacttccgtggaaggaaacgctgtcatttggctttcatgaggactcctccgttcccatcgtccaacattacttctcttccacttttggcgaggattttgagaacacagggtatgtacgtatatatatatatatgtatatgtatagatatttcaaacgtatacgtttatgtattatttttgtttttatgaatgattaattatatattacttggattgggtggtgtgtattgtatttagtatggtgtatcaattgtattgtgaagcaatgatgaagttatgtttggagataatggaattgctagctataagcttgggaatagacagaatggagtacagaaaattcttcgaagacggaaggtccattatgagatgcaactactacccgccttgtatgcaaccaaatctggcgctgggaacaggtgctcattgtgatcccacctctcttaccatacttcaccaagaccaagtcgcaggccttcaagtcttccataacaacaaatggctttctgtcccacctctcaaagctgccctcgtcatcaacatcggtgataccttcatggtcagaaaataataatatgtatacatatatattaaaaaaaatgcgatctatataactgtcttacatttaattctaggttaaacttgcttattattagtttattattaagttacggtttcataaaccactattgctagttgagacggatagactagttaaggtacgtagcttgaaatagtttcgaattattcaaaacatatagggttcctacgtcgtattaggtcgtattgtannnnnnnnnnntatattgaattggattatatatcatat

SEQ ID NO: 113676 - DNA, 1038 bp, Cannabis sativa
  modified_base (27)..(36): a, c, t, g, unknown or other
tagactaaggctcattaacgccccaannnnnnnnnnatccttctctaattttcttacaaccctctaagtttataatattttattagttgccgaaaacctcggtcaacaataataattaacattatatataaatccatactttaaaaaatttatatttacatattacttgtgattataataaattttattataatattattatcattacaattaaaatattctacctatttataatattttaaaatatataatttatcgaatactcaatacaatttttttttctaaaagttagctctcaccctaactgactatattgttttagttatttaatacaatacaattttttgtatgacatgtcaaacataccatttttgttcagaattatatgatactatttatgaatttttacaaattatatgtgtaaataattaattatcttaactatttataatattttaaaatctataatttatcgagtacataatacaatttttttttatataataagttaatgcgcataattattttttctcacatcataattacctttttttcacaatacaactacacccaattagtgttttttaatacaatttttttataccacatgcacataattaattgtacaaattatatgatactatttgtcaattttttacagattattcgtgtaaataattaattaattggagagagagagagagagcattattaaataaataataaaaaatgatataagttggtggtaatcaaatatctgccatcccataaaacatatgtttgactatatggacaataataataattatagtgtgtttagtggataatggcataatctatctccacaacacaatgtcatcatatgataaaacactaaataaagatacttcctttggtacatgcatgactacatgtatatatatagatatcattttgtcaagtgatgtactttcacggaatgtcttctgtggtacattagatgggtcgcagggtatattaaatgagtattagggtacgtttctactttttaaccctaat

SEQ ID NO: 113677 - DNA, 1932 bp, Cannabis sativa
tggtgtgataatgaagctgctcttcatattgcctcaaatcctgtattccacgagcgaactaagcacattgagattgattgtcattttgttcgtgaaaaaattcattaaggtctgatatccacagaatatgtgaagaccgaagaagaatctgaaccagaagaagaagaaatgacaactctattacaccagatgttctcatcatccgctttactttctctaggtgtatatcacatggcctcgtaaaggagttccagtcaagagtttttggtcgcgcaaaggagttccagtcgagagtttctagacgtgctaggactgctaagtttgaaagctaagattcgattagaattagggaatcaggattagggatttttttaaattatctgaaccagggaaggtcggccctgatccgaaagtttaggcagggcggagcggaaacccagatcacaacccggttatagtaggacggggctccaacccggcccgcaaaaaatgcccagattgacatccctaacaacaaacattctatctaaaggattgcctagagctttgtataagaaaatgatttacaggctaagattgtttgatgtatactatcgaactcgaagaggaatgttgaaaatcagcctctctcagttgatgacattcaagaaattaagaggcaatcatgattgatttagtcgatccttgtcttttagaaataaaatgaagattcactattatgttttttgagtttattgctgtttgctcctagtttgttctttgttgggatactttctgacaagaacttatacctctttgtgtacttttagtgaacaatatcaatataaaatattaaaatatttaaatatttaaatatttaaaatcagcagtgtttaagagttctcttctccaatatctttgtcacaccatacatgaataaaatattaaaattagatggtgccaacctttttaatgccttcccagttagcaagacgagaatagtgaagctcatgtctgcacaataatattcacattaatataatacaaagttatttaacaaaatcatcttcaaaagctactatttttatcatacaagaccttaagccttgtatacaaattttcagcaaaggtgagaaagtgcacataaatagatgtttgaagcccaaaaatccctgaaggataatggaggtatgcaccaacaataagacttcatggagcgagtggaatattattttgtaatgttgtatttgatgtttttacgttttgtgtcacattttctgcttttgggatacttatggctttttacacatctcacttcgtattttttctatatttgatctgtagagaatggtaaatagaattctatattatattttattgaatagtatatatttatatacaaagttatgagactaaatgagaaattactaaatacaaatagaaaattattaaatacaagttaccttaatttttacggctaatatacagttaatattctaacactctccctcaagctggagcatagatgttaatcatgcccaacttattacaaagataatcaacttgcaccccattcaaagcttttgtaaaaatatctcctaattgttctccggtcttcacatatcctataaaatcataccttattgaattttctcacgaacaaaatgataatcaatctcaatgtgattagtttgctcgtggaacacgagatttgaggcaatatgaaaagcaacttgattatcacaccacaattttgttggaatagaagtcttaaacccgaattcaatcaatagctgataaatccatattacctcacacacaaactgtgttatagctctatattttgattcatcactggatctagacacaacattttgttttttattcttccaaaagatcaaattgcccccaacaaatacacaatatcctgaagtgaatcgtctatctaccttg

SEQ ID NO: 113678 - DNA, 2058 bp, Cannabis sativa
  modified_base (389)..(404): a, c, t, g, unknown or other
attattattattattatatgttttaaggttaggtgacataataaacactaatagtacacaccaaaaaagattatggcatgggagacatgaaagctacaaaactaacaacttaagagagaggatgattattaagtagaagtagttgtactggtagaattttttattttttcagaatattgtgctggtagatctaaaactaaaaaaagtgtgagagcaatccaaacatcacatacaccatataagtatataataggagaatcaccaaacttgaacaatatcttacacttttgttcaaaaacttatttcccctaccacaagaacttaggtggcgtttggctggaggtaatgaaatgaaatggaatggaaaggaaataattttcattccattnnnnnnnnnnnnnnnnttttaaagtattggaatggcattccctttccaccattttggtggaatgactattccatttcgaaatggaaggaaagactattccaatgtaacatgaaaaaaaaatttaatgattttttttttatcaatttcttttatgcattttaaaatttattccattccattcctattcctattcccattctcattcctatgtttttattcatcccaaccaaacggcacatggaaaagaacagaatggaaataactttctgaatttatcaagcctaaaatgtttctagcaatattctctcttgatagaaacttatttatttattttatgtttttgtaattttattatttatttttattttttttaattattttaaaataatgtggaccacttaaattctaccacatgtacatttgggtacgcatcaacaatacacgttagcattttgtaacgtccacgcttcaagcttccattagccattcccagtaggtcacctatactgaaattaccacaggtcaagcacgcttaactgtaaagttcttttgtaatgggctactagaaaagaagatgcatcttgtcgatatagctagtaccaatcaattcatttaagtcatcttcaactgtgtagtgctatacctacacagtctcagaatcatcacacttaacatttcccaagcaatgtgatattgcacagctcccagtctttcaccatgcaagtcacaagactctgactgtcacacatttaacaacataattttaacagaagtgtaaattgcataataaaagtgcggttcagagggttttaccaccaaaaaatcagtttgtggggttaagtatcactaatcatagagcttagataatttttccgtcaatatcccaaaataaaaataaataattacagtaaagaggaagataagttatgttctaaaaaatttgtcaatatgctaagctccatgataaagaaactcagctacataactagggatttacagtgggtacaaaattagtggggagtgctcctccagtccctatcccctcttattcctcatcggggatggagcaaaaaatagcctaataaaaaataaagtttataataaaattttaaatatataaaaatattaaaatacataaaaattaaaatattacacattaattattatccaaaacacaacttaaaattcataaaaataatactaatatactaaaaaatacaaacataaattataaaatgtaaaatattattccaaatataaaataaaatattaaacgggtccctcactactacaaaaagggctttttgcttcggtttttaagtgacatataaagtatttgcttcggttggtgtaaccgacgctataaccgtagatgcaaatactgatttttttacattgattatgaaccgacgctaattagttttttgcttcggttatgaaccgaagcaaaaaaaaggttattgcttcagttcatagtcgaagcaaaaaatccgtgcaccgatgctaattgttttttgcttcggttatgaaatgaaacaaaattgttttaaaaaaattaaaaaaaaaactgaaaccaaacaatcctgacaaaaaataaatacaatatcagataaacaatatgaacatttgtttaagggcttttttcataaatgtacaacaaaaacaaaata

SEQ ID NO: 113679 - DNA, 1404 bp, Cannabis sativa
aactacggaaaaactattttcagtaccagtttctttattccgcatttaattaatcacttaattaaataattaaactgggaacattaaaatacggaatatcataattaattattttttccttattattttttttttcagaccaaactaaatacaataattttaattacaatactcattccaacattaaaccaaatattataattaattaacattaccatttttattctattactattattattacaattaacattatatttttattacaacagatcaaacatcacctaaatgtatgcccaactaattaaagacaaacttaacataataattgttataatttaaagaaatcatttttatacacgagtctcatctattaattaaaagtgacttattgtctaaatgtatatatcattaaaaattttacaaatagtgtatcaaatattaaatttggcatatgagtatacttatacatatggacacttcccttcttttttttttcttttttttctctctctctctttaattctttggtttaaggattgaacgaaagaccctgtaattaaaaaggtattgaatgtgtgttgatggtggagagctatggatgaaagataagagtggtccaatctgtagaataattagatcatatatccctctctgtttttggtatatcatcataatcatcatcaaacatccatacatacattcaaagccattacaacttgtaatactttttcttctttcttctattaatcgtcaattaaagtacattgtttttatataagttctaatcaataagtaaaaattgcattgaatataagatgctgtttggttgaaaggaatgaaaatataaaaataccaatgagaatagaaatgtgaataagaataaaatagaataaaatttaaaatacataaaaaaaaattattctaccaaaatagtggaaagggtatccatttaaatgatattccaatactttaaaatacaatcaaatagaaaaatagaatgaaaaagatgtatcttattatcataggtagtacctagctattaaatattaatccattaatcactctttaacgatataatctcatacttacacaattttaaaatcatcacttaacctctctagaaagatgtgagattgcaaagcatacttgatctatctctttacatactacgaaaatctgagtgtcacaatgctaataaaactccccccattaatatagtacattttctaaaaaaaaaaaattattctaataatatcccaaaattgtgataaattaaatttgacacttaataaaaaatattttagtacacaatattgttaaaaaaaattaataatatacccaagatctatttgtatataatatagaacacaataataagatataataattaggtatgtgtac

SEQ ID NO: 113680 - DNA, 4087 bp, Cannabis sativa
  modified_base (2979)..(2983): a, c, t, g, unknown or other
ttaaaatacggaatttcaaagataagatatttaagtgtataaaatctaaaacattaagtatttatgccgcaatttacccttaaaaaaaaatagggaccctaattctttgtaaattgacaaagaaacatcattttggaacatggtgcccactgtcgcttggcaactagataaattttctaacattactactttatctagtttaaagtagcaatcgcaattaataactaatcaaacttaaaaaaacaagtaatctatagattagcaagaaaacaataacgagataaaggttatgctttacttaaaaaatgacataaaacaattacctgacaaagtcacacttcttcaatagggttacccagtaagcctattagattccattattcagcacaatagtttatggtggagaaaatggcatttctagtacataaaaacttctattgcaaaggaaaaaaatggatattcgaactcgaactctatatagtagtatcttcatgcctattaagaaagaaactactgtttcataaaaccaataatcattttactcatacaagtactttctattcacatagagaaaattgaaaatgcattcacaacattcattccggacaactacataccactacaccaggaaaagagagatccaagaagcatgaaaaagtgcagcatttcctctctttatcccggacctggactacaacctataactcaaataataaccaataagcagttagtatcaaaagcttcgtggtgtactcgagaaggacatcgcttgaacgagagattgttcccttttatactgtccccaacagccaaaacattacaagggacgaaacagcaaggaaaaaccacgatacaaaagccaaggcaacagaactttggtacctgagacatggaagatgcggtggaaaattgcagtagttcaaatctttcgaatatagaactgtcaccccagctgaggagctagcagctgccagtgatagaatagaagtaacctaaattttgtaatttaacaaagaattacttaagattaggcaaaagaaaattgattacacatcgaatgactcaataaattcattatcataaaaaattgccacatttgtatctttgcacattgcacacaacaatgagttgatgaattgagtaaaaacttacccaatcaccaacaacaaagaggctcactagaacaggattatacaagcttttctttgacttcaaagcatgcagatcaaggcatgcaagtccaaaactccaaagaatttgaagccccatcgatgcaattaaatagctgcattcaaagaaacaaagttatgtaagtaccaaatcatttgcaacagatggaaacccaaaatattctaaagctaaataatagaaaaaggagaacaaaaatatataatataagaagcagatactacatgagcagatcaaaacagaaggtcagatatgcattattgtgagaatacattaagtatatctctcaattttcttaaatgaaaacaacatgtcaaacatcaaatacacgtagactatcaattaagcaaatgcccctttgggtagacgcagtgatctatgagttcttttttcaagcttccagtgccttagaatagaggttattcaagcttgtacacaagctaagaatagaggttggatgcagatacaagtgattacaaacttctggtagacttcctcaacaatagtaaacatttcccaggttggtcacttactcatcttcttttggacggccttaggttgattaaatctttcagtttttacaaagtttgtcatatgcctagaaacttcaatgtcctagcggactcgatggctaaatgatccagaatcaatggctgtaatggatcagttaccctaggggacaccctaccccgtgtggtagcagtttcaataaataagaactttcaggctaaaaaaataaagtaaccaaataagtagaataactgtggagatgatggcaggtttagctgtgagtgatcatgtttgttttatcagtgtttaagaagtttcattttggctgaggttatttggtgtgcaatgttgtctctcacaaactcctttggatgtaaatgtagaaataaactatcataatatttctctatctaaaacgaaacatatcaattcacagttctgataaaaagtgtttcattacagataacttttccaaggatttggaattatgaatatggtaaatggggattaacatgagatgacataatttccaccaagagaacataacgttaagtatcattttattgtactccccaagtgatatggagtgacttgattggatgactactatacctagctttccctagcaaagaagacaaaaggggtcctctaatcttaaacaaaataggccattttcatcaaatactcattcagaaaggtactttttttgatgcttgagttcgttctactgaaaatgatggaacaatctgataagtacattttatcaagctaaactaaagctcacaatttgaaaaggggtcccaataactatatactaaaaacatatatataaactacaattaatcagcatagttaactaaaaatgaaattacatacacgagttagtaatgaaatacaggaaagaaaatgagtgtatacaaactgtgaatataccattttcaggttgagtgtggattggaccattaattcatatttcaaaaagccaaagaaggttagagccattttactaataataatggtagaaaaactacttcttcgattaaacccacaaaatatactgaatcctttaactatgcatgcaatgcaaagttgttttcaaacagaccctttcctaaaaaaaagataaataaataaataataataataaaaaaactcgcttgtacatctaaagtcctatattctttgactaaaaaaatgaaaaatttccctgaaaataaacccaaaaacaaaagataaaatgcaccttagaggagaaaaaagtttaagagagagagagagagnnnnngagagagagagagagagataatggggaaaataaccagaaagcggtggagtcgaagaagtcaggggcagagaccataactccaatggaagcagcagcaaaagagaactggccgattctgagagcaaacccactcaacttccctgggctcccaaacagttccttcatctctcaaaggcccaaattaccaacctgaaagttgtgccatgagagagagagattctttcagattttcataatagtgtacaaactcaaaagactcatctttcacttccaattttcaaacaccacaatgaatactctcgtctctccaacggacacagcttcccaccaatactacttttttttttgtctgatcaagcatttttatttatttattttattattattattattattttataaataataaataaatcttttaaaataattaccattaattataattactattcttcattataaagtattaattttcattttctctcttcattttcttcttttttttcttttatattttattttattcacaataattttataacacgttatcagcacgaattttgttcaagataaatatttttttaaaattattaaattgtttagaagttacgatacactaaatatatatataataatgtgacttatatattttaataatcattttgtttttttcatctatattatctatatattataaatgcctatatgtttttattcctacatatttattcttagatttatatatatatatttatatgtatcatgtgttattatttataataaattttatataatttgtgactataatataaaaaaatatatatataaattatacatatattccgaacattatgcaaacatgatattcatcattatatatactgataaaaatataataaaaaaatgaatacatattcatatatgctcttatgattttttgataaaaatgaaaaagtaacataatatttttatagattttggcaaacatttaatgaagtaaaattttatatttgtaaaatatatatatatatatagggcaagattatggtaggacctagcaaaagtttcctaccggtaaggaactttttatgaccattgatttta

SEQ ID NO: 113681 - DNA, 1261 bp, Cannabis sativa
tataccatgtaaattttcctttttattccatcaaattttagcattaaaccaatatctttacaaaaaagttccattatttaacaattttccaaacatgatttttacccaactttgaacctcttgcatttcttccaaactaaacccgattggacaaaaccaacgggaaatcaaactttgaatcaccctctcgaaattccatcaaaccccattcaatactctattttatccaaaaatttatggtagggaaaaacgtataactccaaaactataacgaatttggacctgaaaatttactgggattttcttttatattaaacctacatactcaccaattttcataatttttccccattatatattcacacataaattaaacattacaatctttacaatgcttgctgtcgggaatttttccagcgtacacatcgaacttcatcagtctataacttgagtttagggaagctttgtagttattccaaaactaaaattcaagtactcttcgagtactttacttaaatataattttttttacaaaatcaatgatattatcttatgatctgacccattaaaaagtcgaaccgtaacccaattttaaatatttccagcaacaaacaacataactcaagaacataaaataaatgaagctcaaaactcacatgcatgcatgatcagaccttaaatcctacttaaagagaaactctaaaaagcctataaaaattgttaacaagattcaatgactatagttatgggaaaatcacaagaatatgatgaaactatttttacctcttcaaaagctccaacccgatggatgctttacgtagggtttggaatccttccaatatgtgatattacaataaaaacccaagtcccatgagcccaataatagaaatagaaacttataaaatgaaggaaaagtactttctttgagcacaaagcttcttccttgctttttgcttgaataagatgaactaatggtaaattgagctttgctgagagcttcatcaatagagtaaaaatcaaacaatgaaagagtgatagaggagagaatgcttgggttacgacttgaagagaagtcaggaagagtatttggttaggtttagtggtaaccatctcagcatcaccccttggtgagcatcttggcaccaacaagtggtgaccaactcaacatcaggcccgaccctgggcataggcgggctagtcctgtgcctagggcccacccagcccagggcccaaaattatttttttctcttttaaaattata

SEQ ID NO: 113682 - DNA, 1548 bp, Cannabis sativa
atatcatttttcatgatacgaaaagaatggaagagttaaatcttgggctactgtccaactagcacatggggtaatctgggaagaagatgaattggacccttagtgggggtggaaagaatgattgaatatcaatgagacagatcccacaaaagtcattacagtgggttggaacttacctccagcaataaaggaacaaatcatgtctacactaaagcaggaccaagacatcttgttgttgagccatgtagatatgatgggaatcagttcccatataatttgtcacaccttgaacatagactcgaatgctgatcaggtcaaggagaaatgaagatctctaggtctgatacgttcaaaagttgtgaagctggaagttgagaagttgacttcaatagagttccttagggaagctatatatttggtttagcttgccaatttggttttggtccctaagccaaataagacttagagaatgtgtatggacttcacagacctcaataaagcatgtgtaaaagactatatcccacctccagagatagaccaaatggtagatgccacgttcgagtacaaacttctaagcttcatggatgcatacttcagatacaatcaaattaaaatgtatgtggcagactaagcacacactagcttcgagacttacaaaggtgcatactactaccttgtaataccttttgggctcaagagttttggagcactaacatttagtgaactttaaagatgtcttagagcatctccaaccatggtctctaaatacactccttagctaaaataaggagtgagacttattaatgagctccaaccatacaaaaaatagctctctataatagagaatggatagggagctccctactatttgttaaaaaaaattagtatttaatcaaaacactattacttttatattattttataaaattatttaatatttcacagattaaagttataaaatattgctaaaataatcaaatactaactaaagtatggagtatgattagagcaacaacaatataaatgactctctattttaactttttagctattttagctaaaaaaaataaagagtacccttggagaagctcttaggaataaatatggaagtttatattaatgatatgctggtaaagcccaagacttttgaggagaacattggagacttagaggaatccttttctatcatccagaagttaggaagaaaatttaacccaaaaaaatgcatctttggggtttcctcagggaaatttctaatctttatcgtaagtttttgctgtatcaaagccaattcgaaaaagaatcaggccctcttagatatgcatccctaagcaagagcaaaaacgtctaaagtctagctgagagaatcgcagcactcaacaggtttgtgttgaaagcaactgataagttcattctatttttcaacatccacgcgaaagcaaaaatttgaatggactatcttgttgaggattattctaccagaatctagatttactaacatgtatgttgattaacaccctaaatatgaattctctaaaacaatagaat

SEQ ID NO: 113683 - DNA, 5258 bp, Cannabis sativa
  modified_base (4853)..(4857): a, c, t, g, unknown or other
  modified_base (4921)..(4928): a, c, t, g, unknown or other
  modified_base (5172)..(5172): a, c, t, g, unknown or other
gccgaggctgctgctgctgcagcggcggcaccgcctcctttcgggtcaaagaagcggttcaggacaaagttcacgcaggagcagaaagataagatgctggagttctcagagaaagttgggtggaggtttcaaaagcagaacgaggaagaggttgagaggttttgtgctgaggttggaattagacgacaggttctcaaggtttggatgcataataacaagagcactatgatgaagactaagcctaacaatattaataataataataataatcaagacatgaatagagtagtactgatgaacgatgataataacatggtcgcctccaatcatcatcagtcatctattgatgaggtaagtcataatcatgatgatgaaccagtccttgatcaggaagaagtattagatacttagattatatcatattattacctaatttatatatatatatatattattatttaactatcttttttttccttttttaattatgtgtaagagctagctctctccttggtgatgatcaggttacgtatgggtgttagaggagggcattaagatgatgactacgatgatgcatgatcaaaatataatttgtatgattcttaaaaaccatgcaccttaattattattattagtattactaccctattatcttgtagcattaactatatatatatatatcgtttttgttttgttgtcttttttgtttatgatgacttgttataatttgtttttaatttaattattagtggtttctttcttctctagctttcaatgtattctatgaattgagaactatttgttcccatctaattaatcttatattaatcttctctccacatcaagtatcgaaatgattaatcatgtctttgttttttcttcaattttttttttggctcgtctttattattaaattctatagaaattaaaatgtatggattaagattcttctttttccttccatgacagaagaattagttggcgtggcctgataaggcaatgtttttttttggcatgaaagtgaaatgctttgtaagggttttaatttaatccttatttttaatttatcttgtccaattaatatttgggaaaaaataatggaaagtgtttttttttttaaataaaataaaaatgaatattgtgtgattataaattttagggtgactatgacgtgagcaaactcgtaatcactgaaagacagtcatttattatttcttaaggtctcaatatcgagtcatctaataaaagtttgtgcacaactcttcgtctctctctctctctctcctcatgatttgacaatacaaacattcaatcatgtaaaatctaatataagattcattttgttaaataagaatattaagttgttaactttgtcaattatttttttttcctctgaaaactatattcttcaagagataaaatgtagcatttttttctttaggaaaacgaatgactagcatttcgttatctcatttttctcttgtatgagaaatggggtaagtatcccttcaactttggaattttttcgaaaattcctttatgctgtttttggagttattttttcattggtgaagaaaaaatattttaacttatacatggaaaaagaaaagaaaaactaaaagtcaaatctaaataaaaaacacaaaatcatagcaatttccctcaaacaaaataaaaataaatgttgtttggttaaaaacaaatgtgaagcaagaaaacagataaaaataaataggagaaaaaatctgcagtaggactaggacatgcttttgtgtcctacccatacagtaaattgtgggccacatagtctgctatcttgtatttttcacttgtccacagcacatagtagcagtgttaaaatataaaataaaaaccctagaggataagatatttataatatcaaattgtaaaaaaagaaacactaaaaatagagaaagaggttctaactataattatgtataaaggagttgaacatctttatttctggtatttaaaaacaatataattaaaaaaaatattatataatagtctactttatatatatataattacggtatcttatatgtagttactcaattttaaaaacttctaaataatttactacactaaaataaataaaaacttctaaataccagtgcaattatatgcttgaattatatttttgtaaataaaaaattttagtatgcctaatacaattactaatatactgtcatacaaaaacaaaatttaattataatttctcaaaagtgtccaaaaaaaaaaatattccaaccggttacgacaaaaataatacctctgcagtagaatttttaacagttatttatatttaaagagggtgtctaagtaaataggatgatatattgagtttgttatcctaattaaataggatagtcatatctcaaaaataaagtaaaaaaagttcgttggtgttagatcttggatttttttaagctctcactaatttgtgatggtgtaatttactaaaacaataaaagtaatgtgagattgggatgcatagtaaagattttcatcaaattcttcataatatttgtcaaaaataataaaatgtacaaaaaaataaacttattgcgacgacatatgataaaaatattgtcgcaataggattcacaaacgagcaaaaattacaaaattaataatttttcttttaaatgatataatagttgaaaatttttatattagctagaaacatcacttttatcactatcaatagggacgtctttatttttatcacttagaaaattataactaaattttcttatatgattgtgtatattgttgttatagttaatattttttgaaaaatttaaaattatttatagtgttaaaaataagatttaaaaaaactaaattgttttcgtgcgaaaagaaacaagcacgcgtgcaactaaatcgttgaattctatttttgacatcgttaaataaattattcagaattttcaacaatagataggatacctattataactataatatagactatcatgtaaaagaaattggatataattttttaaatgccaataatagatgtccatgccaatagggacaaaagtggtgttcctataataacgaaaatgttatcgttataacatattgaaatgatttaggtaattcaaaccatagacttcagctcttggttcatgtagaagcgatcttacatacctttctatggtcttccttgaatttccagctatgtgggagcctccaattacgatctccaacctacctgcaattggcgcaggctggagaggtacattgaacccaactggagcttcaggtcatacataatgttaaagagcaacggatttctgtccgatgagaaattttatctcgtcccgcaactgattacactcattagtgtatgactgtaattgttgtggtaacaataatattttttcatgtccttcttccctgactccttgaaaggaagagatttgtgatacaatactgttgactatgtggctgtatagatctcctctcttggagccaagataatggagtaggtggtgaagcgaggctcataatctcttaagggcttgtccccgatcttaggcttctttcctcctggggagttgccttgcttgccaccgttgttgctatctttcctccatttgaacctcccttcttcccattgccctgcgccttagtaacaggggcttcagtgtcttatgatttcaatctagcaggggcttcagtctagtctagatttctgagtcaacaatagaaataatataatcttatgatttcaaaatagggtatataatataatgggtaatatataattaatatatgccaatatctactactgcacaacgtatcaattaaaaaaaaataaaaactcttatcattatatttacaaaaaatgtgtcaaaaaaataaattaaatatatgtatttacatctataaagcaacacacatacaacaaaaaaaattatcaagaataaactacaaatatacatcttaaaaaatgcacatgaataaaaaaaataactattcaacaaaaaaaaaattatgaaaaccacttaaaaaaaatggcaaaacaaaatgcacatagatacgcaaaaatattgtctagaataaattgaaaatatgcacgataaaaaatacacataaactgaacaacaactgtacaaaaaaaaatacacacacaaaaataatagaaaaacaactatagaatatcgaaacaacaacataaaaacaattgtataaaataattataaaagaacaaaagaatagttataaatcaacagaaaaataacaagagatcaatctatttaaaatatgtaaatcaaacaaactaaaaaacatctaaataatatatactactttttattaatcatgtaaaatataaaaaaatataggagttctcttaattcttttgtaagagagttaaagactattgaaaaatatgagaaaatgatgaaagtaaaagaatcatattctagtaaaggttaaaagaaattaattaagattttttttttataaactgtgattaattaaataaaaatattttgaaacagtatagagtgagaataataaaaaaatgaaaaagcgaaaaaaatagaataagtatttgtattttattttttttaaaaaaaataataaaaaataaaatttgtgagagagtgcaaaagtgtataaaaaatgagatataaaaatgtacactttttatatatatttatatatacaaagataaaaaaaaataatttgagtaaaaaaaagagagaattaaaaataaaaaattgaaaaagagaaataaaaaaaatgaaagaaagaataataaaaaaaatgtcagtaattgacttaaaaacaattttttatttttttttattttnnnnnttcaaaatagtttttttttttgtatttttacggaaataggcatagaaatccctattgcaactannnnnnnnacctaaattgcaacaaaaaatcatatagaaaccactattgcaactagcgctgcaacgactttagaaatccaaaccgtaaatttgaaaacaaaagttaaaaaaatagtatatgggctaattccccaaaaataaatcagccattagctatatatatatatataaaaaaaaagctttctttgaagctattaagtaaaatataattaaaaaaaattaagtaggacccatatactatttttttaacttnttttttaaaaaaaatttacggtttgggtttctaaagtggttgcatcgctacttgcaataggagtttctatacgatttttcgttgca

SEQ ID NO: 113684 - DNA, 937 bp, Cannabis sativa
aagtttattttattacacttttaccacttgcacacacaatcttgtgggtatgtctggaaattattcatggcggaagtaacccataagactccaactgctctaccgtgagacccattttcggtgaaatccactgccatcgccgccgtcgcagcatgtgggtcgggaaatccactgccatcgatcgaattctttgatttcttcatctggaccgttctcagtttccgctcccaaattcccaatatttggtcagacaatcgaattggtcagtcctcgccactgcaagggttccagaccattgtcagcttcttctagcaaagatctccccatttctataaagctgagaggattgaattcggccgaaaatgcgcgcgtgaggaatcccggtcctgaaagaaccagatcgatagccttttggaagatggcttgggaaattgttggttggcttaaaatgggtgagaatgatttggagatgaaattgaatgggatcaatgtaagtctaattaatgctttaatcactttgattttgcagttattgaattctgagaaaatttctgctttgcgtttttataactggattaaaaattcgaaacctgctcttggtcgtaattatgacgtttgcagtttaatagttgataattgtggaaggttaaactattacgagacaatgacttgtactttgaatgagtttaatgaaaaaggaattcgcttgactcaaaatgcattccggttcataccggagttggcctcagatggggattctctcaagaattacgtgagtgaagttgtaatgatattgaatggagttggtggaatgtgtcgatcatctggagttggagttttgggtggggaaattctttttcttttcttgtagttaagtaatgtactctttctcactccttagctttattatagtttgtatacagttgtttagtagttt

SEQ ID NO: 113685 - DNA, 2096 bp, Cannabis sativa
  modified_base (2063)..(2063): a, c, t, g, unknown or other
ctctcacctatggtgatccgagggttgttgtttaatcaaccttactttggtggtgtccataggacggactcagagttgggccacgtcagcgatcatatgctgcctttggcagccaacgacttgatgtggtacttggctttgcccgaaggcgctgatcgtgatcatgagtattccaatccgacggttgtcaatggtggtgttggtgatgagaggatcaaacggttgccgaggagtctggtaactggatacggtggggacccactccttgataggcagaaggagtttgtggagttactcaagagtcgaggggtccatgtggaggcccacttctgtgacgatggattccacgccgttgagctctttgaaccagccaaagctgaagccttaaacgacgtcgttggccgtttcatccgaagtcatgacacgtgatgaatgatgatgccctcttattctcaatataaataacccaaaaataaaaaataaattgcaatgcaagtcgtgtcatgacattagatattcatatagttgagccagtaataaactattcaataagaagaacattaataattctttttctcagatggagatagatagcgctagttttttcgaacataaatattataaataatgaataaggcatgtgaaagacggactatttagttcattttcatgtaatgaaatgggcaatttcaattaaataatcgattattagtattagtactcttattaatcttttgacactacataatctctcctacacttttttaaaacccattaacatttttatctttaaattttgaccaacaccaataatttcccctttttattaaaatactaattttaagattaatattttttttattaattcttaaataattaaggaaaaattattataaaattttaataaagttcttaaattaataaacgctgggaatttttgtcccaatttttgtcaaacaagaaaaaatattagtgtgccattagctgccacaactattaataaagttaatgtgatatgtgaagaagttttctcaataaaattgaagagataagagaaaacagcctcatgtgcctacaattattaatttattttatgtctatcaatgtatttcgtaggaccaaataaagaatctagacgaataaaagaaataaacctcatggctaggaccatgagatcacatgtaaaaagggtttgatctttttctcttattggtattaagtcaaaacaacacaccaactatgtaaaaattatggtctccatattcttttttttttcctgctcttaatctttatttatttaattagttgtcgaaaatttcgatcaatattttgatactttagagtttgaagggccggaaagcttagtatccacattagtggtagtttcctatatcaaacattttttttttcacatgacccaaaaaataacagctactagcaaaacacccataagatttgtagataaatgagagaagagtatgagaaaaatgacgatagtgactcctcacatacccatacccatcaccactatcggcatcagagcagaagttagatccgatgaacaaccaaaaagtttagatgacggtaataaaatgcaaagccaagacatagtcccccatataggatccatcctcatgcaaggaacatccttgaacgttcttggtggaccctccttggccatccttgtggaagagtcatcctcgtgtaagaaccttcccttgaccattcttggtagaagtttcgtccttatgaaaaaattattctatggtcaaagatatatctttaaaatcctatgctcaaggagacaccttctaggagcccattcttaaggatgcaccctccaagagcccatgcttaaaaagacatctccaggatccatgctcaaggagcaaaatcccatgcttaaaaaggcttcctatggtaaaaatagtaaaaattaatgtaaatatatcataaaatcactttttgtatcaaatttaacataatttttacatttttttattgagatgtgttaggttatttttagtattaaatttagattaattttagcatattttttattnagtttaaatcatgtttggagcatttttacgctt

SEQ ID NO: 113686 - DNA, 4330 bp, Cannabis sativa
gagcgggactgaaaaaaaaaaaataaaaactttcgacggggtccattctattttttctcttcaaagccctagatcgaatttttattttctatttttcgtttcccgcccaaacctcgtcatttaagaatgactaagattctaaatcggtagatattcaagggctcttaatcgcatttgttttattgggtttatttcgttacgtatttgtatatattgtagagatagcttttttcttgggtttttttttttaatctctttggtgtttgattttatactcttatttgatgttttgacgaatcgagaagaaacccatttgttgtttttggtgtctgaattgtggatttcatggcagggtggtcgattttagctgatgggtctgctttagatcattccaagaatccacaggagcttgaaccaactgggttgttggtcgatttcgaaccggattcaaaagggtctagtaaacttcggcgttgtttttaccactttcacggtcttcttctaaaggagatctgtggaaacaatactcttaggcctattcctccgattctaggagaagggaaatgtgctgatttgtttgaactattcttggctgtgagggagaaaggtggctgcaatgccgtgtctaagaatgggttgtggggttcggtagctgaagagtctgggttcggtttgaaattcgccgcagccataaaattaatctatattaagtacttgaatacattcgaaaggtggcttgaaagaattgttgttggtagcacggacctggaactcagtcacactagtgtctgctcagatgtgagtacatttttgatggagttggagggtagtttaaatggcttcttgccttcctccgatcaaaatgcattgtcaaaggacgattcgtactatctgtattttgacgatacttcgatgaagagtgaacaagatcacaaagaaagaatagaagatattgggtcagatgataatacagatgacgatgaaatgactgttgtagatcccgctacaaaattttcactcattaaaaagcgaaagaaacctgaggtaagtgatggatcattggaagaggtagaagatgagaaaaagagcagggtgatggagttgaagctggccgaagggaagagctctgataattcttcttcttcttctgcttcttcttcttcagataaagaagtaacgaaggtggattctggggctgcggttgaggaagggaacggtgttgttgatgaggtgagtcgggagtctttcagggaaatattaaattgggttttcaccattgccaaagatcctggtgaccctgtttttggttcattgccagaaccttccaaatggaacgctcatggcaatggggagatatggaaacaggtcttgttggctcgagaggccatttttctgaagagaaatactgattcgggttctgaacaggaacaggtatttattatctcatttttttatttatttatttattgtggtaattaagccatttgaattaaactcttattatcaatggttctgcattttactgtttacttttttgtctgtgtgtgtatgtgaatataaatgtgcatttttacactgctgggtcttttgacttgcaagtatctctttatatttaattctctttgttgtattcaataaagcttgttttcactgtttgatgtgtactagatttagaccgctatatctagtagtctgggtagttatggatgagccatatattattatggtggataatattctatattaggttgttgagcatgaccttaggggatcctaacaataggagtagtaacaactcaggtttaagtttgagattgttatgcattgggagttaactcctattttaaagtttccttctcaaattaattctgaaatcttctttttgaactgttagttattttattaggtctggtggtaggttttttttcttaattaggtgcagtggtggcttttagatattaaactcaagcaaactatccacattattggtcagtccgcttggcataatttttaattattaacacgtatattttattaattcttaacagtgggttccttaatttttagtagtcaatggaaaattagataattagtttgcattataacaatacattttgacaagtttcttaaataaaactacccaactagaaaaagaaacactagactttttcttttatgttactgccctattttatgacagcacaagagaatttgaagagtttggtgttagggaacctagctttgattattgtactttttctcatagctgcttataggcctttattcttacctaaaatgaaagctgtttaatgtttgttttcactcttgtttgttaatttatatttagaaaacaacttaccacatacccatctgaatgaattttgtcattttaatgatctcattactattttctaaaactgtcattagttttcttaagaagcaatctgacgcactcttaggctgtaagttagccagttattactttatggttttccattagtagtattaagcattaaggtttcccattttttctactgagattaaagtttaatacacttttagggcctgcactgtttgaattttgttccacggtttagaatgaatgtttgagtttcttgcattccatagaatgttgagtttagtatgacgatcaattttgaattcatgtttacagttatgcatcaaattctattaggcattcaaaatgatttgattaatctaaggtggtaattatgactgacgctcaagcatcttgtgtatgatttttgaaatataaaaaacttgttagttgtatgatttttgatgctcataacattctttttataatagagtttctctaaattatttagctatttagctaaatgtgataaaaaataatttcatcaactcttataaatcataatagtacatgtagcttgctctacatgtagagaatgaatagtacattctctaaacttattttcataatatataaacaatatgttatttatgtatattgtatatatattcaaaaattattataatattaatttaatgatgtagagaaaaatataaaaaaactgatgtatgttgtaatgtgaaagtgcgttgtataaaatagagaacgtagagttttggtgatgtattttacatgatagattagagaagttgttgggagtcttcttccataataattggtgaaaataaatacttttctaatgtctctaaaatgatattcttttaataattatgcgcgatagtaggactcctaattgtcttgataattaagagctattgttttaaatggaaggttatatgaaattcatatggctatgcgagttttattttaaccccatagaaggtaaattctttcaaattgatgtcacttttccactaccaaacgaggaaatttttatactttcttattcacattctaagctaatattacctacctaacgtctccaaactattaattcccctagaatcctagataactttttttttttctcttttggctttcatttgattcatttaactatttttgtagattaccatttgacaggttgtgtcttgattgtttattgttgtacttgtattattttatttgttttatgctattttttgatttctaaaacatcactttctactttgttttgaaattcactctggtgtgaacgaattttatgctttaatttatttatatccatcagtttttctttttctttttttacttcttaaatttatggttttgttttttctttcttaagtcttttgaaactcacactaacacgtgggacctattaaaagtttgaaaaatgctgaacacttgttttatattaactttttttcttttattttctctttgtatatttgtaatgtattcttttagttgattatttacttattgggtactccttgttttaacgaaaatatttttgatactttattatgataaatgcttagtgagaaccttttaatttgaaattgtatgtactttggaactctatattatatatagagatttttacactaagtatctaaaatcatttttttatttattttttaacaaattattttatttacattttttttagaaaatgtcgttttcacatcgctgcatgtcgtttttgtatagcagcaatgtgaaaataacataaaaataaccatctatctttttatatagaaacattttaaatatgtaaaaataaatactgtaaattcgtatttttgtaaattttggatatttataaaaaggctaattagtaattttccccctgaactttgacatgtattaaattgtgccccctgaacttttttggccgttagaaattctcccgaactattgagattg

SEQ ID NO: 113687 - DNA, 6247 bp, Cannabis sativa
  modified_base (5637)..(5648): a, c, t, g, unknown or other
  modified_base (5825)..(5842): a, c, t, g, unknown or other
  modified_base (6221)..(6221): a, c, t, g, unknown or other
ttataattctaaccccataaaaaacattaattggaattaaactaataatagtaaattaataaatgaaaacaaaaatctaaaactgaggatgtcgttgggccgaactgaaccactctcagacaactgctcttgaacccctcacagaagaagacgttgatgtgggaatgagaaaaactttggcattttagataatcttttctatctcgttgaaatttctcacatgtaaattatattaagttagttaaataagatataaagatcgccttatattttggattaaatttagtctaaaatatactataaaattatatttggcccaatttttatatttatgctgcaatacacaaagtacaaattagctataaaaatttataataccattaatatttatagaaaatatacaaaaaattaactttatttatattattttaataacttataaatataaaaatatttttttattaatgagtgacaaataagtaattaaaaaatgtggcatttattgtgggccaaaatttggtacatgctattttttgtactaaatttggcataatttttagcttgagctaaatttgacacacattttacctcaccattggagttaacttttagtaaaatattctaaaaaatagcaatacaccatatttatagctctgtatcggagatgctctaaatatattaaatgactcataaatgtgtcattgtgaactaagggtgcttccaactacttttatgactatgtttttcgagcattttttttttgtcttcgtccgaatacaagtgcttttggggaacaaataaagtcacctgggccgaacgaccaacctagcgcccaggttggcacaaggcatggtcaccagcgtcaaggatgacatattgtcaactcaggccacttccaagaacttttccaatgaagttttctagacattattttgtttttttttgtcactaattaatatacaagtactcttgggaagcaaatgagaccatttggtggccaaaacacctggccatcacccaagttaacattaaacttggcgcacgtggtttcctcactcacatataaattttgcttcgggcatactttgtattttggtctaaagcgagggacgagccctctatcttgactgacatataatgaaagtaccagaacgactcatcagcttggactacatcgaccatgatagcaactaaaaaagaataaggaaaaaagacaagtagttaattaccacactaacaaatatatcacgcgtatgggagagtcctcccccaaaactacttggagaggtccccaccgaaccctacatctagaagaaagatcctcaggaaatattgctccacgatgatcacatcgagaacacagaagattgattgaaagttcgcagaatacttcatacagaaccataagggtcccacacaaagaaaatagagcagaagtaagaggcggagcctgtacctgctcgggtgtttgctatcactcaaatcaatgttgcagccagccctgctcaggtgacaggtcaacttcttatcaacaactcctattttactgtattatttgactctgaggctacacactcatatgtggcgtcgagagtaattaatcaattgggtaggccttttgattttattaaaatagggttcgggaacctactgcctagcagagaattggttatctccaaaaggtgaattaggtctatgccaattaggattgaaaatagggagttgtgttgacttagtagagctgaaactaacagattttgatattatacttggaatggattttttgtccaagtattcggccaacattaactgtaaacggaaaatggtaactttttcagccaaagggggaagatccatttatttatgttggatctgttcaaggttctcaaatatcgattatttcagttttaaaggctaattatttattacagagtggatgtgtaggatttttagcgattgtaattgactccagcagacctaaaacattttggcctgaggatgtcagagttataagagaatttcttgatatttcccaaggagttaccgggattgccgccacaacgagagatagactttgtaattggtttggcacttggggcagaacctgtttcgaaggcaccatacaggatggatccaacagaacttaaggaacttaaaatacaactttaggggatgctggatttagggtttacctgacccagtgtatcaccttggggagcttcggttttgtttgtgagaaagaaggatggatccctccaaatgtgcattgattaccaggaattaaacaagttgacaattaagaacaaggatttattgcccgagattgatgatttgttcgatcaactccagggaaagactgtattctcaaagattgattggtgttccggttatcatcagttgagaatttgagaggaagatatttcaaagactgcatttcggaccaagtatggtcattacatgttgttggtgatgttgttcgggttgacaaatgctccagcaacctttatggatctcatgaacagagtgttcaaagatttccttgataattgtgtcatagtatttatcgacgacatctttgtgtactcttagacagaagaggagcatgaataacatctctgaatggttttacaatgactcagggatcataagttgtatgcaaattttaaaaagtgtgaattctggttgtttgaaatgtcctttttagggcatattgtcaaaaaggatggaataatagttgatccgggaaagattgagacagttaaaagttggccgaggccaagaacagttaggaagtatgaagttttctcgggttcgaagggtattatcaacgttttgtcaaagttttttctaagatttcgatgccataggcggaattgactaagaagaaccaacattttttgtatggtccgacaagtgtgaaacgagttttcaagaattgaagtagcggttgatcacaacaccggtgttagctttgccataagactaggaagcttgttgtttattgtgatgcatccacactgggtctgggatgtattttgatgcaagttgacagggttatagtgtatgcttcccgatagttgaaagaatatgaacaatgttatccaacacatgatttagagctttctactgttgtgttttctctaaagatatggcgacattacctgtatagaaaaaaatgcgagatctacatagaccacaagagcctaaagtatttcattactcagaaggatttaaatatgaaaagccaatgtagtggggggacgctttgagcagaaaaggttccagacaagtctttagtaccgtaatgatagcatcttagttggatttggatatggttaaggctagaattgagttggtggttggaaaattacataacctgacacttcagtcagatttgtggaaagaattagaaggacactattggaagacgctgagctggttaagatttgggatgagatattggtaggttggcctaaggatttctcgatgtcgaatagtagaatgctactttataaagttcaagtttttgttccaaatagcaatgagttcaaaaaagagatacttgatgaagctcataccacaccttattcgttgcacccggaaactaccaaaatgtatcaagacctaaaactctattattggtggagtggaatgaagaaatatgtagtggaatacgtgtctacatgtttaacatgttagcaaataaaggcagaacatcaaaggctggcaaggttactacaaccattaacaattcctaaatggaagtggggagatattacgatagactttgtggttggtttgcctagaaccacgggaatgtatgactcagtatggtcatagtagactgtttcacgaagtcagcacattttctaccggtaaaaaccacctatacaatggatcaatatgcagagctgtatgtgaaggagatagttcatctccatggagctccaaaattcattgtttcagatagggatccaaagtttacatcgaaattctaggtaagttttcagagagctatgggtacgaaactaaagttcactatagcttttcaccctcagactgatgggaaatcagagagaataatacagatactagaagacttactgcgagcttgtgtcatggactttgagggttcatagagtaaatacttgcctttgatagaattttcctacaataataactatcaaagtacaatagggatgactccctatgaaatgctatatggtaggaaataccccaattcattgggacgaaacagaggaaaggaagtatttgggtcctgagttaattcaaaagaccaatgaagcgatagacaagatcaaggctcggatgcttgcttcgcaaagcaggcaaaaaagttacgctaatccgaagcgcagggacattgcatttcaggtaagagagcatgttttcttgcgagtttcaccaatgagaggtaacagtcgctttggaaagaggggtgaattaagccctaggtttatagggccatttgagatactcgagaaggtcgggcaggtagcgtatgagctagccttaccaccagcattatcttctgttcataatgtatgtcatatttcaatacagaggaaatatgttttagacccaactcatgtcttgagttatgaagccctaaaactccagtcggacttaccctatgaggaacagccaggtcaaatccttgataggaaaaaaaaagttcttcaaaacaagaccatagttttggtcaaggtactttggaagaacagtaaggtggaagaagccacctgggaattagagtccgacatgagggctcaatatcaagagttattcaggttagatttcgaggataaaatccttttaacggggggataattgtaatgaccgcatgttagattatgaattagcaaaagcagttagcattaattattggtattttataattatatatataattttatatttgttgtgggtcccatttttagaaatagacattagagttataatttctcaattttggagattttattaaactctaagggtattatttatgctaaatatgaaatatgtaatttttatgattttttctcggcaacgatagaaaatgcgatggatggtcgttagagtcacatgggtaagtttagaatctaattcttagagggacaaacataggagatattaagaatgttggatttaagcaaagttatgtttttggaccattttaaccctaggcttataattgcttaagttggaagaaagaggggtatttttggtattttgcattagggattaggtggcatgcccctaggttggaagcttgccactttttacttcatcctatgtttgttaattttggagttaatcaattaggaaaaatcaagaaacaattagaaattcctaccccctctctctctctctctctatctctttcaaaccaagaacctagggttcttctcctttgttttgattaattcttgctggaatgcaaagtgttgctcagtagtttgtggaaggattttatgaaggtaaaccatacaagtctagcttttatgttttttaagcttaaatttggttttatcatgcaaattctgagaagtagtggctgtttaggttaggcttttttctagtgtgatttctggttgaatatattttaccaggatnnnnnnnnnnnnacaagtatgtttattaacatgctaaatatggatttctaaaacaatagaattaaacacatataaatttgaagtaaccttacattgattgcagcggaatatatgtctcctcccactcagatctctaaccctgagtattatcaagatctgagtctgattctccttcaggtgttggattcnnnnnnnnnnnnnnnnnnatgattgagtactagacttgctatggatgggcatgcaatcattcaccataggcttaaaatttaatgaagaacaaggaaggagatttcaaaaataaaaaagggaagaaggaggtctcaagaactctagttatctgacagaatgtaaacaaggttatatgagttattggataatgagaccatcctatactttttatactatttcacctaaggttaggatttaaattatacagaataaaaaaagataaaataatagcaaaaataagcttaagtgaccgaccatatagatgagccccactagttataagtttgccatatttcaaccatttatcttttacttcacaaatgtcatattttccaattttaatcctataaatgccanaactatttatttaataattataatta

SEQ ID NO: 113688 - DNA, 1735 bp, Cannabis sativa
aaaatataaaataaaaataaacttattaaatagtaaagagacctctttagttgtttcagaaaaaaaaaaaaagagagacctttttagttaacatttttcttcattaaaaaaataaagaaaaaaaaaaccgttttcctaatatttaggtaattaaaatttgaaattatacaaagttataatctgaacattaatggattttttatacgtttgatataatttaaagtaaaaaaaaaaaatagtacacttattttcctcatgtttcttttatcaatatattatgttaatgttgaacccccaaaaatacaccatttacttgaaatagcaccattattattacttttaatcaataccattgttgactcttacgataatgttggataatgatgattaatatcatatccttctttactttatatatacatacatatatttatatatatagtggaatttggagactaagtccaatcctagtttaattctgattacaaacttaataagaggaatttggggactaactagattcaatatacaatatcattaaatactttacttcatttctaattaggcatgatgaccgttatgccatcttcatttttgctcgaaataatgtgtaattaattatattgattttgcatacaaaatatttctacgagtaatcctcctcaaattatatttgttttggcaatttgaatttctttttcttaagaattaatgttaaaaatcctttgagagacttttaacaaaaagaactaataatacaatgtggtccttatacattatttggtatatattggcaaattaatccacactgtcttcttaattttaatgtatattaaacatttatattaaaaatagaattagaattatcataataaattaaaatttatcaacaacaaaaaataatagtaatgaaaagtgatggtccttctcttattatgagacatgaccttattatgttggtatgccaaagccaaagagtcgttgttctcttagttgtgccacctaactagagaaatgatttcctcttattacatgcagagtgctaattaattacaacctcgtattataatttcttaatcaacttcatgttcgaaatcacatgctgaaactcctcttacgtacatagcaggagaatgagctatttccctgatttggggtgtcaatctataattagagctcaccctaatcactatagacttcaaattgtaactcgagacatattacttgctaattttaacaaagaaaagaaaaataggcttttatgtacgtataaactgaattattctttttctcttcttgacaacttgttaactttcattaattggcaatacaaagtgaaggaattacaaggaacatatgaaatataaagatttggactgaagaataatgagttttaatacaacagaatacatcaccaatctagctagtattattctaacaattaccattaagcttatctactatagatttacaatttgtttcaattaggcttgtacagaaatctttgtaaaccgcttaaactgaataacccgtccaaatctcaccgagaaaactgataaaaaatacaaactgaaaaaatcaactaaattataaatcacccaatctattaattggacgggttaaaaataactccaacctgcccatgtaatatcccgaaaaatatattgatattttaattagacatattttattaaatatgtgattaagtgggtattagagtaggtttataatccta

SEQ ID NO: 113689 - DNA, 1540 bp, Cannabis sativa
ctaatccatattctaagtatgcaatcattacaaactgtcaccctttcaacacttggtaatcaaaacatgctttaagtggttcaccattttcctttagcaattaaaatcaaaccaccccaaggaaaaatattcagtccagtaaaccaccaattaacataatctacaaaaaaatcctcagtactcttaaattcatctagtaaaacctttactgttaactttatttccagtatcgagcccacctcaggaccaatcttccaccaagtagtaatcctaaattattatgaaaacacttctataatttcacaaatcatttatccaatatcgggttctattcatatcttctttgtaatatacatactgattgactaatccataagtccttctttgtagcaagttcctcacattaaacgctaataatgctgaatctcagaatccatgcacctttccataactcaattggagtttcaccgtccaatacatacatatctattttcttcttacagttaatggtagcattatccttatcttgccaatttattctcaacattacacccaattatataacttattgcataataagacaatttaaactttgtttaccttataaggtagctattaatctctgttaattaagtaaccagttgtctcctattatttaataagacagccatatttatcctacaacgagtaatgactatatcatttatatgatcataacataacatccatatttttcataaggagatcaatctcacctgatggagacatccaatcatctaagaggtattaacataccatacccatgacttgtaaattggtcaactattccaccatagcataggttaaaactcaactttcctcaaataatgttctcatgtcgtccggacatcctgaataatattatcattttcactcttttctagacagtagtcttaaccagtttacaaattttcactagagctcacagctagtggtcattcaaattttcctctttcaattattaggattaaaaccctgaccctaattgatcctgattagtagctttcgggtctcctctgatattactttccttataattaagcctatgttccttatacacaggagtgtcaacccaactacttgagcataaaactatacacctctgaatgattaattatcataatcatgtctcaaacttcattctcttccaagcctcaattaaaccttgccttccttcaggctttcgtaatcactccatcgaagacagccaaatccaaactactagctcattggcaagcccactttctaacatgttaccctgatcagtttttcaagctcatctactttcactgcatgagtatattgttacaacacttctcatacacatcaaccaaggtgtgttcaaggtcatgatgtccaagttatgattttgaaacttaaactactcctaccataagtatatacattttccacaacatggagatattttagttcattcactcattaccctcgacccagataaagctcaatatgagaattgaataaccgtgtttttgcaaat

SEQ ID NO: 113690 - DNA, 1711 bp, Cannabis sativa
aaaagatgaggcttatattgcaaagggaaggcatccaaaaagaggctagacaaggaacagtctcatttaagatctaaattaagaggcaaagacttaagacaatgctaccaaggtggagagattagtcacatcaaagaggttctccaatcagttgaagactcaacaaggattcagattaaatcaagatgataaaagctaccataagcatcagtttcagcaagatactcaacacaacaccaatattcaaagatataagaccaaggaaatcaaagaagtgatacagttgttgctaagaacacatcagatgaggaattgtttttaagtttagaaaattaggatttaaagaatggatcttgaattcaggatgcacctttcaaatgtgtcctaacatagtctttctttaataataaagaaattaacaatggtagagtgctaatgggaagtgatgtttcatgcaaggtagttggcattgggaaggtggcaatcagacaaatcaataaagagatcaagatatttaataatgtaagtcccaatttttaattgaagtgaagtttgatctcagttggaacccttgaagatgagggcttggatacaaatcattaaatggatgtctcaagatcagtaaaggatcatcactaattatggaaggaagaagaatacatgatatatatatgtacttaagggagagagagtcctactgcagaagcaaatgtagtgaaaggagaagaatgatatgcaactttgacaccaaaaacttggacacattaagtgctcaaagaattagagaattgcctaagagtagtgtcattaagaagccgcagacttgtgccttgcctttctgtgagacttgtgtcagtagaaagcaacataagataaagttcataacaaccacacaacacaaagacagttttggaatatgtgcatgctgatacttgagggccaagcaaaattccaactcatttaggtaaattctatttcctagatggaaaatcaaaccagcgtgaaacttaaagacacttgagacaaataatggacttgaattcacaaacacacaatttgatagaatgtgtaatgagtatgagatagctagatgcataacagtagtgagaactccataacaaaatgtagttgttgaatgcatgaatagaactcttttggacatagtgagatgtttgcttcttagttaaggttgggaaagccttactgggccgggtgaggcatgatctactgcctgttaccttattaacaagaatcctaacagggccatagaccttaaataacctaacttgaaactcttgagagtgtttgattgtacagcttaatcaaatgacacacaaggcttatgcaccagcaaattccaaaattgtaattatgtttgtttcaaagagaagcaatcgtcaatcaagtatattattaaggcaacaaaagccaatttcaacatttaagaaggtaaccagcaacaaacattaacttagtaattatattttgtactattgagaaaccttagatggcagacgataaaatatcacatttaatactttaaggcaacggaagtaaacaatccgagataatagtctatcaagttaacttttagagaaatttacagtggctttttttttcaatattaaacatttatgcttgccctatcttttttttacttttttactttggggttttttctttaatactatttacaaagtttgatatttac

SEQ ID NO: 113691 - DNA, 13090 bp, Cannabis sativa
  modified_base (9361)..(9364): a, c, t, g, unknown or other
tcttgcaaattctcatcaaaagggctcggttgcaaagcattttaacactcttgcaactgggattttgcacgattcgcagaagcaggcaaatcggcaaagtgtgtggcatttagttgtcgaaaaacatcattcaaagtcttcagtttagcaacaatctggaacattttcgaaccatataccacctttttccatttttcagcaaccatattcgcatacaatggatgattagaccacattctacacgaaatggtttttttccccgtaaaatggcctcctgtactgtgactacagcaggagagtgatcaaagatgccctcagattggaagcagacttctgcagcagtaaatgcaaccaaccattcagggttagcaagcaccctatcaatcttagaatagatcctatctgctaaggcctacatatttcacatcttcaagtttgcattcctcaacacactctcgaaatgctagaaacttttaaactgtaccctgctgccaactctttcctctttttctaatatgtcattgaaatctccaaggaccattcatgcttcatcaccattaacctctttaagatccctccatagctccttccttccatcctcatcattaaaaccatagacaaaagtcacaaaaaacttggttcttttatctaaagtttcaactaaaagatgaatcatttgactagtacactttagtatagtgacaatgaatgaattaagattccaacaaacaataatccttccccctttgtgccaagcaatattagtattaaaacaccaaccattaaacattctcaagtacaaggctacaagattccgagccttaactcttgtctcgaggagaccaacacgcccaactttttgattactaatcaattgcttgactaggttttatttttgttgggagttaattcctcggatattccaactcatcattctatccatgagttagagagggatctcccccctctcctgtatcatcaatcttaacttgtttccccttctcctcaatcaacttcttcctagtttcatcttccagaccgccctctttttcttcgaaaagttggaaagaattgcttgtagtttctgccctacttgtattctcagctctcactttgtaacctttagtgacttgcttaaagccatccgcatctacaacttctttttgcttcccctcttttacagtattcttgaccatccattgttgtttctgccgagggtccttcttcctagaagcatctgtaacacgtcccattccatggcaattagcacaaataatcggtttccattcataagaaatggacactattgtggtacatccattctcatcctcaaattcaatgagttcgagtagctcttgttcaatggcaacttctatgaggacccttgcaaagcataacttttctctatttttagtggcatcgtctaccatcaccggcttgccaacctgctcgatgatcttgaaaagagatctttccccccaatatttcaaatgtaaatcatcgagatgaacccaaattggaaccatcctaatgtcctcttttttaacattgattgagggttcccaagccttcatcacaactggcctgcaattaaagaaaatgtaacccccttacaacactaggtctcaatccatttcagagtgaaatatgattatatagacccgatatgatagcagcccaactctttctatcttttcagcccacattctcctcacaaaacactcaagaacagctaagggtgggtttgcaccaagcacatagcatacaattgagggtttccaaaattgaacctcatcatgaatatcatcactagtgatcttaaccgtgtttttcacatctttagtaaagagactacgcaaaactgatccagatctcagaacaaggggattcgaactcataccttgagaaatcttggtcgaacattgctcgttagctgccaagaaatacccaaaatcctttatgataccctcctattgcagaatcgccttgagagacgatttttgtgatagaggctctggttctagcagttttggattcacttcatcgtccaccagctcctcctcttcagcttccgaaaagtccatcggagcaactccaagaatcgcgtctatagatttttttttctgcacatccgactccgagttcggccccttccttttcacagtttgagttgatacaaccttctctcaccctcgtccccttgatttttccatggctccagctctatcactgcaagagtcgagagagagaaaagtctaattggttccttacttacttctaccttcgtaggagaataagccaatgcaattgtattagagccatatccctaccgatcttttaatctacatctatcaagattttaaagccaatcacacaagatccagatggcacaaagaaacttgagattcaaaaaaaaaaaaataaacgagtaaatggcactaccggcagcacgacatataagatccaaacagaaataggatagaaatggcacaacttgttataaggtaattcagtattggtgagcaaaaaataggcaccgtcttgaggggaaatattagaaaaccttatcccacataggttaaatgtaaaattactaagccatatataagatcatgggcaactctcctcctcaccaattggttttgagatggagccccatgattcttgatatggtattagaattaattcttacctcaagatcttcaatggtgactacttgagctactggtatgaagcctcatggaatgtctacaacttcttgcaaaactaattttctccctaaaccagatgctctttatggccttgattagaaagtggttcacctacaggtattttcttctcttgtggttccacaaaccatctacttctttctttggcttttatttcaccaagaagatttgttaaaagcttccatggctactgttagcaccaaaaaaattaagatttacattactacacatgaattgactccataacgaaaattgataaaatcacaaatgcccagaccatcgcctaaagtgcagctgcctagaatcattatgtttgaagtgctcccgtcaatgacgtccataaacaatggtgaagttgctaaaattcatctattctgactggatttttataattaacatatccaggaagacaatctttatcattccttgagtattgaagatcatcccaacataatttaaaaatccaagaacaccatttcagattgacatttttttcaagaagcttcgtcatagactcaaaggcaacaccacatttcttccgcgtagactctctcattcttgcctcacttatccattttatcgaccactgaagataactatgaatcatgctcaagctgtgcaacaatctgtcatgcctaaagagcaacccaagtctacacttcaagaaaaaaatacttttatcggtgagttttctcaccgacaaaagtatatgtatctcgctgacatagttttgccaatgacattttatgcaaacaaaggatgttggcaatggtttgttggcattatgagttttgctgaaaaatcaacgtaactcgttggtaaaagtatttataccactgaatttagttgttggcataagttcatcactggcaatttgttgtcgactgaggggtccatgatgatgttttgtcggcgagatatggcaccggcaaaaagtttgcgcctaatttacatttaaacgtgaaaattttgatggcgtattaatgcgctggtaaaacttgggcaattaaaaattagtttagtttttctggcgccttatagttcgctgagaaaattatttttttaaaatatttatatttataattaaattaaaattaaaattaagataataataaataaatataatccaaaatatattataaaattagaatttttattataattgcaaaactatataaattgtccaaaacaaaataaaagtatttttagtttacaaatattaatattatttacactacaaagtccacagcatcgtcgtcatcgtcatcatcatcactgggatgggcagtctatgaagatgacccaacttcaggaggctaaaatggtagaatcagtggaatctgaggcatctggagcttattaaatccttgaacggtaccgaccaatggcatcatttgttgctgaaatatggtcataatttgattctgagtcttcatcatttgttgttgccactcgttccattcttcctgctctttcacccttcgctttagggcctcatattcctcctgggtgactatgggtttccctaaggcacttgccctagaagtttacctctttgcccacgtcctaagtcttggcaactagcccatccctctcaagtggcgtgactactcacccagcacctgtggcataacaggcaagtctgtaggaaattcggtggaatcgagattgtactgttgtgggacattggttggcactggttgagtatcacaaatctcaaccaactttttcctacaaaaaatttgaataaaccgttagatttgaatagaaatgaaaatatagaatgagtttattaaagatataaaatcacttacatacagttattgtgtgtgtacatcgcgccatttgttatccttgcagtggaactatgcaaaagtgtccacagcacgggaaagttctcccgtctggggatcaacatatctttatataatataaaaaattagaaaaatattcttttgaaaaatatgaattttttgacaaattaatatgttgaaaacatcataccccgctcacaatgtggccaactatggtcttagatcctcatccaccttgaatcttcatctgtccttggttttttgcattttgttcggctcttgcctataatttaaagtaaatttattgttagcgaaatgagcgaaaatcataagctaatggatattcaattttgcaactttcattttatacctgctattttgggaatttccagtatgtgataacctctgcccacacctccagtgtcaccatatctagacgtgatatcctagtcccttccacctctccatatttctgaatattcttattctatgcctttttcatatccgctctccagtcatatagcccctttgacattgattcaacaacgtaattctcaaacataggattgttagttgggaactcaaacatggtctaaaaaaaaaataaacattaaagttatatatatttatttttttgtataatagttttgatctatcgtaataaaaatttgaatgttacagctattctatcccagatagtctgaatgatcgtatcctcaacgtcttcgaactcaaacttgttcaaaggaatggtattgcgaacaagaaacttgatataattgttaaacttttgccatagtggtctattgggcctccaatccccatatgaaatctaaatttcaagttctgacccgtaggctgcttagccaattcttgttcaatatttttccccttgtactctctcctaacttcctttttcttactattgcttccacctgcatcagccattctacacattcaagccacgaataattaataaatgaacctattaacaaaacaaacatgtatttgatttaattaatattacaatactttaaattctacaattcataatcatcatcatcgttaacagttacattattttcattgttagtataaatagtgtcttcatcatcactataaataatgaaaccatctaaatcttgacggttgggctgctcaaggtccctgttggtcactttaattggaccgacatcgtccagttgtgacagttgaacaattaattggattcatgaagattttctttcttgtttagtcatggtctcatgatcattttcatttgagaaattctagatattgcggcggggtgtaaacattgacaagcttccaatcgacactattcttcaagtcgcgaatgcaatataagaaattagcttgggatgcaagtatgaatggtttattttggtactattcacgggcgacacagacactagtgaaaaaactattactttttgttctattatcgtttgtgtccaccacttgcacctaaaaataataacactacaattcttcaagtaagtgaacttgtatacttgtttatgtacgccagaaaatttcttaccaccttctctaggcaccaaaatacaactattttgggtgttacgattgtcatctctattctaaactaggattttaactctgttaacaatacatctaggataacaatagcatgctagattagagggatttctgatggcgtacaactcatttgatacatccacagggttatctgctaggagttgattgatctatcattgagtgaaaaatgtaaatagaaaaagaaactgtatttgaatgacaaaattagtagaaatcaatattcactcgagacttgaaccaactaggaaactcgttctcttgaattgtgtcgagattttgatcactcctaagttgtacctcattcctatgctcactacacataaatcgatttttgtaaaagaatgtcatcagtgaagagaactaaattaagaatacaaaaagtatcttagtgatatacttctccacttcattacaatttctcagaatgtaccactctgccttaagattttcttgcattgataaagatatgatggtccttgtaacaccctcacaattaggcacgttacctaaggtgattaagaaaccctaatcccttaaacaagattattagaaagataaatacgggtaatttaaactttagtcgaaaacagattgaaaatagaacttgtaataaagttaactttacaatcaaaattacatgtttcgggatcccaaaagtattttacaaaatattacaagccttttcactagcaaaactaagcggcaaaatcagtttcaaaagtaaatcactagtagaccccacctgcttggtctagcgtggcctaaacatgtacatacatcgcttagctctcgcactcatggttgataagagataaatttacatgttacactcacacgtctatttacaataaggccttagcaaagtttatctcgattatagttaccaagtctaattcggttatgccttgctcgcataaccctatgtaaatatatatatatgtaatccatacactatgttcttttcggtggtttgtgatatatacgagttctaacccagttatgtcttatacacataactcttaacataaatgcatgtccacaatttatactataacatatagaatcttagggtaataaccctaacttgcatactaagtagtcactcatataacatattacagtatgctaaaagtaacagctattgagggtaataaccctaactcaagtcttcactcgattaacaatattaccatatatcatcactttcttaccttcataatattctaggataataaccctagaccgcatttaattaaactcaagatacttgtgtaccgggtccagcttatttacgcacaatgcataaactcaatatacatacatatatcatggcatatcaatacttattaacaattcactagggtaataatcctaggccaataaatagctcccttaagggtaataaccctaagccaataacttgctcactttagggtaataaccctaatcccaatttttaattgctcacatatatcacatccattataagtgccactgcacataactctacgtgctaactactatcttacctgatgtctcgtaaatatggagattccaaatccccgggtgctcctgaccaagtgccggtaatcttagtcacaatcccgagatacataagtatagagttaatctctaaatccatttccacaaattataaaattagcatttaaattacatatatttacatagagctcagaacgagttttccaacgatataaagaatgtcccaaacagagtcctgagtcaaaagttatggccaaaataaaaacccgaaaaaaaaatacaatacactgccacaaaatagccgcggctactgggtttaaaaacctaggaaacccagtttccatccacgaaaaagcatccaaaaataccaattttcatgtttaaccagcccataattataataaactttcacctagcataaattaaataaatagagaagaattacacctaattcactctccaacaacaccaaaatatgcatcaagatcatcaatttcagcaagcttaaactagaacaaaaatcccaattcaagagcttgctcaaccataaaaaatcagcatcttaatttacacaaatttactctcaatataactcaaacacatgtcttaaaatcactaagaacaattccttaacattgcaacacatacttgccaagaacaataagattcccccctaatttcatctcacatgcaaagatgaacaaattcacatgtagaacatatatctcaatcattttacagcagctgaatattcaaaataaataatttaaaatggctatctttacacaagcacaaagattacaaaaccaagctttgaaccaagcaacaactcacacattcaacaaagaaagagatagttaaaaagagaaaagggggttcggctaagagaggaggaaacccagaaaattcagcaacaaattcaacaataaaggggattaagaactacctcaaactcaaagccaagttaagcacaacactcaccaagaatctaagctttcaagataatttttcaacacctagcaaattgaaaatatggagaaagagagggagagagggttcggctgctagggctgaaacaatgcagaaaataaagtcctcttttttttaaaatttcccttttaatgaattgtaaacgaaatgcacaattaccacattgcccttagggtcaaattcccattttcaagcatataagggaaaaatataattctcacattctgtacataaataataaatttccgatttctcatgttaaaataaaatgcaatcaagtatcccaaaatcgtatttcagccctgaaacccagttcgccccgaaatacccagttatgactataccgtaccaacttgtcagaacacatctgaaaaagaacaaaataggcatactatataataatatagtgcataaacacgtaattaaattaaattgataattttacccttctcaggtcaaaattactaaaatgcgcctggctgaccaatggggtcttaacatgtcataaatcataatgatttacatataagggaaatttacggcaaaagtcttcaaaaatttcagtttggcacaaataagtccccaacctcgaaaaatagcggtaatagtcctcaagtcatgctttttatttgtccgttagtcctaattttaactgagccatttaatttttagaaattgtcatatgtcgaaatattattggtctaaattattattttaattttaaannnnaaataaataaataaattagataaaaatatttttttttcttttcttttttttccttttttttttcttttcttcttcgtcttcttcgtcgtcttctacttatcccaaatctctacagaaccaaatcaccatccaagtggaacctcccagccgtcggagagcaggcgtgtgccagtgtccccaaaatcccatcgaatggctcatcgtcaccatgatcgtcgacaaagaatacaatcttaaggtcggcggccaagaacgcctggatctcagtgaaggtcaacgacgtgacctatgaccactgtccaaacgaaggagtagtgtccgacagtgtggaaatatgtagagttagaagccgatgaagacgagggtctcctggagttgttggtggttgtgccattgacgatatcggcatttccgcagcgaggcagaatgaggtgttggatggtgatttggtcgagctggccggtgacattgagattgaaattcttctgctaagtctttatggctgattcaagctcatcatcaaagttgtatgtgaaattgaaaggagatttgggaatgaagaagaagacaacgaagaagacgaagaagaaaaggaaaaaaagaaagaaaaagaaaaaaaaaagaaaaaaattatttttatctaatttatttatttatttttttttaaaaattaaaataataatttggaccaataatattttgacacgtggtaatttttaaaaattaaacagctcagttaaaattaggactaacggacaaataaaaagcttgaccttgaggactattaccgctatttttcgaggttggggacttatctgtatcaaactttactttttgaggacttttgccgcaaatttccctacatataataaattatataataatataattccataattatacacagttaactagtagggtttgctaatccattcttttaatcttaggatattacagtcctcttaccaatgggtctcccaacatgcttgaatacatagaattccctttcacgcttatttgggaggacatcagtatttcaatctggtcggttaaattgagttttaacttcctacaagtagatggaataaaagcttaatgcctcgttaattgcacaagcttcacaaatagatccctccggttgagatcaatttttacctattgtttgtacatagacatggctcgttcaattggatacatcaacctgaagtgcattggtaccccaagtatcgcttctttaggtaaatgcatcaccaagtgaaccattatgtcaaaaaatacgagtgggaaaatggtttctaatttgcaaagaatgtcaaaaataatttttttcctactctacaagtcttcaacattcaatgtctttgagcacaatttttggaaaaatacatacagttcaattattgtatcccgttcttatttctttaaaaaatttccaatgctctccgacatcaagcgtagtaacaacacatggcaattgtgagacttcaagccagaattgttgtcttcagtctcattcacattcttctctaaatttgaagcaaatcttcctagcaactgcatagacttaatatatttgcaaaattcacgccattcaggaagactaagcgtgtaactagcaggcagtttcctccaaatcccattgcagtcttcaactaaacacaactcacgacgtattttgaggtcttccaaatccaatcttgctttccttggacgtcccctcaatacttaaaatagttccaagtatactatcgcaaacatttttgtcaatatgcatcacatcaagattatttctgagagacaggtctttccaatactctagttcaaagaatatacttttctttaaccagtttagctcagctacagaacgtttatgcttgactctacaaaagtgcttgtgttttctaggaaaacgatattgtatctggtccagctgagctaaaacataaacccctaacaattttggaggaggtagtattttttcaatttttcatcttatttattacttctctaccttgggtcgtctatttcaagaaaatgtctgcccccaagataaccaatcttaatgcacaatccaatagaaggtggtgtgttcgttacaagtgaggcatgccttgtaccctttggtgctccaaccagacattaaagcgtacgatgtgtaaagaccacttagtattaatttggaaattagcagactattagggtttaattatgaaatttgcatattagttttgaattattaatttatgatgatttatttgaattaagaatgcattttataagtcataaatttttgtgcccgacaacattggaatgtggtgtttggctattagaatcacatcttagtatctttagtgtagtaggaaatatagttagacattaggaatgttaggaatactcgagattttagaattgttaaaaatacccctaagtgaccttttatgacttttagtgtgagaagggcaaaatggtttttttgcctatttttgttttgtctttatgtggatttgaatttaattaataatcttattttataaagtttaattaaatgaaattactttttaataaaatacatttcatttattcattttacaaagaaaatcaatttgacaaaacacatactctctctctctcaaaactctctcttgttcgaaccctatagaactagctagggttctggaattctttctctttttaaatcaaattacagcaagttttaagtgatctcaagctctacgtaatgtcccaacactttgccttttagttttttgaaattcaagttagtgaatttgcatgattttgggtttttgagttctgtagtagatgttgttgtttgatattgttttctggagtttaattatgatatattatattgatttgagctagttttgatggctgttagtagggttaagcaagttttgagtgttagaactcaaaattggtgctttaatggtgtcttttaattctaagcttgggtagttgttttgttgcttggaatatgtctattgggatataacatccaggtcttgaaggtttggtaaggtttggaatcgatttggttgagttttgtaatagtttgggttttctggagtaaaccggttaactggttttacaggacctgtaaaactagttacctggatttgctgctgggttcctcaaaaaattcgtgttgtcgatttgtgctagtttcagagctttggttggtgaattccctatagtttaggattttgccatgttaagtttcagtagataggattttggtataaaacctaagtccccggttaagatttagcgtgtcacttatccatgttgttatcgatgtgatttaacagttgttccactcaggttggccggcacacctaaatttgaaatcaaggtaagattagtataatgtcattcatatgttattacatatttagcatacatgttggttatgccttttagaatacattgaaagtggtaatagtatacttagaattgtactgattactgataaatgtatattggctgaaatactgatcgatgttgtcaaatcaatatggatagagtatgactggcatattgagtataggctgacattatggtcgattgtattgttgtatgaacgttctagactcagtaccttgtgggacacggggttatggttatgatcgggtgtgtggatgcctggttataacctgggatattattatgttttatgttatgcttttcttactgagtctgtcgact

SEQ ID NO: 113692 - DNA, 1827 bp, Cannabis sativa
aaggaatgtctactatttaattaattattttaagaaaataattaattataattaattaaatctaaaaaagaaaagtctccctattagtaacctgctattacaggttaaaaaaaaatgtaaccatatggttacaataaaaatgtgaccattgaatagtcacccatatatatatatatcaaacaatgatgtatttttaatgaatattacttatgaataagtaatagtagaaaatattaagtttttatgcttaatctttctatttaattagaaaattctcttatttttatattatatggactctgattgtttctcttatttttatattatatggactcagattgttctatcgactgaaaaataattaaaaaaataataatttcggcataaataataaaaaaaaagttgagtttaacttaaatatttttcatataagcatatttttaatatagtgtaaaaaaaaattctaatattttctttaattaagtagctaaattaaatataaaaattcaaatttctcttttattttatgttatcgtattaaaatttaatggttaaatttgtttggtatccatcctcattgaaaagtattccatgaatatcaaaatattattatacggaagcaaaattttatgtgtataaatttatatacatgtgatatttcctataatatatcttataaagtaactttatatataagtattcttcttaaccataagtaactttgcgaacaaggactctttgacacttgatttgttctctttattttatgagagccttttatgttcttcggggtttaaacgaaacccttatcggtttgcaataaaataatatcaattttgaaataccgcttttataattatccaaattaattaattaaatatgatactcttattgagatgtttaaacaaacataaaggctatttgagaagaacagaactatgtttaaacagataactaacatagagtaaaaattaacataaagtaaaaaacacacaagattatatgtggtataaacaatccttttgaattcctactaatccataagaccatacctaaagaataagatttatactactaatgtcaaagtgattacaaaatcgaattactttataaataaagataccttctttgaaattaccgcaactaccgtaatttatactcctaataaattttttgaagttctgagattttgaactccattcaaattgttgcacttacactcttttctcccaaaaagtgtctcacaaatagtcttctcccgaagcttgatgaatgatatccaagtgtgttcaacctccacaacttcaacaagaaacaatacagagataaacagtaattgtaaagaccgtttaattttaatttgggaattagcagataaatagggttcaactttgaaacttggatactacttatgaattatcattttagagagatttatgtgaattcagaatgcattatatatgtcatatagaaaattttatatttttgtatgttttgtgcccggcaacatcggaacgatgcgtttggctattagaacattttagtatttttagtatagcggggcaatatagataaacattgggaatgtcaggttttacccaagggttggaaataaccattttacccctagaccattttgttaattaagcttgtggggaagggtatttttgtcattttaccttggcagtgctggctaatttttagagtggtagctggccacaaatggtttaattatgttaagtgtttatttgatttttagaaaattaaagaaattagaaagaaaaggaaaatttgagaaaaaccatctttctttctctctctctctct

SEQ ID NO: 113693 - DNA, 1971 bp, Cannabis sativa
ttgagtgggagcgctaacataagagattaaaccataaaaatacacacacatacaacaatagaatgataagaaagtaaaggagagatcacacccacttattatagaggttccccaaaaattgttgggtacttgctcttttgagctcgcctcagtaatggcatgatttcacttttgaatcttcaagatcagcaagttacaagctgggaatccaaatcacaggtgattgattggtgatcctctttttgtttacaagtatttctctgtgtgttttttagttctctcttttattgactctcttttgttttcttatgtatgttcttctcttggaatggacctccttctcttctcttcttcgatctgatctctattttcaagtcatctgagcttgtatatagctttaggtgagagagctaagagttagttgcaacaattttaacaaactttgcaactaattttggttctgctcagtagttggttaaggctgaaggccacttgcaagcttgtaattgcttttaagttgttgtaactattttgtgctgatctggacagtgtatgtgggagtttatttcaacaggttttagttttctagttatgttgagctgatgaaatgggttgtgtgtaaaattctaagtttgtatatttatttttatgttgaagattattgttctaatatacctttatcttttggtttattggtattgcgatatttttatttttaattttgctagctctgacaacaaatattaatgatgggaatgtgtttttcaatgtactaggggtgttgtttgaagacattataattttattgtctaaactttttagagtagttttgttttatgtagctcgtgttaagattttagcagcctatagttcgacaaaatatatttttcggttagacgatgagctattctggttcaagaataggatggtcctgtgctgattgtgaattttaacatcgtaaattcatgagtgattctaatcactatgtcaacaaaattgtaaggccaaccttaaattttagttggtcatcagaaagaaataaaaaaattagacctttatttagaaagaaatataacatttcaaaattaacaaaaaaatatgtatttttaaaagaatttttttttaaaactactaaactgatgaatcctaaacacatgtctagcccgcattgggccaggccagtattaaagattagaaggtgtgtaaatgtatttactttagtgaaaatgaactttaatcaaaaggttcttaattaacatctaattaatttattaagtgaggtctcatcaaaaaagaaaaaaaaagtgaggtctcatcaagtcaaatatatattattactaatttgggttcagttaagacttaatattcacttcaattattaaatgttaattgacaaaaatagtcttttacaataataatagaaaatgatgtgacataaagtgcttatttttaattaaaaaaattagctttcgctaataggttttttgtcatagtccaaatcttgaagtctatttagaattttttgactttttcatatgtattaaattatatttttttgattttttttattgttaataatttttttaaaattataaaaattgttagatttaataatttatgtttaatttcattcaattttactagttcgatgattactataaatttaattatgctccacacacttttatatctactaaatcatgctccgtaaattttttaattcatgttgggctttttttttgactaaaattaaatatattttttttaaaaaaaaaatcactattattataaattgaaagtcatttacacaataatagagaaaataaaattgaagatttcacccatccaacaaaagccttcatccaatgctaaaacatattttgctaaacattggcagagccaaatggagtcatgtggggtactcaacttactatcaatttatatttcgtaaaacaaattttaattactttt

SEQ ID NO: 113694 - DNA, 3264 bp, Cannabis sativa
tgtataacaaccatgcaaacatatatttatatgcatgtgaaagcctagaaagtaaaaattcacttataataattaattataatgtaatacgtagactattaatagatataagtgcatggatatagtggtatatatatatatataattaattaattattaagtgaatataaaaaagtaaaaagtgggtaaaaagtgatcttactatccatattaggaaagggtgtttggtccagaaacttaaatgtcttcttccaaaagaagtgtccctcgcaaatctgaatctttctggatctgtaaaaatatatataacaacacagttgtataattaatctaataattaatgtcaacgctcctttacttaattctaactcccatgaaaaatactagagcgtatcagtagtgtttaatacttatttacgtgttaatattgctattggtacaattaagtatcagattctatataatttaatataataatttttataaagtattgctactatttgcaagatgacacatttagaaaatgttaaacactactgatatctaataacgatgctcatataatatatatagtaagtatataatttaatgctgagaagtaaatatcactcagaaacgatatgacatattttatgggtattaaacattatgaatattctttagtattaatctataatcttaactcattttgactaacaatctaattaattaattacaccacctatagaaaaattagaattaaggtaaaagtataataataataataataatagttaccatgtgagaattgatattcggctgttttagtctccttttcccaatgcttccaacttcccatctgggaatcaatttatatatatattaattagggaattaattaattaataaagtcatatctcaaaagagattaattaattcaaacttattaattaaaaatgtaaatcatataaattagtgcaactaattaagtaattaattaccttaagtctgcccaaaaacatagtcatgatgcagtagagaacatggaaaacagccaacacaaagataaaaatatgcaattgatgaataccatccgccgaaacaaatggaactttgccctgaaatcataattatatattcatatataaaactcaacatatataatacaaataataattaaaaccacatgtatataattttagaacacttaataattaagatcgaatttttgtactctgaaaaacacttcattaataataatatatatgtgttaaatggttagatagccaaaataaaaagtatataagaatattaataatatgacattaattttgtcatattatatatatataaatcctcatagaaatctattgttttgttctttcacgcggaaaatccttgcctttgtcatggactaattaattatataattatattttattaattttagatattttaatattaatcattaataatattagttggggtatatttgacaaatggtttaactcgaaagagacaatacgcctaatactatacacataaaatattaccttaattatgaattataaacattttttacaaattcgatataaattaaaatcataattaaagtggtaagagtgagaatgtcaaactaattaaatattaagaattaaagagtttgtgtttttaggtgaagttttttttttgttcaattaatggtaatattaattggatatatgcgcttaggaatttttttaaaaaataatattagattttttatttaagaaaagaataaaatttaaataagtttttaaactgtttttcaagcaaaaatactttgtggggcctttttatgagataatgttaaaagagaattcttaaaacaaaaataaattggggccaaacaaggtcggcctgtaaataaaaatgtgtgtgagaatattttttaatataatttaaaaaaaattctagaaaatgcttccactaaggggtatatacataaatatatataaaaataataaatacaattaaatattttaaaaaataaaatctaataaattaaattaaatatttaatttaattttactttcataattttttttaataaaatttcttgaaattttaatttattttttttataatatttaaaatataatttacatttattttataaatatttttttaaaaaatatatatttataactaaatatataagactttttctcaaaaaaacaaaaaaaaactaaatatataaatttaaaggttggtttataattaaaaaaaatacaaataaaactcctataatattatatgtttggacgaatatgtccaaataaaaggataagaaagacagagaaaagaagaaaagaagattttttattattaattatttaccttttcagcacacttatcagtcccggccgccgccaaaattcgccggacactagcagcaccgtcgccggactctaaaaaggccagcaatctccgactgttactttcctgttcgacatcagactcttcagcccctttattcaatttctcttcttgttctttattacaaggatgccatgtccccccaattttctcagatatacaaatatttgagatcggactttgtcccaccgttagtaacaacgatatgaaccccaataacataagctctataaaaaaaaaattataagatatttttcaaattttaaatttaaaaaaaaaaaaacaaaaatgggtattcattaattgggtctttagtctttacctgatttgatcttttccaacgattcataaagagctcgtttatgtttcttcttaaaccactacaaaaaaaaaaaaaaaaaaatacccattaatttaaataattaaatgtttaattttaaattaaaaacaatttcaaagtgagattaatatatatataattgggtattaccttgccaatgagatggattatgtgctcaataataatggaaacaaataccaaaacaagacaaactacggccacagcccatgttggtgtttgttctaaagatcttcctccgctagccaccgccatcttcttttaatttaatttaattttctctctaagaaaatatatatatagtgatcataaatataaataggccacttgggaataattgattatatatatatttatgagttattgtaataagttagaatgaaaagtttgatgggtgtaaattctgttttgaaattgggatggagatgtggttgaaaaaatttgagactgattgtgaatagtgatatatagagagagagagagacaagagagacagagagtggatatta

SEQ ID NO: 113695 - DNA, 3126 bp, Cannabis sativa
attgatgaagaagttaatagaaacctaacatcaatttctttatttgaagaaataaaagaagtagtgtttaatattcatcccctgaagtcgccggggccggatggcttaccaggctgcttctttaggaaatattgggattcggtgggcaggaaggtgtgtttggccattcaagaggctttcaggataggagaaatacatcctaggctcaactatacattcatctgtcttattctgaaggtggagaattcgaggagaatggacgaattttgccctattagcctctgcaattttccttacaaggtcataacaaaaattctttcgaatagattaaggccttacatggagagactcatctccccctttcaatctgctttcatccctgggcgatggataaccgagtcatcgattttaacacaagaattggtgcacaagatcaggaaaaaatcaggaatgggggggttaattgccattaagttggacatgttaaaggcatctgacataatggaatggacttttatcctcaaagtcctaaaggcaaatggcctcgacgataagagctgcggtataatcatgtcgtgtgttacaggagtaacttattcgattctattgaatggttccccattgaagaaaatcaagccttaaagggggttgacacaaggagaccctatttccccctttatctttctcctctgccaagaagtgctttcaaagcttatccaatgtcgtgaaagagagggagtgattcatggcattcaaattgcaagaaatgcaattccaatctctcacttaatgtttgcaaacaacactatattattcactcgagcaaatagagtggaggctaagaagataatggattacattaagaggtatgaagaatggtccggacaagagtgtagcaaatcaaagtccagtgtgttattctcaaacaatttatcagcacatagaaggaaagaaattctggagttgatatatatcaaacagtcacatggagatgaaaaatacctaggtaatcattcgtgtttaagcggaggaaaaaggaaaattacatgatattgaagaacagaatgttacaaaaattaaaaggttagaggatgaggctgctctcctatgcaggaagattgacgctaatcaagaatgtagcaactgcaatgccggtatatatgatgtccacaaacaaaattccaatttcaacttgcagagaactggatgcagtaattcggaagtattggtggcaaggaaacttggataaagatcgattcatggctctgagatcttgggacaagatttgtcaacctaaaggatcgggagggctagggataagaagatttgaagattttaatagagctttaattacaaagcttgcctggagtgtgggccaggggtaggcgaagccttgggttagctgcctcctcagtaagtactgcagataagaaaatttttggaaagttgagaagaaaaatactgattcacatctgtggaaaagttttcttgatgtgcgtaatatactagtcaaaggatcaatgtgtgaagaaatagacatgtggaaccaaccatggattccttggttggattttaaagactttaatagtttgatgtaaagtatcaagtcgaagggctatactgctagaaccttagctgacttatcaatagggaatggttggaacaaggaggttgtgctccaaatatttggtgatttgggagaaaggattctggaaattcctaggcttcctctatctcacaaggataggataatttggaaggaaaaacaaaatggagttttctcagttaaaagtgcttatgtggtggatcaaggtgagaggtttgatcgagataaaaaaaaatctggaagtgggtgtggcattcagatcttcatccaagaataaccacattcctttggcgagtgtttaaagatgctttacctgtcagagagaaaatgaggtttctgatagacaaagatttccctttctgtaactctgcagtggataattgtctccattttgttcagagattgtgggttcgctaaaatgttgtggttctcgggaaggtttccattgatagtggataaaatccctgaagagagcatgatccacttcataaagaatatggttgcagtgtttgaaaactcaaatatcggtaggaaagaaattatcacctatctaggatgtgtctgggaacaggtatggagaactagaaatgaaatctgcaggagaggagcaggagttaacctcgaaatggtaaggaggaaaatttaattggcttttcatgactattccacctttaatggtagagatgaatccttggatggaatagaagttccattagaggatagaactgagaaagtagattggatgagaatattggatgggaagcgggttatctgtactgatgcatcctggttgaaagatgaagctgggctggcaacagtgatgcgaatgaaaaatgcagaatgttgggcatataagagtacgagaattaaggtgtattcagctctgcaggctcaattagaggccattttgttagctctgcagtgggctctgaaagaacagtgggaggaacattgtgtgctttcaaattattttcaagtaattcaggccctgagaaacaagcaatgcccttcaaactggaagacttttaatgtttcttttgctattttggatagtagtaagaagtttgtaagctgtgagttcttttatattagtcgtaatttaaatgtagctgcggatgggctagctaaaaatgctagagtgactagcaattttccgattttgattcaaagggagggaaatccccctgtacttcccatctttctttcagtttaattgaacttttgttcttaaaaaaaagtgaaatatatctctctttgtggatttggtaattttacataatcgagctaaatttctttgctttgtttatttgttattctgttgcgcttaaagttattatttttcccaacagtggccagctgttggttttatggtaccaaatcagatatgcaacgaaagaattatttctgatcattattgtaccatatgtccaagatcaccatatgtatatattaaacagaaagtaaatagattaaaagaatatttacttcgtgatgcatattggggcaacttttattctttt

SEQ ID NO: 113696 - DNA, 4068 bp, Cannabis sativa
  modified_base (28)..(34): a, c, t, g, unknown or other
aacttgccacgtgtacaagtgtgtacannnnnnnagtccaccgtggcacttaactgtaatttttggacggaggtgtgaagagcaaaatggaactagggtttcggtaatttagccgccaaaatttcagtttttgtgattaagtgtgacaaactgtaaagttcaggtggaataaaagatttgagtggaatgaggagtgcgaaatggcattcaaagaaataaaaaaaaatatctttctacaccaccagttttagccaaactaattattagagaaacattgttcctttatttgggtatctcagaaaataccataagtgcagtactggtgtgagaggaaggtaggaacaaacaacatatttactatgtgagtaaaaggttattaggggcagaatcaagatacccaccactccaaaaacttgcactctgcctggtacatgcatctcaaaaattgttgccttatttccaagcacaccccattaaagtccttacagatcaaccattgcgacaagtattatcaaaacccgatgcatcagggagagtgaataaatggtcgactgaatcatgataattcaaaataacctaccacctgaggacttcaattaaaggtcaagctttgactgactttttgataaaaggaattaactcaggagaaaactccataacataaaatgaaatagaagcaaggaaattgttcattgatggagcttcaaatgagaatggcttgggacaagagtaatagtggtgtcactaggaaacttaaagtttcattatgcacttcaaatttagtttaaaacttcaaataatgaggaaaaatatgaagctttgttagtaggattaagtatagctgaagaatgccaaatatttagagaaagtttggaaaaattaagaaaagtttgattattttaaaatagaacaaattccaagagaacagaactctaatgcagatgcattggcaaaactagcatcttaatttgacctcgataaattaaacttggttctagttgaggtactagatgagcaaatatatgtgaaaaggaaaatattgatatgatagatgcgagccctacatggaggacccctatcgtcacatatctattagatagagagctccccatagacaaaatgaggcacgagaactcttatactcaattcctcgataaaagatagtcaaaggaaaattgtataggagagggtattccatgcctctactgcgatgtgtgttaccgacagaagctaatgaaattatcagagaaattcataaaggcttttatagagatcatgcaggttggaaaagcctatctaaaaaaataatatgtcaaggttattattggccaactatcaataaagacacacacaaatttgttaagagatgtgacaagtgcaacggttcttgcatataccccgagtatcacccaccgagctaagaatgatgatctcgccatatccattctcaatatgggggatcgaattgattgggtttttacccacaggtcgaggtggcataaaattagttgttgtaacagaagcgaaacccttaatatccattacatgcaaaaaaaattcttgattttgtcatcaagaatattatttgtaggtttagaattctaatcaaaatagtatctaacaaatacactcaattcgatggagacttattcaccgagatttgtgaaaggaataaaattatcaaaagtttcatgttggtggcaagatcccaagcaaatggacaagtagaagctgttaataaaaccttgaaagatactataaaaaaagaagttagacgcagtcaaagataaatgggttgacgagctaccacaattgctctgggcccatagaatgacaaagaaaataacatcgggacacactctatttttattagcatttggctcggaagcaatattacccgtagaagtaaatattacgacctacaggcgtgagttctataatcaggaataaaacacaaaacttctaaatatgtccttggattttttttttaagaaaaacacatcgagtcacagataactgatgctgcatatcaacaccgcatctttagatactttaataaaagagttcaaaaaacttctttaaaataggagatttagtattaagacgtgtatttgtaaatacgtaaaatctagcagccagagtgttcaacccaaattaggaaggcccgtacattatcaaaactatagttagaactaaagtttataaattagcatggcttaatgacttgctaatacaaaatcactagaatattgaacacttatggccatattaccagtaatgtattttgtaatattaaagttcatctttgtaattgttatactttatttttacctaaagatttgagtatttcaagtaatcataaagcttgtttctttaaaattacttggagggcatatacaataactagattctacctagaggtatatgcaaaaaaaaaaaaaaaaaagaactaggctcgcaaatagacctagaaaacaaatttttttttacaacgatgtttgattaaaagttggtctgaaacagcataaaatcaaatattttgaaacctttcttatagtataaaataaaatagcagttgtaaatgagatttttctcataaaacaatataaaactaagtgtgatctgaataaataacggttcacatattatagcatgtattataaacaagatatcataatgtgtcttgaaaaatagtacgcaagctaaagtatgaatagaaaattaactattcatatgagaaataaagaagtatttaaagtagttaaaaaaaactgttcaaaatatttaaagtttgctcttaacaataatggcagaatattaactactcgtaaataatgtggtaggatattaactactcgtgaataacatggcaaaatgttaattgctcgcatataaaatgacagagtactaattgttcatgaacaaaagtgaaagtccaaaatgcatctagttaggtgagaacatgtaagcccgaaatatatcccaagctaaatcaaaaaaaaaagtgttttgtttacttgtggataaaaacacaatattaaaaaataaataaacattggcaactcgagaaaagcaggataaatggcatgaaaaaaatataaatatagctatgttggccatccaacaaagtaaattaaaatttgtatttcataataaatgctacaaggagaaaagcattatctcggtctaatggccattgttcgtaaattataataataaaaactaagtctacatagttagagactggggtcttcttcttcttcctgaacctcgccctctttagcatccttggcctcatccttcttggtctgctcgcagaaagcaatcatctcgtcggctccggcacccaaaaaacttaggtccatttcaggattcgctaaccaagctcgataaatagatcgcttggcaatcaagtttactctagccgtagtattttatcatttataatgtgtataagtgatataaaataaagtggaaatggtttggaataggtaggagtgttatttgcaaaagttgaaaattttagtaactagtaactagttactattttttccagcattaatagtaaaacattgtttgctattgggatggcttttaacaactctcataacctccaaatcacccatttaatcccatttacacccccattaagaaatggtaacagccattggtgtgtggtatttgaatttcaaagtttgtgatcctaaacactataaatagaggtctttgttcaccctttgagacacactcttctcttctatctttcaagcacaaagctagagagttctaaggcttgataattcctagaagtatttccacaaagccctaagtgtttcatagaaggggaaataatcttcttggacaaaggtgtagattctttgttcaagcttttggtgatccccatctccactttgggtgtttgttcttttttcttattttgttctattctcaagttttatattgttctcttattctcccgtaaactctcctatatatactatcatatatatatatatatcttgaatatatagtattatatatattatatacatactatatatacactct

SEQ ID NO: 113697 - DNA, 2964 bp, Cannabis sativa
tttttttttttttttaattcaatctcaaatttttacataataagatacatcaatttctttcaaatacatcactaattttttttcttcaaattttaatatattttatatattttaaatatataatattaatatttatatatatcaataacatatatttaaataatgaatagttttattaatatagaatatgaataataaatttttaagttttaaaataaaaatatttagagcatatgatatagtgttatttttagttctttaaataattttaaagaagttatatttttaaacatttgatgtgagtgttctagataaatctcagtcaaatccacacgtgttttgattctcttttcgtgaaagcatcatcaactctttttcacgcagattcggaccttagacctagactcgagacccggacccaagaactggacccgtgacccatgactcgaacccgagacccggacttgtgacctatgacccggacccaagaccctagacttggacttgggaccccaaccccagactcggacgccggacccggacccggacatcgaactcggacctgtacctagacccgaacttggacatggacctaaacccggactcaagacccagacccaaacccgaacctggacccaagacccgaattcggactcggacctaggactcagacccgaaccctaacccgaatcccagcccagacccgaaacctagacttggaccgcagacccagaccaggacaaagacctgaaccgagacccgagaactggacccggaccgaacccggatctggtcttagacctggacccgaacccaaacccgagacccagacctagacccgaaccaagacccggtctcggacctggatcccaaacctggaccaaaacccgaggcccagtctcagactccagacctagaccccaaatctgagactcggaccctagattccggacctagaccctgacccagttctggttctcaatccagatctagacccgaacttggaccccgaatctgggacccagactttggacctggatcccgaacccgagacccagacctcgaacccggacccgagacctagactcaggatccagacccggacctgatacccgacccgcagtcagtgttggggtcaagtgtattgaaaatatattataactttacacaatctattaatacaaatcaataccaaatataatattgtattaagtaatactaatatagaatacaatacgacatcctaaagttattgaattataatctattattttaaaaaatgataactaggtgtaatatatattctaatacatattttgaaaacaccagtttggtcttgggaaaggctattctttttttttttttttttttttgaacatgggaaaggttaatctaaatcaatcggttttacaaatattaaaagcccacacctaactaatacttattataataaaaacgtttttaacatttttgtcttacatatatatcaaatgcaatcaccaaatttcttattaaatggtcaaatcaaatgtatacgtaatcagatcacctaatacattattatatagtatatactacataataatcatacaaaattaaattaaaaaagaaaaaaaatagtagtggatcaatttaaaaatgaatagtagttagtaaaagaattattattaactaattacctcatcaacggctttggtttgttcttgaacaacgagattccacttccctcgagagccacaggcctcaccatcaccgccccaaagagcccagtgttgcatatcttggtcggaagtatcatattcaagcgaacgaaccactgtgttgaatttgatgtgtttcaccaggtcgaaatggcgtgcgtaggattccatgtaatccaagacttgatgttggtcagggaacatctcctccaccgacgaatcccatgggaaatctgagaattggtagaaaggctttggagtttggagcttagttgtctctatggttttggtccacaacccacccaccccactacgtgactcgaaaacaatgggctggaaacccttcgagagaacgtatttacaagctaagaggccacttgttccagctccaataatggctacctccttccccatactaatcagcttcccaatgtgttattattacttttttctctgtctctacttataagataactaatcttataattgattgctgttatatatattttattatgtatatgtcatggcactacaattatttttgttttcataaatttttttattatatgatccctacattgaaaatctcttttccaaagtataggattgtgtttattatctttactatattttattttaaattatatgtcatggtactattggacctaataaagcacttaccgatcctttgtttgcatgttaaatgattcatgtgtttcttgttgtatagttaacaaatttaattttttattaattaaataaaattctcatggttaatacatagtccattcaaagtttctccactctcacactggcctagttaaagggtgtatcacacctacactgtacatacttcactctctctctctcttctcttatttggccgaagccctctctccatactttctcattttcaaactttcaaaaataattctagagagagaagggctctcttttctcttaaaacaagtactattgaagctcctctatgcaagctttgatccaagaaagaactacagagtaagcttttgtgtcatttcctcttcctttactttcttttcaacgctagttcttttcctcaccactccatttcttgtgttgttcattcatgaatcatcttctatacttaaaagaaaactttgtaattcccagccaagcacacaagaggataatgttggattaaaaatcctacgtgggcacatatgtataatgtatatgctattataaagtgtaatacaaaattaagtgaccaattatgttatgg

SEQ ID NO: 113698 - DNA, 4551 bp, Cannabis sativa
ttttgaacaattaatttgtatgtttgtagttgtaaaatgtagaataatgtatttataaaataaattggatcatttttttttaaaacagttcggtttgggcgattaaaccgaccaaactgaggttcaaaacggtcggttttaagatatgatatggattggtcgatccgttttcggattgcaccaatccataccgaaaatcaaattttggatttttatatagaaaaaaaccgaccaaactgaccgatgctcagccctactctagaccccaacctgactttggtcctcgactgagacacgaccccgcttgaaatcttgagccaggatctgggtccgaggtcggggtttgggtccaaggtaggggtcgagtttatagtaaaaatataatttttcacaatctattaatacaagtcaatatcaaatataatattgtattaaataatattagtacaatataattcgatatcataccatacaacgctgtataccaaacgaatcctaacaaagtttctactgacgaaatgtgaatgaaattataactttacttacattaaatatttacattgctaaaaagttagtagatctataccacttaaaaattcaaaattttaagcatttatatagtaaatatcagaattgttaaaagataccattagtgcttagcatcttttgcagtgtcatatcgatattggtgtgattaagtatcgagtctcatataacttaagaaaataatttttagttaatatcgctaactaatcatgagatactacttatagaagatgttgggcaccactaatacttaatagcaataattagtaaatatctaataaaatctagaaaattgagcaatcctccattgggagagggagggcagagatgcagaacataagtaaggaaaaggaaatctatcatgggtcccaatagctgagttagattgaaccaataggatagtgccacgcaaggagtatcattcgaatcacacaaatgtgagagcaccaacatattaggaggagataagatgcccaaaccaaaacaaacaaagaagctgtcccaaattgataacgaaatggagttaggagtgaacagcttgcttcaggaccaccttttttatttaaataaataaaaaaaaaaaaacacatattttgagtttttttataatattatattattattggtacaattatatattaagttgtacatatataacttaaaataatttttaaatttattaataattaatcataaatcgttaattctaaatagtatcagacaccactcatacttaatagcatacactacgtctacaatgtacctccaatgtggtggaccttatatgctttgctttattttggcacatcatctatttcttctttaaatgtggtccgttgtttagggccttctaacaaatacaaaattgactaaaaacaaaaatgaataatatcacaaccttgttttttttggtcacacttttttttagtttttagtacttttatgtatgtttcttattcaatttgtcacgaatacaatgtcattattcttaaaaaaatcaaataaaataaaagcaacaattacaaatttgtgtgtcaactcttccactaagatttatgtaaattattgtcatgaaaatagggaaaatgttgagatacacctctttcaagtgctttcgccttttggtacataattatttaaaactatttataaattttgaatttttttaaataaagtttaaataattatgtatcatgcgtataaaaaaaataatcaagtgtgaaataaaatatttactttattttcagcattgtaaattattttttaaaagaaatttactggtgacgctaaataactacaatgtacacattcattaaaaagaaataaactaaaacattatcctaaatatcaaatcaaataaagaggtctaccaaaacactattttaaaagaacataatactattcatcccttcagatgcatcccgacaaatcactcgggccagatggtatgacgctaggtttctatcaaaaattctagccagttgttggatcggatgttgtatctcaatttagagacttctttgatcaatgcacccttccttttggtttaaatcacactaatattgtgctcgtaccgaaaaagaagcagcccactgttatgagtgatttaagaccaatctcgctttgtaacgtgctctataaagtgatctctaaagtgctcgctaaccttttaaaatcagtattgtcccaagttattttggaaacccagtcgactttcattctcggttgcctaaactcataatatcatggtagcttttgaagtcatgcactaccttaaacgtaagcgtaaaaggagagatgtctatatggctttgaaacttgatttaagtaaagcatatgaccgtatagaatggagctttcttcgcgaaatgatgtcaagaatggggtttcatgctcgtttcataaatctgattcttgccacagtttctacaataagatatatggtggttcatgcaggtaaagagttgtgtcccattacccttgagagggggatacgccaaggggaccccattttccctacttatttttgctttgtactgaggggttttcttcatagacggtttgagactgctagtgcattgagaggctgtaaagttgtgaatggggctccggtcatatcacatatcctatttgttgatgatagctatgtctattatcgggctacagagcgggaggtctctaatgttctgagactgcttcatttatttgagatggcttcaggacagaaggttagttttagtaagtcctctatctttttcagtgtaaacacccctactgttttgaagacaagaatatgtggtattttaggaatggaacttacaaatgagaatagcacttatttgggtcttccctgcaccatgggaaggaacaaagatgctatgttaggattcgttaaggataaaatgcagaaacatattcaaagttgggagggtcgtctcttacctaaggttgggcatgaaattctgctaaaaactattgcccaaagctcttccaagttatacaatgccagtctttctcttgcctatgaagacatgttctcattaggaaggattgatgtctaagttttggtgggattcttcatccaataattcttgtgggattagttggatgagttggcgtcatctttcccggcataaaaacattagtggcttgggattttgtaaccttatagattataatatttctttattggggaagcatggctggcgccttctgttacgtgagaattctcttgtgggtcgtatttataaatctcgttattatcctcggggttcttttttgacagcaactttggggtctaatccaagtttcatttggagaagtgtttttgagtcctagagcttgataaaatcagaagcaaaaattagaattggatctggttttgcaactggtgtggttaatgtgcgttggtttcctatcgatgacaatccttaagtgacatcttcccatcctactttactccatagcaaggtttatcaacttatgacacctggtttaaaggagtgggacgaggatttaatatgagatgtttttgattccagggacaaccatatcatccttagcattcctctcagctcttccataagtgaggatgtttgatttgggaaaaaggaagcatttgatttttactctgtgaaaagctcatattagcaccttcaatatttgagaggagactggaatgttcagttggaatctgacctgtggaagcaactttggaagctcaaggtcctctcaaaagtgatccattttgcttagcatgcactatcaggatgtctcgccactcgaacatagcttaacagcaagcacgtccctattgatatacagtgtgtcttctgtagtggggaggttgaaccaatcctccacgtccttgttaattgcccctttgctcggtcatgttggaacatatatgcaatttttccctctcctgctatgggttttaatgactggtttgctgagttttggtaaaaaaaaaaaaaagaggtggagcggttgaagaatttttgatggtgggatggtaaatgtgaaaactattaatgagattttatggaagaattgcccacactctgctgctgatgttgttactttggcacataacgttcttaatcaatggagatatgctcagtctcgttgtattgagccgctgctacacgaacctgatattgttggcagcaaagattgttggactaaacttgtgttagatatgatgaagattaatgtggatggagcaactttttctaccgagaacgcgcgtatggaactaattttattgctagaaattgtgatagtgttggcatgtaggctttggctacgtattcaactggtggttcgcaagtaacagtggctaagatattgagtattaaggaggccttaagttggataaagagaaagattttaaagagtgttgtgttagagattttataacaatggaagaaaatcaagatttattacaactctattgtaaaataatacaaggactaaaataagagattgattaaatatatgcta

SEQ ID NO: 113699 - DNA, 721 bp, Cannabis sativa
ttaaccgtgtgtaggtttatatgtaataaagtgtataatttgtatttttggtgtaaaaatttcctatattaaatcataaacaatcaaaagtaaacagtcaaatctgaattattttataaacaatgaaaattaaaaatcaggaaagaatatatttattactagtccaaaaattccacatcagaaattaaacaaatattctaattaattccaaaatcatcctgataatcaaaaaagtaaataatgtattcaaacatgaaacaaatagtgtattgaaagtttcaagaatgaaaaatagtatattcaatgtatatatatacattcagatgaataaaatggtcttaaatatttttatccaaagaaaaatatgcgcgttactttttccatattatcactttcaataaacacagtaataacccaagtgaatttattacatgagatgttcaagaaattttattgaaaaatatttagtaaaaaacaattataagtatccaatcaatacaaaaatcttaacaattggcccataaaatatgtagaaaactaatgggtcacaagatagtagtcactcttaaacattaatatcagacagattgttaataaagcatagttattatttatcattacaagcatgggtggactcacattgtagcgagggggcagtcgccccatctaaaaaaaaaatcggaaaaaaaatatatatgtattttaattagttacaacatat

SEQ ID NO: 113700 - DNA, 1884 bp, Cannabis sativa
atttagtacatgtcaaagttgagggggcaaaattcataattagcctttaacaaaacagaaagtccaattagtaacttttacaaaatactagatctagaatagtatttaccctttcttttattttattttattttatttatttatttatttgtgtttttatttaattataagtgccatatctaactcataagggacaatttaacttagttggacgtcactttgagcaaatatagatatcacgtatccagctataaaaattaaacctatggactcaagtgaatattgtgacgattttttaattatatttttttatttttttacagctaattagggtgataatgaaacctcactatgtatacaatattccaaaacattataaattagtatacatacaagtggcgggggatgaaaaaaagtaaaagaaaaattataacacaattattataaattcataattttgatttttttttatgtatatatgttgcaatttatatattatatatgtcactgaaatcacatcacatatatatacgtacaatatgttaacattgtcaaatgttttgacaaaattaaaaggaataaattatttttttttgttttgacaaaattaagagtaaattatcttttttgtgataaattttctcataataatatacgactttttttaaagggaaaatgggaagttagacaagaaaatatcaatttcttcttaaaggaaattagtaattaataattaatttgttatttttctattaaagttaacgattaaaattaataccgttaaattaattatttattttttaaaaaaaataattttatatatttaaatttaatttaaaagtattaacaaaattatataattatttttttatatataaatcttaatttaaatttaaattaaacattaatttaacaaatttataattagttatattatttaaaatatctaaacttctttattttttttattatttaataaaattaattagatatagttttgtctaaataaattttatatatttaaaaataataattgaattgtattagatttaatttgattattattatttaaattaataattaggtaataataattctaatataactaacaaacatgcattacataatatataaagaatatttctctatttttttttttattttggaaaaaaaaaatcgtataaaaaaatatagttttatatatgatagacatatttttataataattcactaattagtattgaaaaaatttattgtacactcttaagaaagtgtttaggaaaacgttttagtccacacgtataaaaaacaattgcaacaaaatattataccttattttcagtgttataactgtttgaatttttcttataattcaaaagatactctaaataacacttgaacatatacaattattaaaacgaattgaactaaaaaaaaaaaagctctcttatataaagaacgtactatagactttcccattggtactttagaaattacaaattattatgtaattaagagggtatgcatatcttgtaaaagcttcataaatttcacccaaaatatgtatatattttctaatctaagatttaatatgcatcatgtatgtatatatttaatttagaggtgtctttagttcataattttttataagagaaatattaaaaagtattaggtgttaattagcatttttttacgtgttaatttggctaattaggatatttttctcccaaaatttgacatgtaccaaatcatgcctcctaaatttttttgccgttaaaaattctcttgaattataaatattgttagattttaagaacttttgtctaattttagtaaaaaaaagaattaacatggatgaaaattcaagggcatgatttagtacat

SEQ ID NO: 113701 - DNA, 1499 bp, Cannabis sativa
aatgagatttttgatataaaatagtaatttgaggagatataaaaaatagaccacccttaccaatagtgataactttaatttaagttgttatttttttttttttatcaaattcttaacaatttccttattttaccaattcaagattttattactatgtcaaaattcaccaatcactacagtattttttgatctaatggtaccaaataaatactgtttggtgtaatggttttgatagtgagagaatgatgtcatgttacatacacatgacgaaagcaaatgattatgtacataaataaaccttattttatttatttatttttttgcttaatcatattttatttatttattgttttttctaatggaaatttatatttatttattgttttttttcctaaaatataattatttattgttagaaacaagtaatattccttttatttatttatctatttattcaagccttcacatgtaataaaatataaattaataaagttttttaaacttgagtttattcatttatttattatattccttgagtttatttatttttaaatttaaggtggcttttaattagaagaaatgataaaaaaaaagtaagaataggaataaaatttaaatagtataaaaaaaaattaatacaaaaaatcattaattttttttatattacattagaatgattttttttttttgtaaaaaaaaatattttattagaataatattttaatattttaaaatataatcaaataaataaataaaatgaaaattatttcatttgatcaatttcattacctcaaactaaacttgatctaaatgtttaggtggacaataattatatatatataagtgtcataataatgaagatgaagtgttcgatttttgagtttattaattaattatttcttactagaaacgtggaacttttattttttaattcgactatatagatgtacaatatttattgtttatatatacgtgaaagaaaatgtaaataaagtaccagattttttatttattttttgattaaaagtgttgtactttgaatttatttatttattttgttagaaacgtgggttatttattttttaatttaccattttaattagatgtacattattgttattgatttgtgtcagaggatttagtttaattattttcattcatatatggctgcattttataaacttgtcaagaaatattctcttgaatataatagtgaaaaagaaagggtaattaattaagcactaattgaaatttcttcttcttccatatgtgaggaaaaataaatctctataatgattaaaagattgaactgaccatgtcaaacttagatatagaagcacttaattaagtatggaagttgaccttgactaaaaataaaaattagagaagtttctgaaaacttggcattatgatcatatttctaaccatcttttacaaaaactcaacaagaaattgtaacgccccgatttcccgagacgtcacactagctagtccgttta

SEQ ID NO: 113702 - DNA, 2874 bp, Cannabis sativa
caaaaatatgaggttggatggtgtttttccaagtaaattgatagttgagggggttttaccgcaaattactcaaataagtaggggataattttgttaatttatcatttattctaatattcattcgaataacaaaccaaacatcttaatcaattcccattactattcttattccattacaatactattatcattaccattactattacatttcaccaaaccaaacatcacttaaatgtttctattgtcacaaacaatttttattactaaaatgatatttagtccaaaaaaatatgtatataatggtcaacagtatgtacatagcattcaagcttttccatgacatgtcttcaaaagattataattcaaccttaaaatcttcgtaaataaatataataatctgtataaatatgtttgtagatattaatcctttggattatgcttcgtaccattctacaaatactgagaccaaaaatgcttaattcaaactgaaggttcccatggtaacaactctttttttttcaaaagagccttctctagactctttgaacgctcacaaccttctctctccttcgagaatgcagatgcatgtggtttcatccaaatcttcttgttgacacctgcaacctaattgtttccacactatgaaaccttacccaagccccagatctcaaatcttggtggctccgactactcatccaacgacgaacaagccagctcgactggttcctaccgtccccatcgcatcaagttgcgaagcccagaccgtacccatcgcatcaacaataagtctggccagcttcccaactccccttcccgtcatcgcatttatgagatttcttcaggtatactccctccctttcactattttcttgtttctgtcaaatcgtacctgcaaaagaggggattaatcatgatctctaggtttaaattcaaaagaaaatttaatcctctgcttgagcgaatcttcccttctgtggggatagtatgacaccatctcctccatttattactctggctttaactatttttatcaaaaaaaatgtattaatctagttaatgctctgggtgttgaatgtgtttttccctctatctgcgtgaaatcttctgttcaactgctttgcgaaccattaaatgtttgtactacaagtttttatttccactttagggagagtccgatcctacgatgtgatacttaaccaccgagtatcatatttattaccttttttgggaattttcctataaaaggatccctgttttcatcccccagattactgaactttagcattttctgtatttgctttctttgttgttgctctcgttattttgttgtctgcactatcaaagtcaccactatggatgacttaacaaactctcttacacttgctttgaacctcacagatatcgaaagcaccaaccagaccttacatgaacccacccctgctaacccagccgaacctgagcatgttccaacccattactttttggtggaaaaattgcatacggttaagtcatttaaccgtaaggtttttattgataaaatgaccagtaattggaaccatatctctagattcttggttaccataaccgatcgttctcaaggccttgttttggttgagtttggatgtgagggggataggcgtcgagtgcttttacaacaaccttggacctacctcaaccaaccccttctcatggatattaaaaattccttggatgtccttaatggggacaacctcttaaaaatccctctttgggtgcaagttttcaacacaccattccttaaacgaaccgagcaacttgcggaattagtttcgacttccctcggccacctgtttgaggtgtatcgcccatcattccgtgaaacatggggcccatatttttgtatccgagtcatgtttgatgtggcataccctctcccccagggaagtcccgtcaacttcttgggcataaacaaggtggtttagcttgagttaaaatacgaaaatctccccgacatctgctttttctgtggtcgcatgggacacagctataataagggttgtgtggactatatgaaagcttgtcatgaagctcctcttcctccgaagctcaggtatgatatcaaaacaatttctggcaaagttaaggttactactaactctttgttgtgctctgaacagcatagctttgccaaccctcctgtgaccactttcatgacttccaatcctgctagcactgtatgtgtctcacccccggacctaatgcccccattccccacatactgccctcaagaccaacccccaacccatggtcaaacccaacttgttggcctatacaagtcgggaccttcatcacatacccaagacattgtcacctggactcatggagatgctcaacccattatcaccaaccaaccccaaaccaaaaataacccacacactttcacggtactcctcaatgccacaatgagcagctcaattgtccaacaagctccacatgcctcaccacctaccctttaaagtacctcacaaaactctagtagctctaaatctactagctccaactacttccatgtccctttgcctgtcaacattcctctccttgacactagcaaacggttggacgctatgaacctatcctaccaaccgggtgttgcaactccatctagctccaaaggcagaaaacgaaaatgcaaacccaattccaaagatagcttcaagagaaaaactgagatggtcaatggggaacttcgtcattagatcaaacagtctcggtgcgatagccatcaagaaaccgagatctctcctcgaaatgcacgcctcgccgttgagcaggcctgcctgcagccatgaagcttgtcagctggaatgcacgtggtattgggagtgatcgtgcatt

SEQ ID NO: 113703 - DNA, 7316 bp, Cannabis sativa
tattaaaccataagcttgtaaaattcatgcaaacataaatcacttcaaattttttatattgataactaatcaaattgtaaagggttttatttagggcacaaaacccaacacccagaccatgttaaatcagcccttgataaagaattgttgaatgaggagtgcttatgcatcttcctaaagttgtgaaatcgtcacatacttgcaatttattccacaatcctctttatattcgtacgaaggatcctgaagctaagtccaatcagcccttctggtttgaggcctggtagactagagaccttcgtacctatctagtggttgatcatgcttggaattccatgtcgtatgcctgggctctagctagagtgtttaagaaggttggggccactcgactggtgctgagtaagtggaatagagaataatttggtaagctggattactgtattggctagatggaatggaaacttagggatattcagaaattaccaactggtttaaaagttgggactttgaggtcaatgtgagaaactcccttaataaagatttaagatgaaaagctctttactagtagtagatatctcgtgtttcttggatcaaggatggtgaaaaatgttctaagttcttcttcattacgaccactattcgtaataggaagaatgtcgtggagattatcttaaatagaggtggggtctagttaacaaataggtaggacattggtcgggaattttttaatttccttagggacatcttctctaatccagttcaaggccctatagagaatctgagtcctttgattttagatcatttgtcgcccattgagtaggttgactttgatttaatccccaaccatgacaaaattagacaaactcatttctcaatgggaagttttaaagctccgggtgcagatggtatgtctgctctgttctttaagcattacaggaattctgtgggtgagaatttttctgagattgtggtggacttcttccaatctagaactatgcatttgggaatcaacgaaacaaatttagtcctaattccaaaggttcccaacctaaaaaaagtggcacaattcagacctattttcctttgcaatgttatttacaaggttatttcaaaaataattgcaaatataattaaaagagtcctcccaaggatgatatgtcctacttaggaagctatcaacccagggcagaatatccaagacaacaatgtgttaatacaagaaatcatccactcgtttaagctcaagaaagaaaaagagggcttctttcctataaagatagatctggttaaagcctttgataaataaagctggcaatttattgaccatgttctctgcagcttcaaggctctgaacaagttttgtggttgggtccgtcagtgcttatgcacgacctctttcaatgtttacttgaatgggggaaaagttattatacttacccttatgtctggtattagacaaggggaccccctttccccttatcattttatctgggctactaaaatcctctcgcgtatccttaaaagtgccctagattttggttccatcagtggaatcaagttgagtaggaatgggcctcgactttttcatcttttcttcgtacacgatctaatcgtagtgggtagggccacgttaaaggaagctaaggaaatttggcattgtttggagaaattctgtgattggtcgggccatcgaagtaataaactaaaatcctctattttcttcagcaataacaccagtgatgggatgagatttggtattaagcaggttcttggtctcatcacggcagttggtaacattagctacctaggactccctttgtttcaaaatcatcttaaagatgcagatttcaacatcattttggataacctagtctataagttgcatggatagaagttgaattccttgactaaagtaggtcgtgctactttgataaaattactggggcgttccttacctgtctatgcgatggaaacgactaagtaatttaagaaacttacctctaaaattgatggaatggttagggacttttggtggggttgcgagtcgggtaaccaaggcctctacttaaaggcttgggataagttgtgcctttctaagtctagaggtgagcttggattcaggaagactttagaaatgaatcagacctttctggctaaatggggttgggctctccttaccgaggatcaatctttttgctgcaagatcttgagtgctaagtacctaacaggcaaatcctttttgaagtgctcgtctagaaactttgactcgtagttctggaagaatgttgtgaagtagaaagaaatcctcttgaaaggagcctgtaaactcattttggatgggaaagatacaagcatttgggaagatccttgggttattcatggtcgggacttcatccctcatcccacaatcgatcgacctaaggggttggagaaagtagtggatttactaactaacaatagcaattgggatgtacccaaattccaaaacctttttgacctagagacaacaaataacatcatcaaaggtggtagacctggggactaaggcagtgataagtggatttggactaaagaaccatatgggctattctctaccagatctgcccaccttttataggccttgaatcgcgctcctcctagcaactttgctctagttttgtggaataaactttagaactctaaaattttggaatgccaaaaggttctctggtggagtattctctcaagtaccttgcctacccattatgtccttgctagaagaatacatattgacgaagcttcctattctatttgtggtgagggagaggaaataatggaatatcttttcctctatagtaatttgaggtcctccccctgggaggtgatgtccgttcaggactctggagcccgagtaagggatcgggtcaaattcttatggagcccagaggataaaagagtggatgtctaagagtgattcttgtatgcttcaattgttgtggaaacgatctggaaaacatgcaatgataaagttcataataactctatttgtaacattaaacactgtattaattctatttctatgtgttacgcagattatgcttattgtctgtttctttcgttagtgacattggagtctcctgtttggtctcccccgggaaaattgggtcaagatcaactgtgacgttaaagttggttgtgacttaatgtacgtggtggctatggctagagatacaaggagacagttttgtgggtggctactgaaaggctcaacttctctgacccacttattgaagaagttgtggcctgtttattagccctagagttagtgatcctatggaagcatttgttcgtgatgatcgagagtgactctgagacaattatcaacacgttgaagataacttgtttcgtttggagtattggtaactatgcccttcaatgtaaacactctcaaatcttttgattagttgtaactttttatttatttctatactgtataatttcaaggctcatgatatggctaagtgggccttcgcccgagatgtaactggtataatcgatctatcttctataccacataacatattttataataaccatgaggtataattttattcattttaatacatctatgccttttattccaaaaaaaaaaaaaaaaagaaagagtgaagtgaaacattccaagtttcaaggtatttttgttctattattatatcagtactaatgtaacaactataaactatagataatttctgtttttaataacgtcatcgaggtgtatgttgtaggtcaagaataattttatttaataagttagctgtttggcgatagtatctttaattattaccactttcccaaactttatatgacttgtgagcaaaggttaaacgtcgtcgttctttggtaattggtgtaaaacacatttgtgtatgttcacattctctgtatataaactcaataaataacccactaaattactatctcgaacactctgtttataacattatgggtattattcttccatgtcagatcctctgtcaaacccaaaaagactcatcagaagaatctgatcagtactcctcctccgctaataacactagtcaccttccctcagaatcatcaacctcttcttctactctctgctctcaacctagtcttccctctgttccatctctccaccaaaaccaggatcaaataaccttatcccaatactgcaacgtaatcacgctcaaaccctcaccatctaactcctcctacatctcctctctcatcctctccgggaagtttctgtacagtgcttcctccgacggtcaggttcgtctgtggaacctagactcagaaaagaattccaatatactttctctcccagaaaactatattgtcgccgccaccggaagctctgtcaagtcgattgttgtttcaggcgataaactcttcagtgctcatcaagaccacaagatccgagtatggaaagtcaatagcgttaaaggagaccaacaaaaacacgactacaaatgcatagccacgcttcccaccttaaacgaccgtttctcaactctgttttttgccaagaactacatcaaagtccaccgccacaagagccgcacgtgggtccatcacgtggacgccgtctcggcgctggttctctcccacgacaactcccttctctactcggcctcgtgggatcgatcattcaaaatctggagaaccaccgacttcaaatgcctcgagtccgtgagtaacgctcacgacgatgctattaatgacgttgcattgtcctatgacggccacgtgtacaccgggtcagccgataggaaaatcaaggtgtggaagagggtaaaggttgatggttcgtcgttgcgtatgaaacacacgctggaagccacgttggagaaacataagtcggccgtgaatgccctggctcttagctcgaacgggtcagttttgtattcgggcgcgtgtgatcgctcgatcctggtatgggaaagatcggacggtggtgatgatgaaatcggtgtggttgaaggtagaagaagtagtaatagtagtagtggggccatggtggtggtgggtgcactaagaggacattccaaggccatattgtgtttggcagtggtatcatctgatttggtatgcagtggttcggctgattacacagtcagagtttggaaaagatcaacatcaagcccagttgacaagagttacacctgtttggccgtgttggaaggtcatagacgaccagtcaaatgtttgaccgcttcacttgataataatagttcatgtctaatttcttcagatggtacttcttatttggtttatagtggaagtatggattgtgaaattaaggtatggagaatatggattcctaagagcaattagtgttcttgcgtggttattagattgcagtttaattaattcttacagagagagtgagagttgaatagtacaattttgtttcctctagattaaatttcaaaccaactatagtaatgaccaatgataataattaataggtttacttaatcatacatgtcgggccctctggtttttcttttagcagtcaatatatatcatgagttcatatgaattggagtttcgcaattttatgacaaagttgacctttgaatttcttagttttgtagagcccgaaatatctatgtttggaatagcttttggccaacaaatatcacaaaatgatgataacaataatatgtggtttacaaaagaggtgtggtttacaaaagaggtgcaaataatgcaggtacttgaccaataatgctcattattcccttcacatttctgaaatttaagagtcgtaggttgcttaggctattttgtattttattagacaatacgtaaatggtgctatttttttttttcctgaaagaaagataaacttcaataatataaatttgtttttaaggaagaattaaaaaaaataatgtaaagaatcatccatccaaatacaatctcctaaattaataataaaaataataataatatatagtaatagtaaaataatataagagcctttgtagggactaatttaattttttttagtattataataaaaaaaataattataatatataataataataaaatatctaaactaattttatattatttattattattattattatttcatccgtcgttattgttgtcaccactactttcttttccaaatctcaatcttattcttagattccattctaaatttcaaatattttcttaacacatttgagccttaactcatttcttaaatacttctcctagaattggaaacttaattaaccaactaaaaatatttaatatctataccttacgcatataataacacttgtgtcatcatatttttcattttcttaagaaaacaaaaaaaaaaacattacaaataaatacattacacataatatacctctgtttaatcattagaaataataatataacagggttattatttaacatccatggatttggtttagttagtttatataacatatatggttttagtctacttaattattattataattattattaccaaaactgtttaatttcaaaataattttctaaatattatggttttagtactttagttagttagctaatttatttttattattgttgtaagagtagagaaaaagaaaagagaagaagaaaagagaaagattgagagaaaaaactcaattgaagaagtgaactgcaattgtattatatagtgtttgtaacaaattcacaattacattacacaatgagagagagagaatacagaaagtaataacaaataatataatcgaaaatagcagaattctttgaccactaattaacactaacacctcctctcaagttacatttggttctctcagagttaagttgtctcgaaatttatcaaattgaaggtatggaagtgttttagtaagaatgtctgttgttcgatgatttgctgagacatgtctgatgtcaagagagtgagcaagcactctatccctaacaaagggaaaatccacctcaatatgcttcgtcctttgatgaaaaatagggttagatgcaagtgatgtagctctaagattgtcacaccaaagtatgggacatgaggaaagctgaatgccaagctcactaaataacgattgaatccatataagttcagtggtggcaatggcaatggcacattattctgattctgtacttgaacgagcaacaacaatttgttttctagagctccacatgatcagattgttgttggattatattttaccagtatctagatttactaccatgtatgttatttaaaatcctaaatatgaatatctaaaacaatgtaatttaaacac

SEQ ID NO: 113704 - DNA, 3408 bp, Cannabis sativa
ttgatgttgaataaaatggattacattgaaggctataagtatttcctcactgtagttgaggaaaaatcaagatttacctgggcctatatgatgaaaaccaaaagagaagttcaaactctgattcttgcattttattcttctatactaactaagttttcagctaaaattaaagcaataagagctgacaatgccaaggagtttaatataacttctaactataccattgcaagaattatgcactatcattcttgtgttgatactccacgacaaaattcaattttggaaagaaaacaccaacacattcttaatgtggctagtgcactcatttttcaatctcagattgcccttgtttattggccataagcaatccaaacaaccacctatttgataatcgaacaccatccaaaattctcaacaaaaaatctccttttcaattattacataacaaaccaccctcctacttcaaaacttttggatgccattcatatgcctatactcttgatagaacaaggcacaaattttcacctcgaattaagagctgcatattccttgattatccatatggtatgaaagcctataccttgctggacttggaaaccaattcaatttttcaatctcgagatgttattttccatgaaacaatcttccattccccaagtataattctataaatcacatggattaattgtttcatacagttgtgcttccatctcataaaccatcaccctttgtttcttctcaaaatagtagcccatcacatacaacaaactctatcaagacttctaaaactagcagaacacttaaaaaacttgtgcatttgcaaaattacatttgctctgccaacactaatgcagattccacttcttagccagtacataatcatatctgttatcataaactatctcctaaattccttgctacaatattatctgcttacaccatcatttaaccccaacactactcaactgctgcaaaagacccaagatggaacaaagccatgaatactgaaactaaagctttagaagacaaccatacatggattgtcacatcattatcccctggttacactcacattgaatgcaaatgggtatacaaaattaaataccccccccaatggagaagtagaaagatttgaagcaaaattaatagccaaaggctacacccaaaaatatggaattgattacctagatacttatgcgccagttgctaaattatatacttttaaaattcttcttgctttagcagcaatcaaacaatgggcattacaccaaatggacatcaataatgtatttcttcataggaatttacatgaagacatatacatgaaacttctcccatgttataaacctactgctaaacttcccccaaatgttatttgcaaactttagaaaagcatatatggtcttaaacaagcttcaagacaaagtatgaaaatctaagtaccactcttatctcagtagttttatccaatcccaatatgaccattccttgttcatcaaatcataaaacaacttattcatggctattcttatctatgttgatgacattgtaattgctagcaataatgctacaacaactagtgactttaaatctttcttgaacaacaaattcaagctaaaagatcttggccttctcaaattttccttgatgttgaaataagtcgatatcctcaaggcatatacatttcttaaaggcctttcactcttcagttactaaaagaatctagttaccttggtgccaaaccagtttcaactcccatggagcctaacctcaaattaagcaccactgatggccagccattatatatcggaccccactacataacgaagtctcattggcaaactattatatctcactataacaaggcctggtctctcctatgcagtcaatagactaagttaatacttagcctctcctagaaaacctcatttactagctgctcaaaggatcttacaatatctaaaatcaacccttggccaaggtctattcttctcaagcacaaataattctcatatctctacctatgctgaaactagtctcaacatcaaattttttttttgatgcaaaccagggcaactacatcaatacaagatgatcaatttcaggctattgtgtgttcattggcaactcacttgtttcttggaaatccaagaaataggccactgtatcttgatcatcaatagaggctaaatatcgagccatggctcatgcaacatgtgaaattacttggattatggctatcttaaaagactttagaatttctcataacatccctgcaactctctactgcgacaatgatgctgcaattcacatatctaaaaactcagtcttccacaaacgcactaaacatgttgatattgattgtcacattgttagagaaaaaattcaacaagggaaactcaagatgttgcatatttttcttctaacaacaatctagctgacatcttcaccaaggcattatttctagcttctttcaaggacattatcttcaagatgggtgtcaaggacctctacactccactttgaggaggctattaaatgatcaagatgttagttaagtcggtattagttagttgaacacttgtcttttctgttagtgagttcgtggaatctattgcatagttgtaacaaaattccaactttctcttcttcccttgcaggaagagcttagcactatatattgtaatttaggttccataatttcacttaatgagaatatacaatttattctctaaactaataattatttcatgtaaatagctagtttaaaattatacagaattttaatagctcttctttcgtttattgctttatcatattatatctctattattttgtgtttttttttttgtaaggaacaagtaatatgtataaaacaatctatatgaaatttgattaatctatagactataatgtaaggttaaaatttgataaagctaacgaattacttgcattaatacatagtttaatagaaattaggctgcatgttgacctttaaaatttgaaatatttaccagctattgaattccccataatctatatcttgaggattactctctcttagtcctattctctcataaggtttttcttcttttgtgctagttttgtgggtctattttctagctgtgatattgggtagttttgccacgacggattagagcttcgtaggagcttaaatgtcagttttctttaaatgctaaatactaatttgtgtgttaatttgtcttttctatctcttatatctatctttgtagaggttattatttctatgtttgtattctccgctaatcggcggggttaattgttattgggaaatttgattttatatacttaaaaaattaaaaaaatttattattaaaccaaaaacctaaaccctaaaaaaattatgccttttttttcaaaacccca

SEQ ID NO: 113705 - DNA, 3485 bp, Cannabis sativa
ttttttttttttttaattgggttctatcgatgatggcatttttgtttttactcaacgtagattactttagaaggcactcatcatggaccagaaacaaataagcccaccatgtttttggaaattggtaagtttttgtgtgtttagattcatattttctgctactttgtatggaacgaaagatttttaaatactgctgatggtattgattaagcattggatagtcatgcatggattccattatctactgatcacttgtggttggctttgtatcggtcgtggtgtacattttaatagtttcttgttatagatgttttgttttgattggtccctttttatcgttataggtagcacagaggagtactggaagaggcaggatgctgctcaagttatggctcaggtttggtagatcctctacttttagttacttttagttttggcattccctcatttacgtcttcaacgagtgaggttcactctatttttgttttgggcttattaaatctatgtgctctcataacttgaagattattttatttctgtttgtttgaaagaatgtagtatggattactcttacaattttacataaaattaccaatatatagatgtaatatgcaggcttacacgtgttttctcactagttggtactattggtatttgcagctagtttgggaaggacttggacttggaggggaagctgatgtgggaaactggagcaggtaacaatataagcagaatttattcttaggcacatctctgaaatttttgtcaaagttcttctgtttaaatattgaatttacatatttcagccaaattataatttcccccttttgttttatttcctgtggactttgtgcttacagctcacttactgtgggaagaaatgtttatcaacagttcatgtgttgatttgttttatgcattattatcaaccttgctgcaattctattctaacctatttttactcttgttgtttaagggagaatgataagaagagagtcctcattgggattggtggtgggcattatgcacctcggcacatggatgttgttctgtaattttcaataatcttcagagctattctaatatcattacatgtgtgtgtgtgtgcattcatctatgtattttcttcacttttcaaattggtgtgtgtgatacatctatagtttttcttcacttgtcaagttgatatgcttataattacgtgacacaggaaatagcttaggctttgaataacttctctattttcttctccaatcataggaaagatggtgtatgggtgggtcatctactttcaggatactctctgccaatggaagatcctaaccaatcaaaggtggagaaaagtgttgaaattggtgggacttggagagaggcaataaaagcagcatttgaggcaacaaaattggcatttcctgggggggaaattcttgcacaccttgatcacaagtaagtttacaagacgaatgaatgatgtggatattcatgcatacatttaatgctgatttggctacacaattaccagattattacgaaacaaacatagttgctttcacttcactcattgctcctttttttcagtagcatagatcatcttatttctattattcttgttcttgttggaaaaaggaaaaagatcacagttggttgtcacttaaaactgaaacatgtcatccatgatacatatatagcactgttagcaaactaatggagatattaaaattgattagagatcttaatgtgccagtagttcgtgttttcttttggcattgggtattttacttctatgtatcgtcggttgctagagttctattcacaaactttttgcacaccattgacgctatcctcaactggtttgtttgtaggagtttcaagggctggcagaagaatgccttaacaggtttcttgggtgaacaaaacattaagattggcaaaccgaatgatttctattgaatttgaaactatgctgagttagattctttccccataaaaagtaataggcaatggcagacgactgatgggcagtcgacagaatgagcctgcagttgtgagacagattctaatgatttcatagcaaggatgctgggtagtctgattttgttacatattggtttccataatgtgcactcagagtgtctggcaaactaattttgatggatcatgttttccatcttttttctatgatgtattagactttgattagttgaatgaatgttcattattcaaaataaataaataaatggatgtaacctgctttatatttggttttaatttcccaggttcatgttaacaatccttaaataatatatattacttatttacataagataaaacatttatttggaaaaaaggaaataaattgtttgtagagttttttttttttgtatcacgaagttgtttatagagttggttgtgcttgtgcttagaaaaagttctcatattctatttcagatgacattatatccgtgacacacctaactaatccgcaagtacatggaattcaattggcttacctattatttaagtatttcgatcacaaatatagaagttttttatttatttatttatccttttggaaattgtcaaaacttccacttggataataaataaataataaaataaacaattagaattttaaactatggataagaaaacatacgctgattgaagcaggcagtccttgacccgaacagttgggcaaaaggaaatatttattgagaaaaatagagaaatgaataattaaggacatcccacttgggctatttgctccccgcgaaaaagtcttcaacttgatcaaagcatgagtattgttacacccctcctaacatagtattagtatggctctagattcatattacaagccgtatcttttgaaattacacaaggacaaataatcaaaatttgaaaccatttttttttatttattatcatctcttcatgcagtgtttgttcttttaggaatccaatatagggtttgtttggttaccaaatgtattgtgaataaaacaaccttaagtgtttggagagttataatttttaaaatagtgtaagatgaaaaaaaaaaaaaaaaaatcaatggtaaacgaatacttaaaatgctattaaataaataaataatatcatatttattatatttcattaattagaacaaaatgacatatactaaataaaattcaatgtaaaaatatttaattaaatatgttaaaattatataatacacatttttataaaatactaataaaatgattatcaacaatttttttttcttttatattttgatatagttagtattgttaagattctaattataataataatgatattataatctagtttatactgcatagttttttttttcttatttatagtaattgtaatctagtatatattttataataattatataatctaattaaaagaaaatttatactttttaaacaaaataaaaaaaaaaatgaaacaatatttattttagggacttttttatt

SEQ ID NO: 113706 - DNA, 6548 bp, Cannabis sativa
atagaaaatttatagaagtttgatattatcaaactaaaaatattatacattttttgagtaaataacataattcattttatgttgttgataggttattattatttagttaatgttgggtacaccaatggtcaaggttttcttgcaccttttagaaggacacgatatcaccttaatgattggaatggacaccttccaaacatagcagaatagttctttaatatgaagcactcaagtgctaggaatgtaattgagcgttgttttggattattgaaatgcgatgggctattctcagaagtccatccttttatgatatgaaaacacaacgacgtataatttctgtgttgttgtatgttgtataattttattcaaagagaaatgagcattgatccaatggaaaatggatgaacagtgtattaggaaatcatcccacaacagataataattatatcaataatatcgagtccttagatttatggactacttggagacaaaatttggcagaagaaatgtggaacacgtggctagcaaatagatgattagaatactagtatttatattttaataattttaattatgatttgatgtatgaaagacatatgcttatgtgtttgctttagtaacttttttttgtttcttaaaattaatttatgagtattttaagtctttaaatttatgctttgatgtgcttatgcatggataaatttatgattttatttttataatgagaaattttaaatgaatgtacagaatgagttcaaactctaatgttgatcaaagaggaagagataaaaataaacattattggaccctagaacaagatattgcattgatcgagtgccttctagagttgagtcgaaatcctacatggcgagctgattgtggatttgaaaatggttattcgcaacaaatggagagtatgctagttgatatgtctagttgatatcataatgcaagttttgatctatttacactaagacggtcccgagaactgaaaccctagttaagaatgtcaacttgggcggcgggtgaaaccctagatgcccaagttaactttcgcgttgtaggttcgtgtaatttcagctcacggggcttgcattaggttgtttcatgtcttcatggtacataatactaaaacatagcgagtcagatacaagatattaaagtccgaacttccattccggagctcccaaagtcaacctaggcgtaaggctagggtcccctcccaggccgactactatgactcggatctactctactccgtgatgttatccttattgccacgtgttaaaaattgatgtcacgtcaccagtgtgaaagtagatgtgcgcaatggctgacgtgggtaggtaaaccaaccacaatggatgtgcaacgggccacgtggaacaacgaatgttcgacgacgagaaagttactgatggctccgacaacttcgtggtggtggtgttttggagtttggttgatgagagagagatagagagagaattaattggggtgtttgctgttagaagtgtaaaattagtataacatataaaattttaatgcatattggtattatattatttgaggggatttgtttgttatggggttaacatttaagtatgataagtgaaattttctctcctgatacctaaattaactacaaatttaaaagcaatttaatataattttttttaaaaaaatatatttaatcaaaaaaattataacaaaaattattatagaatttaactattcatacaaaataaaattaatataatattaatctaagtaaaataaaataataattaaaataatttataaataaataaaattatttaaatattttttttttttgtaagaataaattatttaaatatttgaatcattgttagttaatttcctgtattgaattatagtatctttgcaatttcaataataacaattccaaaaaaatgaatattaaaaatattatggtgttattgctatgacatttatggtttttaaacataatgtggttctaaagatcacatcaccagatgagatctttaaagtctgtaccttctgcatgatgacgattgattaaaaaccgtgataaaaacctagaaagggttctaatacgtacacacaaaaattgtaatacctggatgaatacattcttatagataacttttacgccaatattatgagaatttgagaagttaagaacagtgactaagggctcgtttagtactattttattgtatttatagtattgagttggattattacgttaggtattgacttttattaattgattatgtaataattatactattttcactataaactcgacctcaaccccgaccttggactaggaccccaagtttgaggccgcgttccaatattggacccgaggccgagtcaaggtctaggatttagagtcaggtttgaattcgaagtccgtgtttggggcaggtccccaaccccgtaccctttatatatattataatacaaactaatactgatcatttgttaagtattaaataataaaattcacactgtataaaatttatagttgtaataattaatacaatagaaaattttatccaaacatagtgttctttcttatttaataaacgacccttacacgtttagaatccttctaaacgagtccttaataaaatgtttacgggtccttaatgaaatatttagtagcgttcaaaaccagccatttataatatctagatcaacttaaataactggatgttccagccacagttttctttcatatttaaatataaaaaaaaattaaacaacaacaaactagtcatctaacaaaactgaatacaactctgaagtacaaagaattaaactaaaggaaaagaatctcgacttacacaatgagcttcaaggccagttatctatttaccatttacatattcaagtaggcgccgatcaagttcaaaatatctggaaagaaatctctgcagcataaacaaaaattaatattaacaaaggcaaaaacaagtgctagtatttaatacgtagtttgtactcatacctttgttatggtaggatgataacctttgtgctccaaaacaaaatctggaaaacgagcaactgcagttgcattctcaaacaagatgtacgtgggaagctgatccatgctccctataaatacatagtcatcctactacaattacttttattattactataaataaaaataagtgtgaatttgaaaagattaaagaaaaaaaaaagcttagttcttcatagtttatcaccaagaaatagtccaaacttttctgcagcatttgggaatactccaaggtcaaccattgcaaaagataaatttttgtttgagtatctgcggcagagaaacataagcgatcatgaacctcacgagagttataaagttggtaacactaataatcaataagagctttttataaagatgatagacattagacaagaagcatacgtaattgagagctcaggaaagaaccgacttgtgcgtatgcaatcagatgaataggaggaacgcaactctacctatcaaattaagagtgtcactcaaatgttcagcataatgtgaaataaattaaagatattgccagcaagccaactattttaattctcaatctaaaaatttgtgagacttgagtttaagattgtaattccagggacctaaaatccagcacagtaattggtattaggctgaaataaatgtgagtttcgttctgtttccttttgaatgaggtcgagggtaggtttgaactaatgtatatattttggtatgaagatagataggactagcctcaagggaagtataatatgggataacattgactgcaattacacaaatgagtaaagggatgcaaaaaataagaaaatctattagatgtactatgtgttgaataatttcggtaccattttgttattttcctaggaaattattgcagcacaaattaacagtcgaagtgtgtatttaatgataacaaaaagtcagaaaatctattaaactaaccagccaaaatcttgacgtgttcccttcagttaacaaggcttctagctgtagaggtgttaatttactagaagtacctggaataaacgaatagacttctaagtacagaaaatttatcatcatttggtacaaggaagaaaagttctgaagagaaagtaaataagacaaaaatagtattaaattgaaaaaattatactattaaaactcgtgtttacatcatacctgatccttggaaagcaggttgttgtgttaaaatatacataactacaaaaagaaatgataacaggttaaaactgaataaaaaaaatggaatttccacttccaccaatcgaaaaacaatcagccatgaaataatccatggatatttaacagcctccttccaaacaacttaactgtacagaaaaccttaattttagcttttctcatttcaaaggttcaacaggatgatgaaattactattacaaagatgaaacagagaaactttatcatattaatcacaagtatattacttccgtaaatatacaagcctaaatcatacagtataaataagttttctgtcaacgattattatgacatatgttgccttaaaggaaacctgaaacaagagataaaataatgcctacctgaaaaggcaacaatgtaccaaagggccagattataatccatcattaatgcaagaggaacgagaaaaatctgtatgataaatacaaatttagaaatcagaaaggagacataatccagatctaatatttcaaaagaaataagtttgttagatttttgtccttaactttgaaattagcagtattttttaggcaatttagcttttcacataattcggcattttattttttctgaactttataaaggaattcttttaagaccaatctgtattagttagtattattaccttttataatgaatcattggttttgataagcaaagcctggtatcttaggtattaatttaaagaaaaaaaaaaaaaaaataaagcttatacttcgaaaagcatctgaaggcttatgcctcgccttccagacaaaacaactaacaaactaaccattttaactagtgcttaaaattaatcacagtccttaaaaacgatcagtttagcaagttagcaatagcagtagcctttacaaataatctgcccagaatctaaaagacatatcacgaaaattctaatatacactaatagccatttgatttcttagtttgtacccgacaaaagttacaaacaatcaacataaggaaacagcattcattgagtttacctttgcaaaaaacagagtatcgccaataaacccttcccaggtttcttctctaaccatctgttgcaataggagggaaaagttttatcaaacacttgcagctaattattcaatattgttagataactaaataaaacagtaattcttcttcaattcacaaaacattcatgaacatgacaagcttcttttaataaattttgactatgattgtcacctgggagaaacaaaagaaaactagatttattattagaaataattggcaaaacgttttctcacgtcggcgtatttggcactgatgcaaaatagagtctgcctaaaaattcgattaaacgtttagaccaaatgtctgaatttctaaaaaaaaattgctttctagagtgtttgaggctttttttttttgcaaagaacgtcgaaagtaggctgcaaaaagagttaaacaaacgagaggtcattttgccaaatagtattatagtccaattgtgcattatcagaaatgaattcttatcaatacaatcgatggatcgtttactttattaacgtatattttacaaagatatatttcgatcagtcataaccacttgggcaaaagttcaaaaacaaaatgatttgatttgcattgattcaatgaaaaggaaaacaagatctgagaaggcaaagggtacacatccagaatcaagattacgaagaatgaagctcataccttgatagcagttaaaacgccaaaggccaaaaccgcttgaatttcctgagaaggacaattcatagttaatttaataacaaacatacataatttggagaatcgaagagatggggagatgagattactcgataaatgaggcgattggcgaatgtaggactgagtactgagactgaagatgtacggataacgaagtaagaaaagaaagcgaggaaatggtacatgtaatagggctcggtgaatattaagttgagccaatgcgccgctttactgcgctcaccctccattgttgtctctcgatccgaatcaccttctagggttccaagaccaagagtgactttatttcccaccaaagttgatctagattctaaaactaaacgatggaaactgaaatgacatagtaattctcatgtctagcgaactaaggatttaatcaaaattaatattatcattataaatagaaatttttatatcaaaaatctaatttacaccttttattacaaaaaaaaaccctacacgcctacatcaacttttttacttaccatgtttgttttattacaaaaataccacttagtcatcattccatgcacagacacgt

SEQ ID NO: 113707 - DNA, 4395 bp, Cannabis sativa
  modified_base (648)..(656): a, c, t, g, unknown or other
  modified_base (867)..(873): a, c, t, g, unknown or other
taatgtttgaagaagagaactgacataccatccggacccggagccttcaagcttcccatagagaacaatgtttgtctaatttcctcgtggcctgggatcgcctcaagcttagactgctccaaaggggagagatgatcgtggattaagtagtctaggctttcgagagggccctgaggcgggtttttgaaaatgtcacccagaaaactagaaaactcattaccaatctcttctttattagttatccacacaccatccttgttcaagatactatccaccgagtttcttctatttttattattgaactatatatatatatatattaaatttattagttttaatcattccttgctaatatggtatttgttggcatggtgtggcatgctaagggtcagtttggcacaactgtgatgtgggaaaaatcagttgtagttgtgctatgagaaaaaacagatgtagcaaaattgtgctaaaaagctgagcagaatatttggtaaattataaattttaaagtactgtgagttgttaagatctattataatgataatgtaattataatctagtttattataatcacaaatatgtaaaaatttattttatataatattttatttttatatatttttaatttttttttcaaatataaatttnnnnnnnnntgataaaaataatttatagtatttatttattatgttttatcaaatgtataaaaaattagaaacgcaagtatataagaaaagttctaggttgataaattctaaacctagaaaatctgagaaaagttctaggttgattttgtttgttaatattaaaataaaatataaattgttttttttttaaaaaaaaagagatttaataattatttatttnnnnnnnattagtttattttaatttttttatgtaataaacaagtaaatatggttttagtacaaaaaaaattattatagtcttttaataaaaacaactttttctaaaagtgttgagttggtgcagcttcagcttttagctgtaacttctccaaaattcttcaaaaagttattttttgactatttaccaaacacatttttatcacaactttttcaaaaaatagcttttagttttttcaaaagttgtgtcaaacgggtcctaagtcaatattatgtcctaaaatttagtgggttataaaaaaatatatttttgagtctttatttaaagtaaaatgtaatattttttaaaatcagtaaaaaaaattgtatattatagttatgtaagacatcttataaaattttaagaaattcgaaaatatttaaaacgccaaaacataattcaaacagcatgttgcatgcatgactattttattttacatgtgtgagatagtctgtttcgacactcttttttatattataaattatttcgaatttctcaaaattttgtaaggtattttaaataactataacttatataaaaaaaaatagactaaaaatcattctcgatatcgaaataagtaaatagtgcatcaatacattcattgtagaagtctaaatttattaatgggtggcgaaattattaagtttgagaattgatatttcccaataaaatggaaacggcaaaacccatagccaattacccaacatatttgtaggctaccattaatccctcttcaacgcaattcacgtacatagggtttagggatgtcttgtcaataaaaataaaatgatttcaacaaaatttattcacaaaatttgctctccaccacttcaagtaaaatcttcataatttaaaacatttctttacacacttttataaagaatttaaggacaaacttattcactaataaagaatttcaaaaactctacaatagacacccttcaaatagacacccaaaaatatgtgttgtcattggttctaaatgtcttagtggggccagattttagtggtctttgatgtactagacttttcctctatcaaataagggtgcattggtgtgagttttatttgattggtcaacatagggctagagctctcttatgtcttttttttattaatggaatgcagtttttatttgtcttctccgactacggcaagcatattggttggcctaaatcaagctgatcttcaccattggtggtggtatccgaaaaagttgatctccgaaagattttagactgctcgtttcatcgtttgtgaataaatcttttaagaaccatggtggtgagacactctactttgggtgtaaatcctatttttatattagtatgatattgtctgtttctggcttaagtgtagtgagtttgtttttgaattctagtcaaatggcctcataacaatggagacattgtctatatgatctttttcatttttaaccaatgtaagactttaattggacacccactcatcataacgaaaaagattcaaaaaccaacttatatatatatcataaaatgtagttgaaaactctatttttttaaacccgaaagatataatataacaaggttatgattattataatcttgtgtaatgttcttttttacgttatcactcttaaattagtaaaagatattatgaattatatttgaatatattgagaaattcaagatattcaatataaatataaaattaacaagattacaacggctgaataataaagaacacttgtaatgaagattaaataatattacaatttatttcaaaaaatacatataaagtatagaaaaggaaataaaaaggagaatcacaactcgtggcaatgtgcaacaagtacacaaagtaaattgcacaaaatataaagtgatgtgagagccagacttaaatttgaacaagactacctttgttgaaaaatttatttcctcctaccacaaacacttatggaagaaaagaagagaaaataactttatagatttatcaaacttaaaatatttttaacaagatactctttgatagattactaagttgtcaaaaaattaaccccataagtctatattttatagcgtttatagttaaatgagtgttatccgcacataaatgagtgttttaaaggttatggatgttgagaataaaactaagattgaaactgattaaaggtatgtttggtaggaaggttggagagtataatggatggatagattaaaaatgataaagaggggaaggagaggcttcccttaatattgtttggtattagatatgaagtgagaaggatggaaagaaagttaagtagtaaagtacaatattatactttggaataacaacatatattaccttttaagggataattttttaatttgcacattttattttgtctttttcttcaatcctctcaaaattgtaggaatttaattttagaagtttggagagagaaggtatccctccatctctcctctccttcactctctctcttgttaaacaagttattcaacaaggaaaatttcatttaatatacataaaaaaaattcctatttcaaaaaatatccaattaaatattttatacaatactattttactaacttcccactttacccaaaatacccttattatttatttttatttttttgacgtagtgattagaatcacacataaatttacgatgcagatatccgcaaaccgcgcaaatataaaaataacttaaaattaaaatattacactttaattattattcaataaactaattattatccaaaacataacttaaaattcataaaaaaaaaatactagtaatatactaaaaaatgcaaatataaattataaattataaatattactagaaatataaaataaaatactaaacgggtccctgtcggggcagggagtgtgatccccatccctcccctttttaatattcggggacaaaaagtaatttccgtccccatggaggaaatgtgcatccttagttattaatcttttatgttaattttgggaaattttttttttttttttgaaaaatgtcatttttccttattcccaaatttatcatatatccaataattaattaagtccatggcccaccaattaaaatttaacctaagcccaaaatgaaaaaaaaatctcctcaaagtgcttatgttcctactttattcaaaattatggcgtttttgaaaaagttgagctttggacccaaaaattcattgaaatttttttaataatatacttaaatataaactatttgcaaaaatactttaataaatctcaattataataatactttttcacgtcattaaaaaattccttaattttaaaataatatgcttgaaacgaaattaatcccaaactctatttttttaattatattcttaggttttcaaaagtgacattttggttacttatgatgctaataaaaaattaattaattacttacgtaaaaactaatttataagggttaatttcacaaatgcacaaaaaatacacaaaaacaacaaaaatacggtt

SEQ ID NO: 113708 - DNA, 2589 bp, Cannabis sativa
  modified_base (28)..(47): a, c, t, g, unknown or other
  modified_base (103)..(106): a, c, t, g, unknown or other
aagcaattgataaggtgaaccaaaacannnnnnnnnnnnnnnnnnnnacttttgtttctttattgatgttgaataaaatatattacattgaaatggagttttnnnnagggcataaaacctaacatatacaactataaagttatgccattcagactcaagaatgctagggccacctaccaaaggttagtcaacaagatattcaaggattagattgggcgtaatagggaggtatatgtggatgacatggtcatatcaaatttataaaggctgggggcatatagaggatctagatgaatgcttcaaaatcctcaaaaaatacaatatgaaattcaatctcttaaagtgttcctttgaggcaagcttgggtaagtttcttagattcattgttaatgctctaggaatagaagctaatccagagaaaattcaagcccttctagataaaaattcgccaacaaaagtgaatgaagtgcaaagtctaattggccagatagtcacactaagcagatacatctcgaaatcaatggacaagtgtgttcctttctttaacatcctccaaggcaacaagaaatttgagcggacagaggaatgtgagaatgcttttcaagagctaataaagaaactcgcaaaaccccacatcctctcaaaacctctggatagggaaaaattagcaattgatctggcagtaactgaatacgctgtaaatgtcgtattgattaggtagaaaaataatgttcaacatcaagtctactatgtcaccacaagactaattgaggctgataccttctaattgagaaattgatctattgtttgatcctagccacgaggaagttaaggtcgtacttccaagctcatccagtcaaggattacaccgaccaacccttacaccaagttttataaaagccaaacgcttctagttgacttctcaagtgggcgattgagttagagtagtatgaaataacctatcaaccacgcacaatggtaaagggacaagctttggaagattttgtagttgaatgtacgggcaaggaggcaagaaactcaaaataaaacactgaatcagaaagggagcaagaaaaaccacccccaccaaaagaaaacattgaaggtaaatagatttggaagttacaaatggacatatcgtctactgatcaattggtcggagctcgaattgctcttatcacgcctgggaggcaacccctatacggagcaatcaagttcgggttcacagcatccaataatgaagcagaatacgaagcacttatcgtcaaactaaaacttgctcaggaggtatgtgctgaatatctggaaattcacagtgactcccaattggtggtaaattatattcttggggaatatatagctcgggagataaaatgatggcatatctaagtaaaacctaagattttctcacacaacttaaaggatacaccatcaaggaaattccaagggaagaaaatgcaatagccaaagcactgacacgactgtcaagcaacacaattatagataaagcaaaccttgtcccaatctagtttcttaaacatcccaacatcacttgtatggaggaatttgagatggtggacaccacaccaaactggatgactcccataacaacttatcttaggtttagagaacttttgaacaacaggagtgaggctcgaaaaataataaagaaaactgctcgatatttaatagtggacggtgtgatgtacagaagaggcttatccatgtcatttctaagatgtgtcacaaaccaagaagctgcacgactcatgtctgaagtacacgaaggcttttgtggcaatcatgctaggtggcaaagtttatccaagaaaatactaaggcagggttacttctggccaacaatgattgaagattcaaaggcttatgtgaaaaatgtgacaaatgccaaagcttttccgaaatcccccttgcaccaaaaaacgagttgatgtagatgcagagcccatgggcctttgctatatgggaaataaaattgatcaggcagctacctaaaggaaaaggaggaatgccgtattcaatagtggttgttgattaattccccaagtggacgaaagctgaaccattgacaaccatcacttctaagaaagttttgaattttgtggtaaaaaaaattatatgttggcacagacttcctcaaaagattgttttagataataaaaaataatttgacagccagatgttcaccgacttctacacgacacatggaattataaagagcttctcgatagtcacacatccccaagaaaatggacagtcgaagtagtcaataagacattgaaagagactatgaaaaaatgacttgaagaagccaagtgtaactggtcgaaggaattacccaaagtactttggttgtacataacaactaagtagacaacaatcgggtaaactccttttgcaatggcctacgactatgaggtaattctaccctttgagttagaaccttcatcccacagaagattgatgtacaatcaagagtcaaaccatgccctcctagcaaaatcactttatgaagttgattgtttaacgcccaaaatgtgacttccactagcggtggttgtagtatagatc

SEQ ID NO: 113709 - DNA, 3339 bp, Cannabis sativa
gagcaacatccacattcaatttgtgctctcctagaagcattagggaacaacttgaggggtccctagatgaagaattactcttgctagcctcagttttcaactttacagcagaaattttttcagaatggagagattgagcatccttgtaatcctgcagaaaagcttttgtaaaatcttctacatctgagaaaatgttaacatttttattaaaaagagaatcattcttttctgaccaaatcaaccagataatgcttaggaaaagaataaagtcctcattatcaaaagtatcaaaaccactcagaaaaaattcttttatatcacaatatttatttttgttatagaattgatgaaaggaagtattcttccacataatttaagcttagaacagactataaaggcatgagtaatagtttcatctttgctccttcagaaggaacagatagggctttctataattcctctcctaaacagattaaaagcacacgacaaaacatgattaaaagccttccaaataaagtgtttgatcttagaaggaatcttgatagtccacaccaactttcaccaaggtttaaaacagtcaggaaaggaggaagatggagaacctgaaacagagcaagagttagcaaaatgataagctgaatcgactgtgaattttcctgatggatgatgcccctaaatgaggcaatcatccctaaatggatgtataggaaattggaggagaacatcaacctggtaagatggaagatagtgctgaagcctactaagattccaactcccatcagcatcaataaaaaaaagagacaatgttattaagagagaaaacatcatgcaaaaaagtaagagaattcaaacctggaatctagcgagagtcacccaaagagatagaattatcattcccactctccaaattagccccttcaaaagaagcttccttccccaaagtagactcctccaagtgatagaagaacaatgtcccttaagagcgctaagaaaattattatcaagaaaattattatctttgaaatacctcgctttgaacaaacaagaaagaagcgagattgggtttgaccaaactctccaagccttcttagcaagcagaacttggttatgattagttatagattgaaacccaagccccccaaaaaattatgaaacacacagactaggccaatttttccaatagaatttatttttgttatttgaggatccccattagaaatttgcaataagtttttgaatactcttaccagtatagcttgacagtttaaaacatgacatggcatatgaaagaatagcttggactaccgtttcgataagagtttctttaccagctcttgaaaaaaaaaacttagcattccacacattcatttttgaagagacattttggaccaggtaatggaaaacagagttgtcaaccctaccaacacactgtggagcccccaaatatctgctaacaaaccctcattggtaagccccagatggttacaaaaactttctttagccacatgattaatattgggggaaaacaaaatagaagacttagcaaaattaaccgactgaccagtggcacgattataagtatctaaaatacttctgatagcgaagctaatgttctcattaaaaggggaaaacaaaatactgtcatcatcaaaaagtaaatgtgagataacaggggcatttctatagatagcaaggccagaaaattctctagccaactctttaacacgaatggcagtagaaagcccctcaaccaccaacagaaataaataagaggataagggatctccttgcctaatcctcctggtagagttaaaaccttcagaaagataaccattaaccaaaattttaaaagagatcgaggagacacatctaagcacaagggagacaaacctagaaggaaaaccaaaatgcttgagaatggcttcgacaaagctccactcaactctgtcaaaagccttctccatgttgagtttcaaagaagcccatcccagcttacctttcttcctacaattaatggcattaacaatttcattaacaataaaaatattattaaaaaatcaacctatcaaacaggaaagtactttggttgctagaaatgatagaattaaggacaagcttaattctatttgctaaaaccttagcaaccaccttgtaaatggtagaacagaggatgatgggtctgaaatccctaattctagaagcatttttttcttagggataagaacattaactgtatcattaatacgagagatatctgagttatcattaaggacaaccaaaatggctttacaaaaatcaaaaccgagagcagtctgatttttctggtagaagaaagcattcaaaccgtccaaacatggagccttgttcccaaagagatgaaataaagcctccgtgatctcatcctcagtgaaggggttatcaagtaaggagacttgagaaggagaaatacaacaattgacaccagcaaggacataaaaaataatcacatagtcacatccttgagtggaaaacaaagaagtataaaaattaataaaatgtgaaacaatagtagaagttctcctaacaataaaaccatcctcaagagtaatagatctaatgaaattgatctttcttctagcagaaacctagtgatcaaaaaacttagtgtgtttatctccaactttaagctagtcaactctcgacctttgcttccaaaagatctcatctttataaagcaaagtatcaagagaagcctataaagccttggctctcacaacatcattgtcacttaaaatgctggagttataactcctatcaaagtctttttgggtggtcgtgatgtgattcccggcagtaccattgttactacttcaagacttaatattattaatgcaggccctttgcttattcataaaatactcaagactattaaccatattctcatcaccattagtacatcaagaagagctaacaatatcataaaatttggcatctgcgagccaatggttctcaaagataaagtgtttcttcccattaaggcccctaagatcatcctcaaaaataatcttaagagccctatggtcttaaccataaaaggggagatgcaacaaagaagccataggataaatatccccctaggtatttgtaaagatcgcttaactttaatttagaaattagcatataaataagatttaattatgaaacttgcatattagttatgaattattatttaacggagatttatttgaatgtagaatgcattttatatgccatatatgaaattttatattttttgcatgttttgtgcccaatcacatttactatttttagtatagtaggataatatagttagatatcggg

SEQ ID NO: 113710 - DNA, 762 bp, Cannabis sativa
acatgaatgaaatataaaaatattaagcgatatacaaccacataattttatcaaaactaatagtgaaaacaaacaaaataaataggaaacaaatataatcaaagtttattataaaaataaacaaaaagatattataacatgtagactaaatcaaaactaagatgtctaattcattagaaaaaatcaaattaaattagagatttagaaaagtaacaccttatttacttgtgaaaataaaaataataataatataataaagaaaaaaaaaactcactaccttaaactgtggttctctttgttttaagtaaagtttgccctagcttgagcagttgagctcatatatatatttattctgtaatctctttatggtatttatagggatagactttggttgcaatttgatttgaacaagttgagagtattgtgtttgaggtgacttagtgcaattttattgttgaaaatgagataattagtagagagagtagtgggtgtcggctggtccatgttcatgcattgctagaggtttgtgcaaagtgaaaaaggaggtcaatactatgctcttcttcacatgtggcttttgtaagacaatatatattatgtctaagtcaaatgctttgaacttgtgtatttgtgggagatgtgtatgaacccattacaattatatagagtgtggttcttaatcctatgtatatatgtaaagtaaaatctctattaatagggcacaagatgataagatactaaaattttagtatcttgctagct

SEQ ID NO: 113711 - DNA, 3961 bp, Cannabis sativa
  modified_base (27)..(28): a, c, t, g, unknown or other
ttatgctgaaataaattagtaggatcnnaatcccacttattacctgattaattcataatatcaatataaaccctaattatttaccatttaacttatcgggatattacagcattcttggaatttcacaacaagaaatcctacaaatatgtcgatgttttatctatggtaaacgtatcaaagttggggaagacccttaacgacaaattttcgcctcacatcttacatctataccatagattgtcggaatatactttgtgagacatatattgtacaaaccttctcgtctttgaattgttaatatcttataaaagcttttacgagagcttctcgagattgttatcttgtgttcttgagggatttgctaatacaatcactgctttgttcattatgaactcttgttatcctcaaaatgaatatttgtgtttgtcttttaattcattggttttactagttttagtcataacgttgactttcccttttataactaaggatagacaatgactatatctaatatattttgaggtgatgttaattgacgttattcttttttataattgagctgatttattatctagctcttgtacacctctcgtgttcatatttctgcttaaattttagacattgcgggccatgatataattttaaggtaaacgggctaactaaaatttataatgaaattttataatagtaactctttttttttaaaaaatatatattacatttttttacgtaaatttcgaatgaaactattatatgaattggaacaatttttataaattaaatataaatttttttcaacattttttttagatggaaaaattatttgtactttaaatgttatatattaatattttatatatatatattttttttaaaatatatataagttcgattaaaatagaccttatacaatataagttttttttacaactaatctatatatataatagaacataaagttcaagggaattagatttaaaaccagatctaccaaataacgaacaaatacttacactaattatactctctaacaattatgtattatatattttttatttctaattttatattatatgttttgaaatttgaagatggcttaaatcttccctacactctatgtaggtccccctataaacataatattagagttactaccagattctaacacataacaccatcaatttcacatatgtatcgaagacacattcaattccataattttttattttttttttattttggacccatgctagttatttttgaaaattattaacaatttaaattaaaaataaaacgcttgttataaaaacgctcaataagtcgcccctttcaaaaaaaaaaaaaaaacccgcgtagtcggtgggtctgtattcgtgtgcgacttaacggcgccgttttactataatttacgggttttgcaagtatttaaggccctaaataggaagttggaaacccttggagtctagattgttcattgatcatcatcaccatccaccaacagcgctgaaagcttcttcccaatctcttcgtctccatcttgcgactgaagaatgattgaggtagtgttgaacgatcgactgggaaagaaggtaaaggttaaatgcaacgaggatgatacgatcggagacctaaagaagctggttgctgcccagaccggaaccagagccgataagattcgaattcagaagtggtacaacatctacaaggatcatattactctcaaggactacgagatccatgatggcatgggtcttgaactttactacaactgattcatccttcttcttccgtaagtcttcctcttctttcttcctaaaagtttttcgcttttgttttcttagatatacgaccctgctattaaattaatttcaattctatattggttgagaaattggtaaaattccatggaaatcatatggctacaatagagattttaggaacatttgagtttatgatgttgaggaaatatattgatttatttttcttttatttgttttttaatttaaaaagaaaaaccttattaattgattaggctagtctgctgtgacaacaagtttttaataataccttgttggaaggaatattaatccaaacacaatactatgagaccaatatgtgttgtgtaattattttacatgattagtaagattggaagtattattaagaaatttggtggcaatttgcgtgaaagttatattgttgagggtaaagatagggtcaacacagtcttaacatcctcagagcttttctatgttttctcaggcaaattgtatatagtttggaagaattttctactgtacagtacatatgacatttgattttttatatagatagcttatgcttggaggtattaaatacttttctagttagagaccaacgatttggggctcaacatgagttctggtttaggttaaatatctcatgcattcactcgacaggtttgttatttttagtgggggaactatgcatttttgagatctagaatcttgtgatttaattatgtgaagttggaaagattaatccagaattttatcgtatcagatttgttttctgctatttaattttttgttgtcaaataatttaactcaatcattcttttacatcttctcttatatttttcaatttcaagtcttatctaatgttacttcttcaaccaaacgtgactgtattttgtaagagctaaacttgactatataagcctgtgatgtagagatggtagacagtttgattgttgtttttttttttttggggtcaattttgagtatttcttcctttcacagggttatacaccaacaccagttgaaggttattaaatggatgagatttcttcatctcaacttatgggaatgaatgtatgggtattattttgacatgacaatatgtataaattgttggttatgtaagtgtagtctgatatggataatacttgtgtccgtgtgtgaagattaactatttagcttatttatgtgctacgtatttatggttaggggtaaagtgaagttctcttttgaattagtctttgcactctattactaacacaaatcttctaaagagatcctctacaaattaatcttctgaaaagattcactgcaaggttaatgaattttgtagtgattgcacaatgaatgtttaaagattaatgatacatgtacacataaatcacaccaacacattttactcaatcatttttatttaagatagttctacttattgtaagtgaccagattgtgttaattttgtggatgatttatatgtacatatattattattctttaaacattcgatgtgcactcataggttggtatttatactcattgctgcttttcaaaatgacgtcttgatcgcataccctctatattagaccatttttagttatatttagtataaaaataattttgtgatatttttacgtatatttgtaaattttaatgtataatttaatatgtcatttaatattttttaataatttattaaaataaaaaataataataatattataaagataaatataaaatttaaaaataaaatagtaattatgcaagtcatttgcaaattagcatgctaattaaaatttagtaataaaatattaaaaatggtataataataagtataaagtataatatttattataatttaaatttagattattttaatttaacacatcaatcttttacaaagtgagcttaatttaaaggaataatgagacttacatatttaaatatttgtagtaaatgatttaattttaattataattaattataatgattttttttactagcaacataatgatttatagcaatgtcttattttaataaagtttgtcacataaggacataagggcatagtcatagttagggtcaaatagaccgtgaacattaaccaaaaactaagtgattataatattggtactgttataaatattaataattatgtggatgtccaaatcttttatttattacca

SEQ ID NO: 113712 - DNA, 2534 bp, Cannabis sativa
  modified_base (68)..(71): a, c, t, g, unknown or other
tgaatgaaaaatacttctgttattttattgatattgaataatctggattacattgaaatagagttttnnnnagggcataaaacccaacagcaccatgggtaattgcccactttattaaagaaaactacacaggagaagggacttgttacaaagtgaaggacataatgagggatgtaaagagagtttatggcatcgagttgagttatgagaaggcatggaggtgcagggagaagacacttatgtatgtgaggggtacgccagaaaattcttatttaaagataccaagttacttgtacatactgcaacaaaagaatccgggtactattactgatattgtggtagaggatgatcggttcaagtactgttttttctcactgggtgcttgtaggaggggattcagtttttgtcgtcctgtgataagtattgacggcacatgcttggagacaaagtatggtggcatcatgttatgtgtcgtgacattggatgcaaacaatcaattatttcctattgcttttggaattgttgacagtgagaataatgattcttggacgtatttcttgctgaagttgaaggaagcgattggagaggttcacaacttagtgtttgtatcaaatggacatcaaagcattgaacatgttatcgatgttgtttttctcgatgcatgccactgtgcatgctatcaccacattgcgatgaatgtggttgacaagttcaagactgacgcatgtaacaagcaaatatggactgtggcttacacattcacgaaggcagattttgataaagaatttcagaaggttagaaagatggatcttgtcattgctgcatatcttgaggatattgggtttgaaaagtgggctcgtccttattgtatgggcgatcgatacaacgtaatgacaagcaacactggcgaaagcataaacattgtgacagaggaagcaaagaaatttctaataactaatttgattaaatttataaggttcaccctgcagacttggtttactgaccattttttaaaggcagataagtgtagcacccctttaactgaaatttttgagggagacttggcactaaaacttaccgatgctaagtttttgaacgtccaacataatggatccgatgtgtacaatgttggtaggtgtcctaatggtaaaagaggtggtgatgtcaatttggtagaaaaaacatgcacgtgcggtttgtttcaaatgatcaaaattccttgtcctcatgcatgtgctacagcaatagagatgaatatgagtgtgtacgcactttgctccccgtattacacaaaagaaacatggaagaacacttacgatgcaacaattaaccttgttggcgatgaagacgattgggtactcccggaacacatcaaaaatatgagagttggggtccctgtcaagaaaaatcccataggccgacctaagaaacacaaagcgggaagacaaaagacaaaggtgaagtctcgcaattgtagtaactgtgggggtacaggccacaacaaagctacatgcaaagtcgagtaagtcgagttagtttattagataactaaattttactaaacaagatctactatgttttttagattcattttaacaaatccatttgacataatttcctgtggattaacatattctatattggatctgtaatagataactccttcacataatcaatcttttagtgactttttcattacttttttcttttccctttttcatctcagcaacatcttatattcagtgtaaaaagtcattaataatcagctcttgatgtgtcaagagttttgttggtggagattaatgtaactataggtttcactcaatattgttttaagaacagctttattgataccaatttttctttaagatctctggtgagggttttaactctgttcttgactgctatttgttacgttaatgagataataaattctgtttcttacagagacgatatgggtgtggagcaatgttatggtaggaggtgtcctccttcacttgaggtcactccgcaagttcgagcaaatcggtgattggatcaaggccttgcttgaagaagcaaacaatgagagaatgcacctaatgaaaatggtggaattggttcagcctaaatggtacgagaggctactgtttctagccgtatcgtgttaatttatagtaggggtgttcgcggtgcgagtggtatggttttgaactattttttcaaaccaacccgcacatgcggttttttcaatttcccaaactgccaaccgcaccgtgaaactaagaaaaccaacaaaaaatggtgcgatgtggtgcggtgcgatttttgcagtttggactatcaccaaataattaaactatcacaaatttaacaaagcttgagcaacacttgtcaaaaatactataatataatatgaaaaaaaaagtttcaacaatacaataattactgggatttaggttcgacattcacatattagattaaataaatataaaaatttgtatttttataatgtgcagtgcggtgcagtttgaaccgcatattaataattcaaa

SEQ ID NO: 113713 - DNA, 2236 bp, Cannabis sativa
atttgatgacccaacacacattttatatatacaattgtgaccccaataaattctaacataattaacactcatcttcaaaagatggtcattaagttccaaatgtatattcttggacttgagattaacactcagacttatatttatcttatcctgaacagtttgactcatgatttctattaatacaaagaagagaacaattttggatattcttcttcaagaggtacaagactatcaagatttgcttgaaggtcatcataatcctccagtgattattgctggtgcaaatattgaaaattctattgtccttaatgacaatggtgaacataacgctgatgatttagttgctaataagaataataatttgaatatttctgaggatgatgataaatctcctaataatagtaatactactgcagctagtcttgctgcttcctcacactacaagagtaaagattatgttagtataagcaaagcagtaacataacaattaaattttggggtgtccctcataaaattccaagaaactaatgcacatgtttttactataaaggaaagggacacatcaaaagaaagtgtcctaagtttttggcccataagaacaaatgtaaggtttcataatcttttattttagaagcatgtgttttgagcagtaaatataaatacgacacgtgtataggaatttgacaataaataagcttgcatattaaaaaattgatgtactatttaatgcatctcaggaagtactaatataatttagaatttaggtcttaccttttaaaataagattaagtcaaaaatattgattgaaatgagcaagacaagaggcctataccttctcgggaaaaattgagcctaaagtatcaacacaaactcgtatcattataatatgaacgtagcaagaagaagaaagctaagcaagtggtaggatttagtgctttaatcacaagaagcacaagagatacaatttgaaaaaacttacttgcaaagattgtacaaaactgatcaaaaacctcatttaaagcaaactctacagatataatttttaacgaaccaatctttttgtacaaagcatttgcgcgaaatacgctaactcatctgtgttatttgcgaggagtacaaatattgaacaaaaggatgggccaataaataaccattcaagataagatcaaatatagtggttattaaatgtatcatttaaatttaggcagttattcattatattcccacatgtaaaaactatatgaaatgtagagaatgaccatgtttcataagaaaaattgtcatttagataagatcacaagaaaataactatcatatctaatccctataaatagtggtagaaatcattgtagaaggatggtcaataattcaaatacttagagaattctatccaatcttatatcctgtaaatagtaactcagaaaataaaagtgattcgtagagtatgtagaattttaactataaaactatgttaaagattctttgtctatatctaatattcgttaagtttcattcaatacctcaatgttgattaattagcataagtcttcatttaatgttgacgaatttctgagttaatagtttgcatttaatatttattaagtttcatttaatacctcaatgctaattaattgtcaaaaggtttcacttttaatgttaacgaatttctaaattaacaatttagtgctttcattgagagcctcttgaaaattaacctgtagaaaacacatctcctccgaatattgctaatattttcccgccatggaaaatacttcccaaaatgacaatgatgaacaagaagagacggtgcactgccctggaaaagagcctcagggggctcaccctccaaagggccagaatgttggaaaaggtccaattgaatggggtttcgaaatgaacaaaaatgaagaacaaattccagaaaggggaaatcgtggagcctatgaccccactcattatgttcctctggtagaactggataatccacatcttcagtaaagattagccaactcaaaccgaaggaatgcagaattggaaagcgaggttgtaaaaggcagggcgactggagatgatgtacccctaacacaaattgatccgcctataaggcattgacgagggaggcctcatgggtctaggactaagaggaatgcaaatgcccctgttgttaggttataattaacctatatttcgggtctttaaagttagcattatctcgtctattggtgtcttttggagc

SEQ ID NO: 113714 - DNA, 1574 bp, Cannabis sativa
gccatctcaacttattgtcaaactgttattttcttaataatttgatttttaaatattataagactaaaagaaggataataatattttggtcgtgtccctatacgggaaactattgactattttcctatgattaaattgtggcataaccctaatacttttaatttgttaataattaacccctaaaactcaaattttcttttcacactctctttctcctctctctctctctctttcttcttcatctactgactaccaccaccaccatcatccaccacccaccatggtttacaattatcttttttcttttcttttttactttttttcagatctattttttcttcgttgagaacgaaagaagaatggagctttggggttcttggtcattcatggcttcgttttctcactgatgtcgttaaatgaccaagcttttttgggacataggcaatgaaaagtaaattctttagagaatttgagatcaaagatctaagagagatgaagtaaatttttggctatgaaagtagcacagtctagacaagggattgttatctcacagagaaaatatattctcgacctactaaaagatactggaatgagtgaatgttgccatgaagatacccatattgatctgaacaaaaactttgtgatattcagcaaggcaaactcgtggatgttcaacaataccagtgattggtggtaatacctgtctcacactcgtcctgatattgcatttgttgtgagtatggtgagtcattttatgtatcacatatagaaaatctacttttgggtattatacttatgtatggggtaattttgtgacttggagaagcaaaaaataaaatgtggttgcaagaagtagtgcagaagatgagtatagagcaatggctaacagggtgtgtgagcttttatggataaaacatgtgcttacagagttgaagttgcaatttagtctacatatgaagttattttgtgataataaggcaacaataagtaatgctcacaaacatgcacaacatcacataacaagcatatagaaatcgattaacactttataaaagaaaatatagaagaaggagaagaagacgataaaaaaaaaattaacaacttagagaaataaaggccttaaaaatagaaactgactaacaattaattcttagatttatggtaacaacctaagaccaactttacacaatttaattcacatctagaatgtgtaacagaggcatttctgagtttctataactcattatttggaagaaaaatggaagggggaaggttgtcaagtgttctctcatcaaaacaattcctatcatttcaaattatcatttcaatacattgataaggatgtgaagaatgcaactttggagattcttgggaacaaattacccgctccaaatagatttagtagctttttctattaggataattgggaagtggttggcaaggatattggtgaagttgtgttttccttcttacaatcaaagaagttgctcgaagagatcaatgcaacaacactatgttggaatttattttaccatgatcttagttctacccacaagtatgttgtttaacaccct

SEQ ID NO: 113715 - DNA, 1217 bp, Cannabis sativa
tctctctctctctctctcatgccgcgtttggaaagcgagaaagttctagaaaattaagcttaaacacaacaaaggtgggagggaaaaagaaagaggatttatccgattggttgctgtgccaaagatttggtttttatttttggggtgaggtttcgacatttgttgctccaacagtgattttgagtggttttgggggtgaagggaattttatgccattctgattcaattgtcggtatggggatgaaacgcatttggttttgaggcctctgatcgtcagatcatggccttaaagcggtgtctttggatcgattctttgtggatctttcataccctgaaagctatcctccacattcgttgtttcttctaagcagtacaaagaagaaagaaaaaaacctaattcgagtcgatccggatcgttgtttccggagatggccgctcaaagatcagctgttcattcttctttacacattgaatctgcgtttagctcacctgcgtcgcgaacggggaatgcagcaaattctattcaagaagtgagtcttgctgatcggggcacgaagcatgtcaggtatgggtcgagagccgctgattcggaaatgttcagtatttcacaaagagagatcattgatgaagattcgaggttgatctatttaaatgatcctgggaagaccaatgaaaggtttgagttttgtacgaattcgattaggacaggaaagtattcaatcctcacatttctacccagaaatttgtttgaacagtttcatagagtcgcatacatatactttcttgtgatagctgtgctcaatcagctaccccaattggccgtttttggccggggagcttctataatgcctttagcatttgttttgctagttactacagttaaggatgcatatgaagattataggcgacatcggtctgatcgaattgagaacaatcggttagctttagttttaattaataatcatttccaaccaaagaaatggaaggatattcaagttggagaaatcatcaaagttctggccaatgaaactatcccttgtgatatggttctgctttcaactagtgatccaagtggggtcgcatatgtgcagacaatcaatttggatggggagtcgaatttgaagactcggtatgcaaaacaagaaacactctcgaagtatccagaggaggagaaggttgaaggggtgattagatgtgagataccgaataggaatata

SEQ ID NO: 113716 - DNA, 3360 bp, Cannabis sativa
atatatatatatatacataactattacctttgggcaagtaattgttaaataaaatataggtcatacatcatatacaataggaaatttgataccacatgttaaaatatttaataactcaagatacaaatatctatataatctacaacacaataataataattatataataaaataatagcaattactttaatttgatagtgcaatactatgaactaagttttcattcttagatctctaaatcagaagtagttttatttatttgattatcaaaagatatacaattgtgattaaaaaatatgtatttatagagttagctacataaccctacttggacttggtcgactcatcaaagatttcagttaattagaaaatttcacacttcgacttcaactaaactttacacatacagatactaatcccatttactattgatgactaataatatgagctaacacaacaaaaaattgttcaattaattcacattttattaaatccaaataaaaaacctaacagtatatgcaaagggtattgagttttgacccttgatgtaatgggttctgaattgtagacaagaggttttggatgtgtggagacacacaatgaaattaaatgaaccatccaatttgagcaaataattgagatgaagatatgatggaaaaaaagaaaaactcaaaagtgttgacaaatggtaatgggtgtgtggggcagcctcatcatatattatttgccttttttttttttttagctttcacgcatggagccaagtgaagttgatgattttgtttttgctgactcaaacaaagtcattattagaaagctatttatgatcatggttgtggaatgttatatctagcatggagtatttatttataattatacatcctcttaaattacaatattatttttctttcaaaaaaaattacaatattatttttgtacactatccaagtgtcggcccgcaagttagtgggcagttgccttgggtccgctctcaaagcttaggccccacattttatatgatgttagaaacatagaatagagatagcaatggcatatacgctatgagtgagagctatacgctatgagtgagagctatacgctatgataggtgttcaatagtgtaaagtctcccttggttttgaccctggtttattttattatagtcttctttgcttctttctgtgcgtgttagtttgttcttggagctgtgcgttgttggttctttgtgcctgtctcttgtctttctgtgagtttggttgttctggttggtggctttgaggactctttttattttgtttgtgtctgtggtgggattgtcggtgtgtagtgtgattggtaagattcgttgggtgagcttttgtgtgcaaaaagttgtctttggtgtttggtgtggttggtaagattctttggtgtgctgttgtttgcaaaaagttgtctttggtcatcttttcagggcatttatggagtcaatcattgtgtctaactcccctcttaaaggcagaagcttctcttgtcttgaaacctcggtcaaacttactccttctgatacttctcttaaggctctgtcctcatgctgcttacttggaaaagtaatagcacccatggtggtggatgaactaaatgtgaatgattttgtaacaaaaagctggaagataccagtttctgtggtggcgttggtggataaggagaggttgtctaatgtctttaagttcggttttgattgtgttgaacataggaactgggcccttgagaacggcccgtggtgcgtccgtgggtattcattggttcttcaagcctggactccgactgttgaaggtccgactgattttaaatttctgcgagtatggattcaaatccacaatctgccccatgagtacttttcaaaggctaacggcagcctgttgggggggttggctggaaaggtggtgaaagtcgatattgaagaagataagccggctacttggaacaagttcctcaaggtgcaggtggatattgatatcgggacacctctgttctcaggttgcttttttgatattgcttcgggagttaagcattgggtccaagttaaatacgaaaaaattggtattttttgttatttctgtggatgtctggggcatcaacgaaggggatgctctctcacttcgccggtgacggtggcgaaccgcgatggaattcctttccccatgttcggcccgtggctctctgtccagtctacctacaatgatgtcttttcgggtccttcatctggtgttctgggtagcccgtcctcggcgagtaggaagaacggaggggccattttatcgttgccggcagccatgggtgacggagctgttggtctgatgagatctgttccccactcctcgcgacgtccgagattgccagtgaaagggactgctcagccttcggctagcctcgggatgcccaagcgtgcggtgtggttccccaagaatcgtcctcagggaggagagaggacagttgctatttcgggctatggaggtaatacggaggccctggatatgggaaagagctctgagtatttacctgttttaaatgtatacaataaggataaaaggaatgatttgaatttgttgaccgttatgggggaaaatgtggaaaatatggagagtgggccttgtgttgttgggcctcacgaaagtaatggtgcaagggccgggcttggtatggagtttaatcatgggccatctaataatgataaaagtaatggtgctttgggtagtgggctgcctttaatttctaataaggctcacgtgggtgggcctgaaatggtgaaagataatgccgaaaccatttgtgctggtagtaaggtgggcccgagtctagtggataattattccaacgttaatggaccggcttctcatgataaggatgggctgggtggtgttagtccttctttgacttatgctatccagggacccggggagaatatgagtgaggaaaaagctttggcccaattttttaatgctcaagaaggcttactacacgatctcaagcattttggaaaacttgatttatatgagattcgaagcattggaggggacatcggggtcccggcttcttctgaagttaatgagagaacgacaccttttaagaagcggaaatttgaagcgtctgcctctctttgttctaggccccataaagtgcctcgcaagtacccagatgttgttcgggacttcccttgggacacaacgaataaagcaaatgaccctgatttggtgattgatgatccctcggaggacagttctagctccccgagctgctctggtatcttaaagaaccctcttgttggttcttttgtgattgatgaatctgtttcgagtgggtctgcttactcccacaacc

SEQ ID NO: 113717 - DNA, 4949 bp, Cannabis sativa
  modified_base (2486)..(2491): a, c, t, g, unknown or other
  modified_base (4917)..(4921): a, c, t, g, unknown or other
tgcaccggatgccgaggtggttccgaggtacaacagcagtggggtttggaaagtgaagctggtcataagccctgagcagctttctgagattctgtcccaggaggctcggactgaggctcttattgagagtgtacggacggtggccaagtgtggtaacggcggcggcgcctcctctgtggctaactccgatcaatgtagtgtgtctagtagttggaagggatcagtcaattgatgtttagatttcataataatcttcattctagctagtagactagtactattaattggcttctttttattttattttaattatgtgtctttatgtagttatttattttcaaacttattttagtatagtgttgttatatacataatttgtgaaatattaattatctaatttatatacgtacgttgaattatatatgttgcaaattaattacaataaataatattacactaactatgttgatatttatttaaataaataataattaattaattataggttttatcataattatatatattttacatattgataattagtttttaaaagttaaatttttgtagcaacaaatattcataaaatatatttgtacttttttttttgaacataaaatatatttatacttatattaagttttaataagcaacttttaggtatttgcaacattttttatgaaggcatgttcccttccataaatataccttttgtcatttatacgtaatagaataaaaatttataattttctgaaaaggaactttacaggaacaaaggcttatatattagcaggataagttgtaactaagggtttgtttggctttcccttggtgaaaatttgttaaggttgcatggttggttgattaatcaactttcttttcttctttataaatgaaaactccttattacaatctcctattatagtatcttaaccatgatttttttttttttacaaaataatattctgacatatattttcaggcacgaaaattgactaattatttaaatttattaaagttttagttgttatgaaaattttaataatcacacttttatgtttaaaaccctttgattagcaaaggttaacacattgattagtaacagatttagtgctcagttagtgagtagttcagttaatgcaatttgtactgttaatactgttagttggtttattggtctttagctttagttagttcagttaaattagttagacttagtttgtctaactttaattatattcattattggttcttgattagttagattactctagttagctcaagtctgttagtatacatgtaattgtcttgtgccaattctgtatacaacttctttattttctgcaatgaaagttttttccttccttcattcttctcttaattcattccgcaatatagtatcagagcgaaaaagataagcttttccttaaagcacctgttcttcttcttccttccttgttgtgtcttcttctatgacaaaggtggtgttctcaatttgtgttcttctttgttcttcttctcatcctggtgtttctaggttccttggagtcttcgtctctagctcagctcaataatgttgaatgatgatcaatttgtccattctaaagttcgatccacaaatccgcaagttccttctgctcaagacaactagaatcttcaagccatcaatccaagaaatcctcttgaagatccaactaatccatattacctttatcatggtgacagtctagggaatactctagtatcttaacttctaattggtcaagacaattatgtgtcttagagtagagcaatgcagcttacaatctcgatcaaggaacaagattgggttcattgatggttctatccctaaacttttaccaaatgcttttcttctatataatgcatgggttagaaataacagtattgttatttcttggattctaaattctatttccaaaaaaaaattcttttagcatttttttatgatgacagtgttgtagcaatttggatcgatcttaaggtgagaattcaccaagaaatggccctcgcatctacaatttgggaaatggtctaataaatctgaggcaagaagctcaaaccgtaagcatgtatttcactaaactgaaaatggtttgagaagaattgtccaattatagaccttcatgtacctcatgtacctatctcatacacacataattgattatccctcacatatacctttcaccactggtaccaaaagttaggattgcgcataaaatatagaaaattgaaaaaactattcaaacagacttgccgaacaccgttggaaccgaaaactgaaaaaatcgctaatggttaaaaccgccattgaactgttggttttttttttcggtaataaaccaaccgaaaaaactgaaaccgaccgttataaatatatatatacattaatttattaagtttttttttttactttatgtattgtaattactaatgatatatcataataatatattattattttattnnnnnnaaagttaaaagaataagataattagtttttgaacaattaatttatatgtttgtagttgtaaaatactaaatagtgtttttatggaatatggatcatattaaaaaaaagaagaagttcagtttgggcagtttgaaccgaccaaactgaggttcaaaacggtcggttttgagataggttatggattggtcggtcagttttcagattgcaccaatccagaccgaaaactgaattctggatttctatataaaaaaaaaccgaccaaatcgaccgatgatcagccctaccaacagtacaattcatgcccttatttctgatgatattgcagtagatgacataccagaatccacttctccccctaagttataagacattgttgctatacctacagagcgaactgattaactaccagatgatgataatgtctagttacactaaaaagaactaaaagaatttataaatcaccaagttatcttcgagactatggatgtcattctactattcaagatcaatcttcgatctacaccttatcttcttcataaattcatgtcctacactaacttgtccacatctcacaaaagttttatttgtctagtccaaactcataatgaaccaaaacattacaatcaagttgtacaaaataaagtgtgaaactaggcaatgaaaacagagctatatgctcttctcaacaatcacacatggaccattgttaagctccttccaaataaacatgccatttgctgctgttgggtttataaaatcaaacttaatagtaatggttcaattgaaagatacaaggcatgccttgtagctcaaggatatacacaacaagaaggacttgcattttttaaaaccttctcccctggccaaaatggtcaccttcaagatgttacttaccatctgtaccattaaataatagcacacacttcaactcgatatttataatgctttccacaatggagatctccatgaggaattatatatgtctcgcccaaaaaggcttacacttccttcatctttgtttgcagaaacaaatttagtgtgcaaactctacaaatcgatctatggactcaagcaatcttccagacaatggtacaataagttcaccgatgctctcattctctaaggttttactcattcataagcacattattccctgctcaccaaaggctccaatagtaccttcattgcactccttatttatgtcaatgacatcatgataacaggactaaacatctctcttttacaccagttacaaggatccttgcatgcacagttcaaactcaaagctctaggcaacctcatatacttcttggggttcaaaatagcttgagctaaagaaggattgtttctttctcaaaggaagtacgccttgcaattattagaagataaaggctacacacgaagcaaaccttccaaaactctaatggacaccaagatcaaattggatgatcaacaaggcaccttgcttgaaaatccttcagcataccaccaactcattggtcgcttattatatctcacattagacttgagattacttttgttgtccccaacctcagtcaattcatgttagctccccaaacacctcatatgcaagccatcagcaatttactttgatatcccaaaggaaaactaggtcaaggcctcctatactcaaccacagcttccctacatcacataagttttttaggctcggattgggcctcatctccaactaccagatgatctacaactaatttttgtatctttttaggtgactgcctcatatcttgggtaactaagaagcacctaataattttaaaaagttctgatgaggcataatacattgcattagaacccataagtagtgagattacctagctccaatatctcctcaaatattttcaatcgcacaaggcacaccagctttcatctattgtgacaaccaaatcgcaatacatattaccaataatcctacatcccatgaaagaactaaacacatcgaacttgactaccattttattctagacaaaatcaaacaatctattattcgtctcattcctgttagcaccaatctccaacttggagatgccttcactaagccattgccctctacaacacttcattctcacattcacaatatggttgtctatgcatatatagtccagggggatgccaaatttagtgctcagtgagtagtgtttagttagtgattagttcagtaaatactatttttattattaatactgttaattagtttattggtctttagctttagttagtccagttaaattagttagagttagtttgtctaactctagctatgttcattattggttcttgattagttagctcagatctgttagtatatatgtaattgtcctgtgccaattctgtaacaccctaactaacttaggcgtattacgtgaatttttaaacgtactgtgcannnnnttgctaatcaacgaggtttatgggaaaa

SEQ ID NO: 113718 - DNA, 8425 bp, Cannabis sativa
  modified_base (26)..(61): a, c, t, g, unknown or other
ataaatctcgttgattagcaacgagnnnnnnnnnnnnnnnnnnnnnnnnnnnnnnnnnnnntgctagttagggtgttacagtgtaagtgtcgtagtaaggatcatgttgatacacttgtggcaagatataacatggatcacaatattgttgattttacatcaccatgtttctaaagaaagatctaaaaattaaaaccataacttgaagaacaaattagtaataagaaagaaatgaataacaaattgaataaaatagtctccggtaacggtgccaaaaatttgatgcgtgtcgtttatcacaataaatttactaatttttatttttatattaccaattactttagtacaacggcaaatacatgttgatcccacaaggactattatcaatttattattcaaaaattagtaacaagaattagaaaggtagttttaattatgaggatttaataacataaataaaaaataaatagaatgagatactacgatattcaagaaatagttaaaggttaatccccaccatcaacaatcatctttaattcctaataatgaatgttatttcaaatttttaatcaatctattaatctcgcgaataatactgaagcagtcaattattctaatctccttattgcatgtaatcaaggcgaagccctcaataattaactcttttacctaagaagtaaattcacgaaacatgcaatttatttaacttagataaaactttaagttcaatggagatagattaatttaggcaataaattaataaagcatataattcatttaacctaggttctattcttcatcacaattaaaagtacctttgatagtattaaaaattgtaatttatcacaaacacttagaatcctagactattaggtgaatagtaatcctaagatgacaatatattaaagtaaaacctaatttagtgatcatctaaacaagattaaaataataatcatgacactaatgaaaactagaaattaacattcatcataaaaattaaagattcatgtcttgggctttgaaattactcttaactaaaaagaaactactcgtaactatacattataatgaaaattataataaataataagagtttaaggagaagaaaaataactatgatgtagaacaatcgatgtcgcaatctccgtcttcttcttgctctatatgagtttctctttcaatttcgtagttcaaaagtaccaaagttcgtaccctaaaagtcctatttataatccttaaaacactacaagaaatatcacttttgccaacatattattataatggcaaaagtttggtattgtgttggcaaaataaaatctacttttgatgtgttggcaaaaagggttggcaaatcaacgttggtattagaattttcgccggcgcaaaataaaaagtgctgacaaaaatgacttttttcagcatgtaaatgcgctggtaaaagttagaattttaccgctgcaaatgtgcgctggtaaaattttgacttttttgctagcgcaatttgcgagatgcattggtaaaagttacttttaccagcgcaataacgaactgcgctagcaaaggtgacatttcttgtagtgacaatatctcacttaaaaaaagataaaaaaaatttgaattttgcccagaaatcacatattcgccgcggccatgacttcctgccgaaaaatttatgtcacgtgattagtattttggctataacttcttcaatacaactcggaattggacgatttaagatgtttcagaaagccgagaacgagatctacaacttttatgttgagctccaagtctatttctgttctcaaagtcatcaaaattcgtaattaagtttcgccttgaaaaaccaagctcgccccttccactattttccaccaaaatgtgctaacatccctccaaatgactataaatgcatgattagtctttaaaacatcctaacaaattataatcacactaatcaataatttaaaaaattaatttaagaataataatacataaattaatcatatttagaaaacaaatattaacttataaggggtattagtgaagagaattagagttagttacaatatattcagctgtagtagttaagtgagtttgttacactcacatgtgacttatcctttctaactgtttttgtactcttgcttttctgcattatatatgatgaatatcaagagctgtgtgtttgtttacacacactcatcttctttccatttctcaattgtgccaaaggagcctatgttctaatgatggttggagccgcactcaagatagctccttcttccattgcaaatactaaaaaactaaaacaagatcaaaaagagcaaagcctgcgtttttttctttgagaatagaccaaagataactgatatcagttgtgtgcttgagacaattgaagagctgcattttatagtaaacaatgcacctaattattgtaatactattaaaacaaaaccattctccagttaagacttttcttcaagttatgaatatactaaccacgtcaatttcccaacggctacttgacgcgtttgtgattagtaaatggttttttgatgtttgtatagcaatcgcatatttgagttttattctatttttcaattaaagttaagagaagtcacacacttggaaaactcttttgtgtaccactactccttttttattttattttggttagtgtatgaacattgtatgcttgtagctatatgccaatcatattcacatatatctggattttcaagtatttcaattttcaaggcagctcgattaagtttttctaatacgtggaagtcacccttttaatttgttgttactttcttaaggtgtgagttagttatcaaatttctaaagatgtgaaaagtaagacctaagcttggtattatcacattcagttattggtacattatttctacaagataagatcagattaatttaattgatcaacggatttagccgcggcattttgacaaaagaactaaaagttgttttctttgaattcagtagtgatattctaacaatttggttagttattggtactctgaatctgaaataatgcttggaattcataattgttatttaattggaaggatcaaggggtaggagctttgagactattaaatgtgaacattttcattggcgtgagcatacatacatacattttcagccttacgaaaagaaaacaagcaagcagaatgaacaagagaaatttatgtggttcggcctaaaaaaaaggaataaagctgagaggagctcttcagtaaccaaatccaccatattccaagtcaatcttacaaagtgaatgaagtcttacagatacacgtatcgcaaagccaattctcgtaactcctactctcgtagtctgcaaatgcaccctcaagatcaaagctccttgcccatctcaacaagaatgagatgaacactaggtagttttgtacaaaacaatgagagtttggatacatctttttctgtttcagtaccagatattaattctagcatatggtcatgaactccatctcattgaacaaattcactttatcagcagcttctcctagcaagctctcaacaatgcacatgcaatagaaaggtaaaatgaataataataggcagtactgaaatgagaagagtttgttcattaatcataccaacctaataagagggattttaaaacaaacaagggtggcctggccatgatgttgttaagaaccaaaaagcctttgtttgtcaccattcattcaatgcaccaacaaagagtactggcggctgacatttcctctccactgttttcttgcaggtcactcttacagtattactgcatatacattagacacacacatatatgcatatataataatagagtaatttttaacagcaaacattttttttttctccttaaattatctctttacaaaataaaacaatttcattctcataattcctaacaaaatatctttaccaagcacacttgtacagtgttcgatggagaaggaaaaagaggggaaagaagtgtgaaattgagtggaaaaaaatattgaattgggggggcattattaaaagatgagacaagttttctaaaatttgttagaaaaagcttactaatcttttttttctttttacagtaatttaaaattaataatttgtagtaatgaaagtaattttacaataaaatatgagatttttgtagtgagtaataggtattgaatgcatcagaacactacatttaaaagaattaattgaaaaagtagattattttagtcaatttgtagaaggtattatttctcattttcctactaagcatggtgggagcaactttctgtaagaaccaagcataaatattctagcttctggagtgaggccaaattgtcacattcgcaaatttgaagaaatcgtaatgagaagagattggcaattctctctcttaggaattctacatcctcgtcttcatttattccttcaatagccaagtgttccaatttggacaaaagggagaaggatgcagacgaagaagaagaagaagaagacgatgctaccataccagcaatgttcctcctcattattgtatcttctaataatagcttcgagctacatttatacataaagaatttctcaagatttggaaataatggcatggaagtaaggttacggcagtcataaatgtttagtacagaaagacaagagaaagaagggagcacaaaatgaccttgggcttggtttaggttggcagagtctctccaccaccccttcaatttaggacagtgaaaaattgaaagggaagtgagtgaaggaaagaataatgatgaagcagagaacttgggtgatatgtactccaaactacccaactcagaaagatgaagttcttgaagagaaggtagttgatccaactctgggagttgttggcattttatacaggcatctaaactcaagtaaacaagattagtgagcaatgagagccaatgtgctaatctaatgccggtacattgatgaattgtcagtatttttaaattttgatgaggttgtagggcatctaatgacaactcatcactctcaatcatttctcctgtaatgtcatcatctccctcaacttcccacgacaaaattatatgttgaagatgttgtttcttgtttaaatgtgcagcactgcattccaaagaatcatgtttcccgtgttttagattaattcgtaaggatcctcttaagctattgaggttgcccaattcctcaagcctggcaatattctttgacctgtaactgcattggttaaattcacctaacctgcggagagaagtcaatctacctaatccacttggcataaaaactaaactaagacagcctttcaacagaagatgcttcaagttcaacaatttatctatctcttgaggcaatctccaaagtttttcacaatattcgagattcaaagtatgcaaactatgcaatgtagttatagaattaggaagggacacaaatggatttgacgaaagattaaggtatcttaaatgttttaatccgcctatagtgtttggtaatttactaaatcccatactatacaaacctaaaactctaagtaatttaaaagaagataaaataacttcagaaatccctttatagtaaaagggacgttgaataaagtcgtcatgtttttgattggatgacaaaaatgttcttagtttcctgttttgtttaagtgagtccataggtattttccatagctcaatagaactaaaagttaaagatacatgacgagttctatcatcaaatacttttgcctttggaccatctatcacaactccggttgtccctgccattaaaattgcaagatcatgcatggcgtcatgaattttaaattttactacgtcatcatcatcacttttaaaaggcggttcaaagaaagaaccccaaactagatgcataaaatgtgcataaccaacatcttctaaatcattttggttttcactagatgactttataaacccttgagctatccagagatttatcacttcttctaccccaatttcataatcttttggaaataatcgacaaaaagcaaaacaatgtttcaattgagatgggagacgatcataacttattttaagtgtttttaaaatatcatccccttcttgaattactttgttaagttcatcattcatgaatgacaaacatatattttctacatcttcttcagggtacaacgacatcttcgattgaaatagtcttcctattgtcttaaggacaagaggaactccccagcacttttctacgacctcctttttcattggtgaaattctagactcatctggctcttttcctttcttaaatgccatttttctgaataaagaccaagattgatcttcatccaaaccacttaactcgaatggctcagtagtctttgttattctggcaaccaatttactacgtgtagttactaataccctgctaccctttgcacccaaaaccctcagtaactcttctaactcttcccacttttcttgattttcgttccaaatgtcatcaagcacaagaacatacctttttccctgtagcttatctctaaggcgattcttcaacgaattcaagtcaaagttttctaaattttcttttggttctatcatctttttaacaatctctttcaagtcaaacacatcagacacgcacacccacaattttgattcaaagaatttgtcaattttgggatcattaaaaactaacttagcaagtgttgtttttcctaaccctccaagacccactatgggcagaatcattaaatcctgatcttcataatcagtacacactaacaattgtatgattctcattttatcactgtccctgcctatgatatcctctgggtgaaccaatgagtgagtctccctatcgttaatatcttgtaatgggtatgatgcattaatattattctgagctgggttcatattagtcatgtaaagagatcgaatttgtttaatcttattcagtttctcttgaatttttttgagcctcttaccaattttcaatcgaaaagcaaattgattagatgaagagaagaaaatgcgtaccttcttacttcttttgccgccaaacctcactcgtcttcccaaagcttcggtgccgatggcatcgaccaaatcatcagctttataaagggtatcttcgagcttggaaacccaatcaatggcttggtggctgctggcatgctgatcctctgcatctcgaagcacggcttccatggcagacatggtgtccctgagttcctggagttgctgttttagtccccatggctgacccatctctttcagcgccgcagtagccagtgatctaataatgctttgagccacactcaagatagctccttccgccattgctaaataatacagttgatgattgagaagaaacttaatcagattcaaccaacaaaacccacgaaatatatattttttttctttgagaaatataatgaatatggtagtttagagattaaaagatgtgtatttatagcaaaatacatttacaattacggaaaaaaaaaaatgaaaaattatagaatacttcataattttttattaccatttctagatcagtgagtgagtgagtgagccttgtatgtaacggctactatatatttttttttttttgctttgtttgtacttgcagatagggctgcacatcattcaacataatttcttattcaaaatcaatccaattaaattaataattggatttaaaaaatcatcttccactactcactaattggatatttaattactcaactaacttctaatattaacttaaaaaaagtaaaaaaaaaaaaaatactccatatcctatttttttaactttttttttcaaatttatgggtttctaaagtagttgcagcgctagttgtaatagagatttccatacgattttttgttgcaatttaggttgcagcgccagttgtaatagggatttctatgtaaaatttcgtaaaaatacaaaaaaaaaacaactgttttaaaatggaaaaacaaaaaagccccaaaaaaaaatatttaaaatcaaaatatcactatttatttaagtttaatacttcataaaataaaaattgaaataactaaaacaacaacattaacaagtaataaaataaaacaaaacatcatcatgaaaataaatactgaaaataactattacaaattaacaaaaaaaacactaaaaatataattaatatatattttttaaaatataagtaaatataaaagattttttcgaccatatactatttttttaatcttttttttttaaaaaaatttacagttcgggttgctctgatggtttctatgtaggttgttataaggattttagttgtgatttagattactccgttatttgatataggggtttctgtgtgaaattctgtaaaaatgcaaaaaaaaaaaatatattttaaagtgaaaaaaaaaaaaaa

SEQ ID NO: 113719 - DNA, 2114 bp, Cannabis sativa
aagtgaacattgtgcacttttgccactaaaaaaaaagattggatacttaagtcatataaatatggaactttgggtacttatgccgctgttttcccttaatttaataaaatgaaaagtatttatgatataatcaattatttagttcactcattttgttttatataattatatgtttaataattaaattctattaaatttaaaatatatatttattgtgtagtttgagtatcctgaagcatcggttcattatgtggcaggttataaattctcagcttcttactagatgcatcatgatcagatttaatattactctggattctttattaccccgaatttgtggtgttcttgatgagtgccattctcatatttttaagtgttgtttgtctcaaagaatagttgagttaatttttgcttggccgaggtttagagatcggttaatggattttcagggttggaccacttggctttctattaattcagggttgataggaatgatgagttttgcaacattgaggagtactgtcttataccacctctggctgaacaaaaatagaagtattttttagggtcattctcaggttgatttttgtatagcaaaagacatagaaagagtatactgattatactttgtaaaatataggaagacgacagtgtaggagaaaacattttttacaagattgagttgtaattagttcggtttggtttgtggagcttcttggtgagctctcctggttttgtattttggtgaggtttgagggtgtattggttggttgattaatgaattatttttttttcttgataaaaaaaacatatagttatttatatttattgtgatgtcatcgcaggaaaaatatttataattacatgattcaaataattagtatcttaatttatcaatacactgattttacactaacgtaatgtatttatactaagacaatgtgttatgtctattctaagacataggcaaaatagacttgtatcgaatatattatctatatcggattggaccgatattgaaagaagaatggatgttaccattgtatatattcgtagtcaatatcacttaatttatcgtagatcaatttgatctaaatcctgagatagttatgttttaagctaattgtgttgttcgagttctttgacttatcgttaccagtttaccctaaggtctaacttatacttacatcttagaaactcggtaacataattgagttggagtgttaatcataaatatgaacatttatagctcctatattgaaagataaacgacagttttctttgagctaagttgaagtatttaacaatagagtgcttatttcattaattatattaatttactgaaatatcattaagtcaactaagtattttaattatatgaaataataaattataaaattgtaattttagtccctattaattatagactatttatagaggatcattgattgatataatagaaaattttataatatatctttatctggtatataaagcgttccataaattaggtgtacaattctaaatttatagtgaagttatgataaattaatatgttaggaaatttatttattaaatttcaaatatatattttattggaagtctagattttatgggcccatgatccctgcagtatttaagataatatttaacattatgttacagtagttaattatttaatcaattcatattcacattgttgttttattaattttgagaatattccactaagtggtgaaaagaaagaagaaatagagaataagggttttattattaatctgatattttgttgtcaaaaattaataataagaatctaaataatatttttatgaaaataattatcttaatatgattatttaattaaagcttaatatttaaatttaaggaataaattaattatggcataaataaaaagaataacattttttaaatttattgtgcttcgaaataatgaagagcacaaagagaacccatgctctctatagtttcgactaaaagacttggtaacaaaatcttgactcttttatttcctttatttatttaggtgccgtttagtaacacttttttaatcagttttttgtttttaaaagtaaaaaagtgaaaatatttttcaa

SEQ ID NO: 113720 - DNA, 820 bp, Cannabis sativa
cgggctggaagcaaagaactagccacacaggaatgggtcgtgtgagacccgattagagcctattggctcagggaccactggaggtccaccacctcccatcgaccatcgaccacatacctcaggaggtccaatcgaccaccatggagtggccacgggaccgatcaatccctgtcgtggccgttgaaggtacacggacccagttgggtccaatcggagaaaaaaaattcaagaccataaattgctccccgcctaccgttcacattgactccaggatccagtggtccggtcaacttactctcatgagccacggggagctccgttccctacgctggccgtcgaacataacccaaacccaaaatcggggcttccttccttatgttcatgtgcatggccacatgcatggttccatgcaatccatgcaacatgtgaactttttcatgtggcccacttttgagtctcatggcttgaagctgcacccttcggggttcgtgtctcattgtgtcgaggttcaaaacattgtctcgatgaggttagggtttacaccttaaactccagtttccttatcaatggaggatatgtggaatttggaattacataatttgacaaaaccttacaaataacttttaatgtaaaattacaataaaattcatatatcacaattatggttttttctctaataaaaactgtaaaattcctaaccaaatttcaccatataattaacgattcacatccatgcatgaaaaatttaaatctatctgttatacccgaaattcggctggaggacacgtgtcaagataaagggaatgtgaatcgatgtaat

SEQ ID NO: 113721 - DNA, 1169 bp, Cannabis sativa
tgttttataataatacatgtaaatgggattttaatattatatttgatattatatttggcagagtagaggacttacttgggcagtaccaacaggaaggagagatggaagaatatcatcggcctctgaggctgctaacttacctggttttaccgattcaattgatgaccaaaagctaaagtttgctgcaaagggtcttaccccaaaagatctcgtaactcttgttggtaattaacttaattcatttctcatttgtatatatgactaagtgaaatagtgtactaacataatatttatgtgtttggtgtttttttcaataggtggtcacaccattggtaccacagcttgccaattctttagttataggctatacaacttcactactaccggaaatggagccgatcctaccattaaccctacattccttccgcaattgagagcactctgtccccaaaatggtgatggaacgaggcgtatcgagctcgatacaggcacaccaagcaaccgattcgacacagctttcttcaccaacttaaggaatggcaagggaattcttgagtccgaccagaagctatggactgatgcttccactaggacaatagtccaacagttcatgggcattagaggattactaggactgagttttggagtcgagtttgggagatctatggttaagatgagtaacataggtatcaaaacaggaaccgaaggagaaatccgcaaagtgtgttccacaattaattaaggaaaatattcttgtttatagattgaattaaggcaacttttattgaatgtaaactaatttttgtaatttgctctgtattgtgtttggtgtttgttttccacacatgaaaatgaaatgtatctatttaccatgaaattgtaaacttcctatgcttagaaaacaaatgagcatactatatgttataatgattaatgatagattttggaatcccaacgagaacctttcaaaaatattatagttttcctttttctatttcatattttcatagaagttatcaaactaatcaattcaatatatatgagctttccgtaggatggaaaaagagcataactttcaagcatcaatgatgcccaatatcaaccacttgaggctagctcaagtggccatagatgggtgttgttggaaatttattttactaggatcttag

SEQ ID NO: 113722 - DNA, 1170 bp, Cannabis sativa
  modified_base (498)..(516): a, c, t, g, unknown or other
ctattttagaagatacagggtccattttgtcatttaacaaaacacaggatccaattgataatttttgtaaaacagagggtccaaaatagtatttacccataaattaaattaatgccacaccactccattcaaaaaatattattattacaatttaccttgcatataattctcaaaactagtttaaaagactgttgcactggctagataattaagtagctattttgttatatatgtgtattaatatcgatctatatatggatcactaacagtcaattagctcgttatattaatatatatcactatatctaataatcaattcaattgtatatatatatctgcttgtaagttaagtgataagattaagtagcctccattatcgttaatctctctcaatcaagattatgggttgttgacaaatggttccacaattgtgagacatgtggacccctttaaatatatcatccgatatcacacctatatataataataataataatnnnnnnnnnnnnnnnnnnnataataataataataatcttttttttatgagaataatcatatcaatttcaattatttaattaattaaggtgtcaattacattaattaattgcttaacacgtttagcttcgctattattaatttgcattctcactatatatattatttgatctaaatggaaatcgttttctctacatgtttcagtactgttcttcaacatccaatttagatactcaacttatttatatgtatgtatgtgtgtgtttgcttatactatttaattaaagtctaattaattacttaagaaaatataacaagtattgtaataattctatgaaggaatattttaccatctaatcaggaataatgttagtactcagattctatttttttgaagcaaaagtagatagacaaaaacacacatgcaccacacgtttgaatgaattactttaatgattgtatatattatacacaaatataatattagcattgaagataatgagttacactatatttacataaaagttgggtgcagatccttcaacgtgttgagaggcttagaaggaaatgtatttttagagacaaattaagtccccgcactcaaaaaaaaaggctacgtttcttctttttatttttagttaggggtgttcacaaagtatccgatccaatccaatc

SEQ ID NO: 113723 - DNA, 1663 bp, Cannabis sativa
gacaactaatgtagtagtagcagaataacctgattcggctgttgaagctaatttcaccaaatatggtcgacgaaattacaatagggcaccaactcaacaaccttacaacaggtttggaaaccaatttctcaacaacactcaacctcagccaactagaggtgcttatcgtggcaataacacccgaggtgagggcttcaactctcaattattaggttacaataaaggcaatgtcaactctagaagaggaggtagattttctactttaaaaaatagacctcaatgccaactatgttttaggattggctatactgcactaaattgcttttatagatttgacaaaagcttcacgagtgcaggtataacttctagtagtccaaatagacccaatccaactcctcaaatgtaagctaatgtgcttagcaacaatattggctaggacaccaattggtaccctgactaaagtacaacaagctattgcacaacaaatgcttccaacatagacaacaacttagattataatggacctaatcagatgattgtaggagatgagacatgtctacctattaaaaacattggtcattcttttgttacttctaatcgacctttaatacttaacaatttactccatgttcctgatattacaaagaacttgcttagtgtatctaattttgctagagacaacaaggtttattttgagttccatgatggtcattgctttgttaagaaccaggacactcatgctactctactaagtgggacacacaagaataacctatatacttttgatgccactaagctcaaaactcagttcaaaaagccttctattgtttcaggtgatgactacttgaactcaacaatactagtgagtctcaatgtaactagtgtctcttcacaatgtactagttgtatgaataaagcactttgtgaatttgatgttatcgtttaggccatccttcaaataatattgttcaaaaggtactagatgtaatattcctattaataaaaggaaaaattttcacaatgtttgctgccttagaaaaatatacaaatttccttttgccaaggcctctgccactgagtacactggtccattacaactagttgtttatgatctatagggaccttcccacacatttttcctacaatggatataagtattatatactctagatttacatgaatttatttgttgaaccaaaagtttgaagccttaaaggtttttcaaatgttcaaagtagacgttgaattaaactaaaagttttgctaacagattgggggaggggtgaatacatgtcttttactagctaccttaaccaattgggagtaatccataaacatccttgcccaactacacatgagaaaaatggcctagcagaggaaacatataggaacattattgaaaataacctcactttgcatgcctaaacctctatgactttacaattttgggatgaagcttttaggactgctatctattttcataataggcttcctacacctgtcctacacaataaatgtcttttgtgggttctatcatcaaacaccaggttattcttagtttagaaccattggttgttaatgctttcccaatagtagatcatataatatgtaaatgttaggttttatgccgtaaataaaactccatttcaatgtaatctatttt

SEQ ID NO: 113724 - DNA, 6993 bp, Cannabis sativa
cttagcgagatatattcaagatgtccactgtaaaaaagtaaattttccttcatttttcaaagaattacaaaaacttcacattttctacttctactatacagaagcaaaaatctagatagcaagcagttgacaaaaatatgaaaagggagaaaaactacatgtggtaaatacatatttaagcagagaatcatgaataggatggaactttacaaatcttcacaggaagcccttgccttgaccctctcccaaaacgctggccttaaattctcgagagatagcttcccactaaactcttccaatggctcggctgctagggggccactatattgttggtgctgctgatctgaccaacacattcgaccactctggtttccaacgtcgtacccttgagttgatattaaatttgagcttgaatccatgaccatgtcaccctcaagtacacgtaatacctacaagaaacagttcaaacaaaaatatacaaagttccaaaccaatttagactcagaaatttgaaaggtaaaatgatgttaaatgccctgatgaacgaagtattgaggttcttttcacctgtgacatgcgaggccttgattggggatcccggcgtatgcataaagaagcagcatgcaacatgcaataaacttcctgttcagaaaactgatttcctagccttggatcaatcagttcatcaatggcatagtcctctaataatggtcgtgcctgttacagaaattgtacttgttataaatttattgtgtacttgttataaatttattgtttacagtggcatgccagttattatgtcaatccacataatttgaatgcaaagaataatagagagaaggatatcaataaatttccctccatcactttacccattcagtgagacattgctgacccttgggtcgattgaggtccacagctttccggcctgtaacaagctccaccaataccaccccaaaagaataaacatcagctttttctgtgatttgaccactttgagcatattctggagccaaatatctacatcacaggaacatatgttaaaaataattgcaaaggttaaaaaacttagctgtaaagccttattcaagaaaattacccaaatgtcccaattactctagtttccacaccagtatctccatcaggctgccaccttgccaggccaaaatccccaaccttacaagagaagcaaaacaaacatgctgagagtagggtgggtaacaaactaacatttatcgtgaaactcaaaacacgtcgcacaatctataagaggaaataaattgaagagtgcaacacttctgattccaattatataaaggaggctaagacatcagtataccagtggttcaaaatcatgggtgatcaggatgttgtttggtctcatgtcgcggtggacaatgcaacctactctgcattcttcatggagatatcgcagccctcgagcagctcctacagcaactttctgtcgcgcagaccattgtaatggctgccgatgttgtcctgaaacacaaagttatttgtgaatccaagaaagattttagcatacaattcatgtgttgatcactacaaaaatacaagcaaatacatgatctttgaaacagtaatagtgataggaaagaacaaaatccaactcttctattgtcataggaaataacattaccgtatagatgggagtccaatgatccgttgcatatatattcataaaccaacaatcttcttttgtcctcgatacagaagccaatcagcatgacaacattgcgatgctgggcacaactgaggacttcgacttctgagcaaaattcatgatcaccctgagaactagctaacttgtgctgcttgacagcaacagcctggccatcaggaagcacccctcggtgaacagagccataacctccttctgccaagaaattggcttgtgaaaacccaccagtagcaagctccagctcagcatagctaaagaatcttggtggttttccaaacacaggtgccttatgttgacatatggaacataaggggggaggaccaggtggtgcatttctggaaagtgaaactgcttctcttacatttccactgaagtctccacttcctctgtagcttggcattccaactccagcgtctctatcaggtttcttgaacttgcctagcaaagctttggttgatgatgcttgaggcctatcacttgatttgtgagaactttcttccacgtgatgtgaggattggctatgtgatattagaaaatctgatatccacggttggaacctcaaactagttgaagacgttgataaactttcactgtcagaatctgaagcatcatctatatcttgatttcccttggctctaaatgactcctccttcttcagaaccccatttatttctgaaatgaaaagtggtgaagttcctggatctgaatttgacactgacgaagttccagcttcagttgctgtaaatggagtacctagctctggactactagttggagtcccaacaggcactcggacagggtttaaacaagcatccttctttcggggatgcttttcaggcacttcatcaagctcagaaggtaactggcaggcgggttcaggttcctttggtaacccatttaaattcaagcgaagaacttttggttgtgcacgcttcataacgacaatgttgcactgcagctcatccatgcagcgtttttcctcttgtttaagatgtctataaaaattaaactggtaagaggagataatggaaccatgattctacatccagaacataaattaaaattcagacaccaagaaaagagcaaaaagtagacccaagcttgattcttgagagtgacaaaaaagacagaacattacttgtccaacacaacccaactagcttgagcgttcttggcttcaactgcaaccgatccacaaggtgatccatatacaatctttatcttgacatttacctgtaaaagtaacatatatcaagtcaaaacattatccaaacccaaaaatcatattccatgagaaaatacaagagaggcttactttatttggatcataaacatcgtgaagctggagaatcatctgagagcacgaatctctaatgtcattcttttgctcagagattgttcccagaagagacttccgattaccattagcacagtcccctgcaaatcttggaaagccccattttttacctgaagcactgaaaaaattagctcacttccaatatatacagtagtatatccaagagggactccatcagaccatgtggaaaaaaaccacaagcctgactgtttgagctaccctcttggacaacattaacaatagtaatgacaaaacagcagaaaataaacaagtaaaaactaagtcacttcttagtgaagatgaaagatagactagctgtgatagaattaaatcaaccgtgagtacagcaataaataaacagatgaaccactttgaaagctgattggcaaggtgaaggacaaagtcagccgttgaattgaatttttgacattgatatattttaatgaagcaaaccgaatcatttgtagacaatgggcttgaagagaaaaattaccagaattttgtgaagggacaaccacaagcaaagtaatacaatccccaggttgaacaacatgcgtcaaagcccatacaagagcagtcttgggaatttctttggaagccttgacggccaccacaactttctcagccccatcggaccctttctcttgcttaccgcgcctctggtctcgactcattagcacccactaaaatttcactcaaattccttactaacaacaatatatacagatttttctcaagctcatctcttcaaaaccctgaccagagcatgacccaacaaagatcttgtcctcaccattgattcccggacaagtattacagacacactcgatgacactgacaactagagccccaaatgacaagacgttccttggtttcctccttcagcagtaaaaaccatccttttattttttttcacttctctgtttagtcctctatctaccaagcgaaatatttcatgaatattgcgaaaccagaaaacgccgatcttagagatctttgctgcttcttatacttgaggccaggaaagcaagccactgattctctgcctgaatgtgtagatgacgttacagattcagaccctcgtgaagtaaacagaaacagattgaccactgttgaaaatgaaagaaaatgtagaacactaaacgacacaagttaaatagaacccagattcttcgtacaacgatggattaccttccaagtctttaaaatcaccgagtcaaaatggtgaaacaaatagttcagaaggtaaattatcaaaattcgattccaactatataggcttcatccacatataatttcgctcagacaacagattccttgacaagatctctttcagaaactatcaaatcatcaaggttgagtattttgctttttatagtgcatacaatgaaggaaaatcgaaccaggctcagctcaaaccccaaacagttatagagatttaacctgtaaaattttggagaaaagatttgataagcacaagaggtcaaaacagaagaaaaaataaattaaaaataaataatcccatgtgcccaacataaaatagaaaagaaggattacagatatcatacaatataaacatatttgtttccataattttctggattttcatttatttttctcagcaaccaaacaaaacaaaaacaaaaggatatattaaataaaatattacatttatcatcaacagccaaaaccaatggcatcttcaaccaaattcctcaaaacacaaagaatctttataccaacaaccacacccaaaaaataaagagaaaacaaaaagagaaacagaaatcagaaacccaggaacaccccgtacaaagctggactcagaaatagcatttcacagctactacaccatgacccaccacgtgaaaatcattaaaacccacaaatcttctcaagcagtggtcaataaaaaaaaccaaaatgtacatacatacgggagatggggtatatcatcaaatatcaaagagtcattaaatcactttatccttgaaataaaaacccagaaccaaaaatccttaccaatagcattaactaataaaaccctctgtttaagtcttctttcttctttcacatcaaagagtaaacaaccacaataacacgaacacgccaaacgagtacccaaaaaaattgacagatacaaaagataagactgaaagtgagtgagacccgccaagtcagtgaaacctaatcttagggtttttaactctcaacaatctccacacccacaaaaattcaaagagaaatagtacgaaatcctctgttatctattttttctttctctctctctctctgaaaattaaatatataaagcccaaaaagaaattatttttaataccgagtactgttatagaaataatacagtgaaatatttcagtgtgtcaatcagagattttggcagcgatcgccgtcgagagagctgaatgtacgaaaatacccctggtattacagcctttttacgtagtgaaagcccaatggttatgatggcttttacgatgtcgttttgatgttgaataagagaagaaaaaaaaccttgtgggcgctaaaaggttgcgtttgacctatggtggggtgtcttttagtgaaatcacttatcaatcttctttttatatatttatctatctcatgacttaaaaatcttgagtggcacaaacaactagggaaatgttagagaggatttgggttttttgaaacttggaagggacccacttttcttttcttctttaacttttcattactatattccttatttgaaaatatatttgtaggtttcatttaatctatgttcaaaactcaaattaaagtaaattaaagggacacctagcaaaaaaggaagatagaaaattgttaaagaataaaaaacaaaaggggagctaaatttagcaaaagaggcttgatttgattacattaatgtcatttagtgtgttgaatgaatgttgggtacataaatgtgtgttataaatggaagagtttttaagggtatcctattataatataagattagataaatactagtagtagtagtagtagtgtcctcaaaatttggtaattcaatgcaccatgcttaaatttcaggtctgaattcatgtcgccacttttgagaacaagtatttagataggacaaatagattgaatttaatttgccttaataatataactagtgcatttattattacacatacattgaggtatatattatgggttacaacttacaattacttaaaacgtgggaattcctccagctaatattgatcactaattacttcggtaaccacaatctgttttaaccttttctcttctgttcttaatttattaatttgtttaatattcaaggataaaaatctaagttgtagatctgtattgaccggtatataagactttcatgaatatattttctaaaactgggacttagatttgaattatcacatgaaatgtctttgtatgaaactcaaaagatgttgatggatctaacattttattgaatgaaatttgttactatttttactattggtcttgtgataaaagatctctgatacatccaataattttatttattttttaaatagtttaatctggtgggtgaatctaacttctaacctactctaaacaaatacaaacaaaacaaaattaataaagaactgagattacacagagctcaatgcctaaatctgtacttcctgccccattgccaagtgttataatcctttagttaccccatttttataattttatttactttggaccaatgaaagttccaaatttgttaatagatcccaaaactctgcattttttgtctttcccccaatcaatcgaaccccctttctcctttccccattttccaagttcaatttttcaaaaaagcctactttattatttaactcattaagggctcgtttggaacgccgtattagatcgtattgtattgtattgtatt

SEQ ID NO: 113725 - DNA, 1804 bp, Cannabis sativa
  modified_base (72)..(75): a, c, t, g, unknown or other
  modified_base (101)..(102): a, c, t, g, unknown or other
atgtaacaagaaaaaaaacttaattatttttttatcaattttttttatccattttaaattttattccattcnnnncctattcccattcccattcctattcnnatattttcattcctcccaaccaatacttgatatttactaattatttataagacatgtaagcactataattaagaatgttgaataacataactacataaatactagtttataataaaacattttgttgtgtgtatatttaaaattcgagagagagggggagacaagaagaacaggctttatcagaagagagttggttaatagacggctgtgttcgtccttgttgtcggtcaatactattagtaatgccattcctatatgcctacgcccatttgtatatatctaaataaatcaaattaattattattattattattattattattattattaggaaaaagaaaagaaaagaaagaacgtggctatcacaaacctgtgttccttttgacccgaccttcatgcgcatttattttagttaccatactttcataacgtctctctctctctctcgataaatatatatatatattattattacgttaccagttacaaatatccatattctatacaaatcagactttatatttttattatttcattccttttgttatgtttatatatatatataactgtatatatattatctgggatcaagtgggatagagtagagatgatcaactgatccaaaattggcagtgttcttgcatgtgcgctagctagcttcattcttctattgatttgtacatatgtattatatttttcatgaataatatctctaacattctcttattctctttttattattattattaaatagttatatatatatactaggtagctagttcatagttgttatattaattaattaagtagagacacccatttatgtttatttgtttgtttttatgctgtttagtagtcatttattagatttaattatatgaacatatacaataacttctatctagttttattacacatttaatttaaaacaaaaaacagctactacttctttaattgggttcgagaaaagaaaagaaaagttttccaaaaaaaaaaaacacattacacatatataataatgataattaagtgatagtaagtgatgaatagaagctttttaagctttaaaagtaactgcatcacatggctattttagtgtgggacattcttttgggttcattacttttttgtttaattaatatgcacacatgagcacatataacatatatgtatacatactaaattggcctcattttacaaaagtgtcgtatataatatgtatacatatggtataatagtaatatactaagccatttttatttttttaattaatttttcttagtgatcttattcttaataaatcatatatgtgtatactatatatatatatattgaataatggaacacaagcaagtgggacagcgcatgcttatatatgcatagacatgtacgcagcatgtcccatatacaaacacactacctttttccttaattattaatattaattatttatacgccctctttaaaagtttatagtgtggtgtgtgtattcttaatagaaattcgaatcactatttctacacctatctaattatcaccatttacaccgtttatatgcaaataaaattacccttatacccttatttttgttgtgctctcttctcggtgacggacccagaatttttattttgtgggagcttatttatcataaaaaaatatttataactacattataatcactcttattaaatttatctaattt

SEQ ID NO: 113726 - DNA, 5233 bp, Cannabis sativa
  modified_base (816)..(816): a, c, t, g, unknown or other
aatgaattttatttagggcataaaacccaacactatcttgtctcgagtgacatgacaaattttgatttactttcgtatgcaagcgtctgaacatgtgtattttctaagaatagtgggtgcactcatccttgttaaggtgtgcacgtattttagtgtaagaggcatgcatgctgcctaagcagacacatccagaaatgtattgaggtgcttcactctgggagaaaaattacgaaacccttttacttcgggagcataataatgagtataccttgtggtgaaagggatctctactccaaaggtattgccgtattggtccggtcatgcaaataaattattttgagataattacataaaatatatttttgtaaaaattttacattttcttttacatatttacaatactttaaaaacaaagaaaaaaaaatgaaaataataataaaaaaaaacaaaacaatataaaaaaagtatggaaataacaaaaaatcaacgacaaaataacaagagtagaacataaaaatacttaaaagagagtgttttatataaataaaatctaagaccataaaaaaatattaaaacatcagtacaaaccgtgttttttgtaatttttttattagtttttgtgtttttttgaaattatcccaattatttttacgaatgggcctactagaatgggcctactagcttcaagaataacctaacctcatcaaattacaaatataaatagttatgggaaacttacaaaaatactagaatttgggttaacttttacaaaaatactgtcacacataaaaattttcaaaaatactgtgtttttanaaaacactagtaaaacacaaaacaaaagactcaaaacaacagtagaacaactaaaaatacatcagtagaacaccagtgaaaacttaacatagtatactgcaatatgaaacttataaaaaaacacagtaaaaaaatagaaaataccgcctgacaatatttttgtaaaaaaataacaaaaattaatatatgatgtaaattttcctacaaatattactcatgaaattaataattttaatattactaatagaattcggataaaaaagttcttagaagtgttattctttgaatagtaaagaagctttcagtttgatgtaatatattattttgggttaagaatattgacctgaaatcaacaccttaataaacatgttaaatatgtcaagacgattttgacaaaaattaaatgtatcacccaaatttatttattttgtgttgtttacgaattgtgtccttcctacacaataaaaattgaaaaaaaaaaggctaattagtattttttttccccgaactttgacatgtaccaaatcatgtctctgaattttttttgccgttaaaaattccccctgaactattgagattattagatttaaaaacttttgtctaattttagtaaaagaattctaacatgaatgaaagttctaagagcatgatttaatgcatatcaaagtttgaaggacatgatttgatagatatcaaagtcttgggagcatagtttagtacataaacaaatactgaaacagtaaaattaaatgaaattagacaagagtccttaaatctaacaatcttaataattttaacggttaaaaaaattcaggggcataatttggtacatgccaaaattcgggggagaaaaaatcctaataattagtagcttgtatgaaccatggactgaatagagggcctagtcgataaaaattaggcaattttatattacaagttaatttataaatatattaccaacaaactctcctcttgcgtcccatggccgattttcaaaggactttccaattatactgcgtttctcaatcacagtcccatcctcagaacgataatctggaaagtagtccaagaagcttttgcttcctagttcatctattccatggaaaaggaagttccttagcaactcctgcaggatttcaaagaataaagaacaaaaattcaaggaactggactcctgattgtgttccaaaatcagaaagaaaaagtatggaattataccttagcggctgtgtccccaattaacctttttagaagtccatgaccaggatcctgctttccagaaaattgtcaaggtaattggaaataaatgtggaagttccaaagttggagttggaagaaaacccaagtgatgaattcactaatcaaagagcatttcaatgtgaagcttatacatctgagttgactgaacaatttatgaactttccacatgatttcgttttgttttcatacacgtactcccttctttcctaacacacttttgttttcttaattttatttggtatttcttgaagcactctgaatttttttttagtactccggtaacaatggcatgaaattatgattcaaaaatgggaaaatccaatattctctatcaatagggttgattcaaagtaagcaagattaaccaccttttctgctctccatgccaaatatctatgttgtgcttcacagttgaatttaattatggatgcatcattctcctctgctgcttcatcaattagctcaacccaagcctgcagcaacaaagtagtgagagtttagaatttaggaaacaaatttgaaatataaacaccaaataaatgttaatattcatgaataactgaattttgtaaaagctataacatgtataccttgtaataatcaacaaatgcagaatacaagacatcatatttgtgttggtttggagtaaatctggtccatataacaatcggtgaaaagaatgttaaagactctgatgtaagttttcctccccatggtaaaagctgcatgaaatcagtgattaagtcaacatggccaacaagtttgacaaagattcttgaaagtcattaagaggctattgtaaacattaggaaatgctttatgatttgttttagtctttcacttgcctcagaatatttaactccaagaggaattaggcttgaataatacttctctttgtactccctttgattgatgacatcgtgcaaaggattgagatccctacaaacagttaatcagggtaagttctaatttcaccagaaaacccagcttaaaattccattctagtagcacttcctgttaaaacagaggcaagcctatatcctagattcaccatgtttaatatggcaagcaagttgaatttgtgcgcactaattccacaatgatcagaaattcaacatgcccgattcttacaaatccctttctgtttgcaacttttcttctccatttccattaagctcttttagttcttcattttttgactaagttcttaatattccacccacaacaacgtagttgatgaattctcatcttcaacaagtatcaaatgaccaattcatgtagatgcttacttataatatcaaatacaagtaaataggaacattatgaataaaccatgtctaaagactaaaatatacacaaagggttgagaaggtgaagtgaaaactctcacaaagttcaggaaacattttgacaaggaaagtattgaattacgaaatcccttttaatggtcagcactgattttactctccttgactctttgtattctcaaaaaaaaaaaaaaagtatcgactctttagtcgagttttaattcagagacaagaaagcttacagtaaaactatgcttgtacttgcattgctaaaaaaattagcacaaaagatgggtacatcgtattctggttttgggaaggcagcaaaatctaaaacctgccataaaaacgaaaaagaaaattttcaactgaaaaggtaaacatataagaaaatttaacttaacctacaattaaagatttaataaaaaagccagggctaatgtttggaatactgtcctgcttctgtaaaatcaactctttgtgcttaaagctgtgaaacaaccactaagatctcacttattcatcatggttctttcttttctctaacttgagcactgtagaggttcagttatagacaacgctatcaggttattttatcaatttaattcttcatggcacagatccaattgagataatctcacacattaagtatgacatgatagttaactacttctaaaagatacatgagaaggcactggaattggtgtcatcttatcatcccttaaaacaaaccacacaatatgaaaatgcaacccagcaagttagatagttctacctgcattgtttcagtctcaatactaagactccgtagaagtctgatcttgggagcttcgaaggaccccatttgaagctctacattaccatccgtagacatcattgaactaaatttttcctgacattatagaaattattcccataaatataaacatgtctatctaacaaagaaacaattcatagatctaacacatggttacaactaacaagttgagctttagttaccatttgcaataaaagagtgcataaaagataaattacactgacaagagaaagcacattgatagtttgtcttccaaggatattcagaaacaatttgaaacaaaaatccatatggattttgctagagttataatttgagaaccatattgacatgaatgacagttaaagaaagcagattggccaactggacctgaacaagatactattttttacccaggaggagaagattcccaaagctcttgtgattcttttcagatcaaatagaaaaactatttcatatcacacaatttaagcacaccaaaactaatcaaaagggaagtgacattgggagctcctctgcaataatagtgttaaagtatcacaaaagactaacttcacttgcctcatatatctacatacataaattgagagattacagcaaacagtggaatgacatgagtaatgggagggaaggtacctgcagaggagaaggagacaaatgggtatggtgctttgtatgatttaaagcaaattgaatgaatttctcgtaggagactgcatagacttggaaagagggtctcttttgtttccaactatagctgacactagaatgtaagacagagctggaaagacgtagtcgaggtgtttcaggcggaaagaagcttaagaaagaagaagaagaagaagaagaagatttcattgatgaagatagaagcttctctgaaaccgacatataaaacttgggtttttgaaggatgagtgttctatgtcatatttgggcatatttaaaaaaaaaaaaatacacaatatatatatggggtcttatgtaattcctcagttcaaaatgaaagatgtaatccctcattcatttttag

SEQ ID NO: 113727 - DNA, 7299 bp, Cannabis sativa
gtaccaaatctccctcatgaggaactgattaggggcagcaaaatgaattagacacgataacatgacttgaaactgcatgaaaaaaaaaaacggagatgggttttccttaaataattttaggtcatttttgagttgacacacacgaaaataacacaaccacttttttaagagtatacgctcttatatttattacatgtaaactatattaaattaaattaattaaataatacataaatatgttaaattatccataaatgtcataaaaaattgtaaacattaaagttgttataaacatgttaatgaatttataagtttaccaaaattaattataattctttatataaacaaattgagtcggatcaacttgtttataaacagattgggtttgaaatttaattttcgacatgattaataaatagatcgagtttgggtttgacatttacttgtaatacttaagtctcaacacgacatgaacacgacctataaacattccacccctaaaagagattcatctttttatgacgtatatattatatgaattgactaagtatgttttcatctaatgctaaatttgacagagaacttaaatattgtcttttggaagcaggatatagaggtatagtaaatagacataatatctatagaaaaccaaacttaagccattacacttcaaaagaacgctcacctatgggaaagcaaatttgggtcatcaggtaaaacaatattttgagtatcattatttggcatccatgacaaaggctggagctgttggtcagcacccactctgaagggtatatgtaacccattttggaactgaaaaacaagattactgacgattaatgctttaaacacactaaagaatcccatcaggctaactatcaagcctagtctcacctgactagtgcaatctaatgacatgaattgctgcttctgtaaattttcctgccaaacaaagtagaacgtgttggtattgaaagtatcactgaagatgagatagtatcaagtgaaaaaatttgcaaagaagaatagaaataaaaatataggtaactttgctttcacactccatgttacagctagtatttagtttttctgtaatactcaatcctcagtttttctttcctccccaagccacatgatgtgctttatcatctcaactcacacatcctattcacctcagatggctttcttcacctttctctgttattaaagtacagcttatgtttgaatctagaacctccccctcaccccgaagtaatcatgttgcacagctattagcatgaacgttaaggttctcaattttattgcaaacataattcttaatgtatcgtaccgaattatttttgcaactccttcccaaagatttaaagcaaagcgaaatctcaaacacatatattactagttcccaaaccaagaaccttgaaccaacaattagatggttaaaaatacccagaaccaaactaaaagcatctgtggcgctggtggttaacacaaacttcgttgcgggtaaatgaacaacaaccaatgatacatttagaagagaaacataccttgtgactacgaatttggttaagtgactctcttagagaattttccatttgccccaggtgttctacactatcaatcttatcagggtttgtccaatagctgcacaactcaaaacaaatgcagaattagtatacagtgatgatgccaactataatgaaaccaaaaaagaaacttcaaaattgaaacattccaaacttacctgagcctcttatgtatttcagaaagttgagtctgaaacaacgtagcttggttagataattcctgccaaaaacatgccaacatcaatacttgtgatttgacggctcacaaaccgaggggcataaaaaacactggagacaatggagcttacctcaatggtttgagaactgagacagaaacaaaaaaagaaaaaaggaaaaaatgaaaagaaagcattagactatagttacaaatcaccagcatagtcaatctgaaaaaggtcaatcggttcaaaaacataccttgttcccaaaaattcttgaatatttacatcatggtccagcttcttaaaagtttttttcagtgcctaatcaaatcaataagaaggccatcatggaccaactctcaaaatagaaaataaaccaaaagaaaattacgcagtcgataagatttatgatagtacttagcattcataagaaaaaaagcaataaacaaaatatcattatggagaataggttgtaaatattgaacttacttcaagactttccaacttcctgttacaatcaaatgaaaacagtttaatgacaattctcctttatgtatatcaaacttgaatgaacgatgaaactaacatgtatttcaagtgagacataagcatctaccttttcgccctttcttgtggggtgagttgagcaaattttgcaataacctcttcaatactgctagactcagccaaaaataaataataataaaaaacaaggtccgtatgaaaaattagcaaccattcaattaaaatcagtaattgtattgtaaataaactaggtgatcatctatgataatcagaaagaatgaagtttacctgcgttttccactacacaaagaaggcttgccagttggtgagaacatgagaaggataatatctatatcacaaagtatagataactcattagcctttttcataattccatgcttcctcttggcataggtggcttgacgcccatttgtattctccaacttttttatctttaattttacccttcccattctgcaccatatactaagaacttctcaatctcaccttctatgattaatgttcccaaccattccaatgcctatcaaagaaaacaagagattgcccatcacatttctaacaattcaataagcttttctgggcaccatatcaacatttgtacctaaaattgtcacactagtttccaaagacaacagaaaaatgaagaagaaaaaacaaaagatgcccatatgaatcttttctttctttccttcctgatttatataatacatataaaacaaaaaacatgaatctgggtcaatctcttaggaaatgacagaaattcccatatgagcaacaacgctataaaaggcacttaaagataagagaacaacaatagccaactcgttctgaatgttgaaacgcagcataatagacgttaactcgtgcccttttcttttatgggcaaagacgtagagttttccttttccttttaaatgaaagaagttgaacacatttctaaatgcacaacaacaaaaagcctactctttatttaatcgagaaaattaaaaatgacatgaatgaaagaggaaagaaatagtagcgtaccagttagaaacagagagagaatggggaggaagggaaaggtgaggaaggatcagcgaaatgaggaagaagaaatagtttgtgagaatgaaaaaagagaagagaagggagggaaggagagggtgtgtcatgtgtgtgtgagcttacatatagctttacattacacgaccgggttaccgctaaattcggtcatagaagcaaccgtaagaatcgccaaccctctcaaatcccctaaccccaaacctaaccaacctaaccgccatttcttttatttattttttttactttttttctttttatttattatttgaaaaaatatatatttaagcctagtattgctttagtaatggatgtttgcttatttttattattaaagaaattttattatttgatttttattgaaaaaaatttattatcatattatttacctacaaatttgtgttgatgacttggataacatttttgacgagtggcacgaaggaaataatactagaatcccacatctcggacaagattgtaccacttgcatgttgaacgtagtagtgccagcgcctaggtgagcattaagggtcacctaggtagatggtagatcctgcaaaatcgtttttatactcgtccttcaataaatcaagcaaattactcaattactatgacaaagtatattagagacatgccacaatcatgtcgtgaatcctggaaccacttttaagacaaaaatttcacatgggttgcctcgtagaacttattttactaggatcctaatttattaacatgtatgttgattattcaaataataatataacaccctaaaatatgaaatacataaaacgatcaaataacacatatagtttaggatttcttactgtttattgagattttcgtacacaatataataaaataaaaactatgaaaaagaattaaacagagaaaatggagatacagttttttacgtggtgcgggtgttaataaatcctagtccacgagtcagttgtattgggttggatagccttgaagtattacaatggtgttgattcaaaaagctggactagacttctaagccacacacgctcgctagattagcgagaatgaaaaagtagttaagtaattataagagagacacaacaaatttatagtagttcacttcctgtatcgctatattaatggagctatgtctactttgagtttttatttctcacgagatggtaattaaagaaaaagattaagtgtcagaaccttcaatttctagagagagaagctctaatcttgtggttatttttctaagcttcccaaaaatgagcttatggagctcttcttttataggtgaaggaggcccacaaaaaagaaaaaaatatagaaattggataattctgaccgtagatgataatataacggcaaaaattagctcttggtggtgatagccatttttcggtgcccggagggtcccgctgcgggtaacctagagcttatttttgtcactcccttaagggtgaaatttgatgacgatagctttagaattaagattaaagtgtaagacatgacttgatagagcattaaatagcttcgaaatgcaagttgaattgcatcaatcaaatcaatattgagtgagttatgattgttttactaaaggaaattcatgacccagcccccaagttgacatatgacgtcaacctagacgttggctaagtgcgaaagtgtccaagggatgtactttaaggtgtctaagtgatattttgacatgccttaagttgttgtgtgttttggcaaaactggctactatttctctgagatgttgctgtttaacaaatatgagagactcgaaactcttcatattcgagttagtcaaaaaatgagaaatgcaaagttgtgaatttgacttccctaatttcatggatctttgtcattgtgaaaaactagacggacggtcaaaatgacataaaaattggataagcagaacccaacacaccaggccatttttcaacctgggcgtttggtacttactcctgagctctcgggatctcttttttgataattcaaaggctttcatacttgaggaagaggtctcctactctaaccattctagattcattaatagaatatgttatccgtgttttcggcaagggacacgtggatttcgggtcagtactagaaacccaccagtgggttcaaagaagataatttgggccaagcccaagtcatataagacctttcaggaaggcaccttagctctgtgaccagatgagcttcggccaactacggtccgtatctggaagcaagtccagtatcgtggtgctggagagccaaacaacatgttcctggaagacaagtacagtttccctttttattcaagcgcacagaataaggaactaaatgctccttaaatctcgacagaagatcatatcaatctaaaaaggaaaactacctaaaataaagatcaagcaattaattcataattaattacccacaattataggacacggtattgaaaagtttaccgtatcctatcttcctagtcatcagatcgactccttcatgggttggaattcacgagaacagcccaatttatgtgttttcatgtaaactccccattaaaggggaaaatgaaaactaagtataattatttggacactataaatatccaacaaattccttggattaagggttgaactgtcttgcaatatttgcttaggcaaaaatagagaacttatgctcattgtatttttaaaggctttcctaacaatagatacataataatatcgactcgtggaataagactcgttaaccccccaaccacgtaaaaagtttgtgttgttcttattcttctcttattcttctttttttttttttgaattatttatttctgcagctttaatttatcataattgattttttgaaaatctcagtaaatattttggtgctttcattaagaactgagagaagcagtgataccgtctaaagattacgctcagtaatcatggtactcacccaaaacatgtcgagtcttcacttcactgatcctaatgccatggtagaggatacagaagatcagaatgaagcaaccagccatcacaacaattaacttgggaaagacatagatctagacgctcctatattttaagatgattattatcccaaattttatccacctgacatgcatgatcacgtaagtcaagattaaggacatgtggaatatagccttgtcaatagcaggacaaaatctccatacaaagcatgacaaaaccgtcgagcaacaagcaaaaagagttaagtaagtcgtcaagaagttgcacaaccatgtttggctggccaaggggagtacataggctagctaggcgaagcttgtatggccacccagggtttgagcacaagctggtcggccaaagggtgattgttagaccaaaaatagcctattcgactagggaagcctgacctttgcaaggaaagttgtacaaaggctggccaacacatgctaaggctgagcaacacatggtaaggttgaccaacacatgctaattctggccaacacataccaaggctggtcaacacctaccaaaggtggaaggcacgcggaaaagctggcaggcaaatcctagggttgcaagagcaatacttggccggccataggagtgcacaagttggccaaaccctacaagataagggtgggccagccagctcatcttatagcaggcactttttgtgcctttgcagcgtttagcctgaacaacacttcaagtcacgaattggggttcaataacccacaaaaataagggataaagttcagttatttacctattcttggggatcaattaacatattcattatttattattttattatgtaacaaataggtgatatctcctatttataagggatattaaactatcatctcttgtaagttctcatatacaaaaagcactaaactaaacctaatttctctaagttgagaatgttggaaattattttac

SEQ ID NO: 113728 - DNA, 1382 bp, Cannabis sativa
ttttgactttggagtctagtaaaaactctttcataaagaagtatttgttaagacatgagttctcactctgcctcaggtggtctatcaatacagagtagtatagtcagctcaatgacagctcaaccatcctcaccactctaaattcctcaaactattttatgagaatttgtgccaataatttccttgattgttttttgtctattgtattttgccatctatcctcataacaatagctctttccttgtgtaaaccttctattaataaaatgtaatatctcagtcgctatttgagggcaaacaccatcaactgcccaatctcaaaatccacctaatccaaatgcaggtactactgcaaacattaatggagcttcactctccagtaatctaggaatcaccacaaacagatcaccagactaatcgaactatgtcacaaacttcatccaacctttcaacaccataaatcagccattcgttctgaaactcgacaaaaacaactacacgctttggaaaacgattgcttccaccatcattagaggtcatagactagacggttttgtcaatggaatacgactttgtcctactgagtttctatgaactaacatggatgcaggtgacaaaggaacaaaggttgcagtccaaattatgagcactggattgtcagtgattagctcttcatggggtggctatatagttcaatgactaaagctatagcaacggaggtaatagggtgcactacctctgcctcactctagatagccctgaaaaatttttatggagctcattcaaaatcgaaatattgatgataccaaaactgccattcaaactgttagaaaaggtaactccaccatggttgagtacctttggcaaaagaaagcacgggctaatagcttagctcttgcaagggatccttaccctgaaaaccatctaataactgatgtgttatctactttagatgctgactatcttcctcttgtgttaaaaattgaggctcgtactagtactacatggcagcaattgtaggaattgctactcaatttggatatcaagattgaatgtcttcaaaatttgaatgtcacactcaaatctacgatttcccctacaaaaaatatagctaacacatctcctcatactggtcaaggaagaggacaaagaacaccttagaatacaccatttggtctaggaaattactccaataatagtcgtggtggtaacaatcaacgttgaagtcgtgcaatgttcaataacagcgacaattctaggccaacttgccaagtttggccattctatggtagtgtgctacaataggtacgataatacctacatggcaacagactctcacaataaccaaacataaggaaaatcaagcccatctgcttttattac

SEQ ID NO: 113729 - DNA, 4794 bp, Cannabis sativa
  modified_base (3435)..(3442): a, c, t, g, unknown or other
gagaaatttctttgattagcaaggattgcacaataattaaaaaagcactgtagcgtgccttagcattagggcgctacattgggtcaaatgctcctttagcttctggaaagcttcttcgcactctttggtccattcaaactttttgttgcctcatgacacgttaaagaacggaatacacttatatgtagattttgaaatgaacctgctaagtgcagcaattcgaccagtaacactttgaatgtctttgttctttttgggagaaggcatgccgaggaaggccttgatttttactaggtttgcttcaattccgcgagagctaacaatgaaatccaagaataagaaatgccgaaggtacattttttgggatttagcttcatcctgtactttttaattaccacaaggcttcttcaagatcaatgccatgctccttggaggttttggacttaaccaacatatcatctacatatacctccatgtttctccctagctggtttttgaacattcaattgaccatttgctaataagtggctccagcattcctaagcccaaacgacatcaccttataacaatagactcctttgtcagtttggaagctggtgtgttcctcatttgcgacatgcatcttaatttcattatacctagagtaagaagccatgaagctgagaaacttgtacccaaatatggcgtctaccatttgatttatctgtggaagaaaaaaataagccttgtttaggtcagtaaagtcaatgcacattctctacgtgtcattggctttagggacaaagatagggtttgtgacctagacatggtacaatgcttcccgaaggaagtcattggtggtcaacttattaacctccactttcactgcctccgcccttaccagatccaagggtattattttttggtaaactagcattgcatcttctcatatgttcaaggcatggtaaatagtgttacggtcaattctagtcatgtcagaatggctccatgccagcacatcctagttctttttgactgtgttcacaatgttctcttttatggacggaggtaggtttcttcctactttgatggtttttatggggtcttcatcactgatgcttacttcctctacctcttcctttggctctaaatttctttccatcccaaccctgggatctaactcgtctttgaaattctcctagatggccttagtttccatctgatcctccattccaggtgtaatgggtgcctcttcccggaccatgaacacaacttgagttaagatgttgtaatagttcctcccactattctgatcacctttaattgtgccaatacatccattattgcaggggaatttcatgcataaatgcctgatggaagttactgctcaaagtctactagggttggctatcctagtattgcgttctacgcttttgggcaatctaacactacaaaagtagagtgcttaaaatcacttacagtgttttcttctttgacggtgataggtaattggattttcccccataggcattagggcgtctccgttgaacccttgcaattgaatgaggcaaggagtgaagtcagcttctttaagccctattgcatggagtgaaaatttgaacaggatgtttactgagcttttattgtcaaccaggactatggaaactcgtttattggaaatctgcacgtcgattacttagggacagttgtgggggaaacacacatttttgacatcatccttggtgaaggtgatggacagattcatcatcctaggacattgtgctggagattgcaccaacacgcacaattccccttcttccacttctctcaagtatcttttctgtgagtttcatgtgcttcgtgcaagatgcagtgcacccgagatcgtggccatatgtccgtccactgaaggtggatcgagtcctagaggatatggagttctaagtcttggagcgagtaacattaccccaacttgcactagtagaacatggagtgcatgcggttgtgatccaggagcttgaggacatcctacaccctacaagggatttatggcattatgttgtcttggaatgatcatatgcttgtggaccaccccctgttcgagataaatgattagaatctggatccattgtcctaggtttcccgttcttcaaggtttcgatcccatctttcagataatcacactcgtgtagcccttttctctatgataatcacattccttgtgttggtcacgcctattcattcctctgtgcgacatctgtaaaggctttgtatagtggaccatattgcaagttactctgtagacatttcttcgcatgtctatcaaactagtatagtcaatgtatttagggtcatactccttcctcggcttcttcaaagaatcattacagttgttgcttttacaatctcttttgttccgagtattgctcatatttaattccagaggcgatcggaaatgtaattaagatagagcaaaaatgagtaaaatattaaagaacacaggattttaaagaggtttggcccctttagtttggtaatagcctactccccttagattgtattgacttgagaacaaagagcatagtgtttcctctctcaaagctctcacaatgaaatctatgagtattttctcttagatctctctctaaagcaattctttcgatcccttttacagtgaagctagatatttaaaggactaaatgcatgagggaagatttctctttttcttacaatatttataattggtaagaacatacattacatatttagaatacatgaaatgggggattgggatagcttgtcgtatcctttgatacgatctcatgattgtagggattgcttttgtgcttgaacttcacgatatcaaacctgaagtagttaagtcttgatgcacggctcggagaagtaacttcacttgttgctcggatcatctgccctttgctctgctcagtcaagcaaactttgtgcgtgcagatatgctgcttgaagtttgttcagaacatttctctggccaagcgtaaagaataacaagcacgtgtcactagtatgtattgccacgtcatagtgcgaaaaataggataacacaaagaaatctccagcattatgtttaccaacttcagaactgatctcacaattgaagatgcttcaattaagagattgacgaaggatgttgaaggaagtaatcagttagaagttggttagctttctgttagaattacttagttgttatagttagtgtcttgtcagtttagctagctatattgtttgtttctcattctattagagattgcatttgttaatcttgtatataatgattgtgctcaactcattcaatgcaatgtctctttcattctctttgctctctatttttgatctttccttttctctcccttttcttcttcctttctctccattaaacatgtcaaggaactctaatagagagagagagagagagannnnnnnngagagagagagagagagaggacctagaaatagtggtgtaaggagctagcgatggtagttctatagtcaagagagagagagagggatcgagagctgttgggggcctgttgtggtcgtcggtgggcaccgtcggggcttgcaacggtcaatgtgggatccgttggggctacttttgagagtgagagagagagagagagagagagagagatacaatttcaatttcaatcactactacaaaaatagacttcagtgacccactaggaaggactctaaatatttttagtgacccttcacaatgggtcactaatgtgggtgactggaaagataatatttagttaccattcgattaattaaggtcactaaaattttgtagtctctaagcacgcgtcactgtagttatttagagtccacttatgtaaggctgtagagataacaataactcgtattgcacgtcactatatgtattttatttatttaatttttttgatacaacatcacacttttaggaaagcactacagattggttttttattactattatttttattctcattaaactaataattttataaataattctttagtaatttatttttttatatttagtactaatttgttctaatatgtatttatatgtatatatatttcatatttgatactaatttgttctaattagcttggtcaatcaactgtaaaaaaaataataaataaatgaataataagaatatatactatttctttattccaagttaatctgtacatagtaaaaaaaaaaatcttttagatatacaattgaagaaaaaagttaaatagaactataagagtaataacctaacaaaaataaaatgacaaattaatctatacacaagagatttatacaaagatttggtcccgtgatgatggtaatagcctactcccttttaagttgtattgatttatgagacaaagaataaagtatcctctctctaaagctcttataatggatctctgagtaattctctcttagattactatttctctcttgattgttctttctggatcaattctcgtgtcactgaatagtgagattaaatcactatttattgggttcattacatgaagaatgatttcccttaattataatgaataaaatatgaaactagtttaattccataattacaatgtatagattggggaatctagatttattgcctttattctttgaattaattccacgaatgtagggttcattttcgtgacatgcaagcttggaaaaaacgacgtccatctctgaaattaccaactcatatttcttgactggttgttaggttatttttagtattaattttagattaagtttagtatatttttaat

SEQ ID NO: 113730 - DNA, 2536 bp, Cannabis sativa
atgctattttgctcatgtaacacattagatagaagagatatacttgaacaaggaaaatattggaaatttttttgttggttgatttagttattctcattacattttaaaaaattaaaataaatggtttaattactcaactaaataattaaaataccttctcaataagcactacaattgttgcctatgattttacttcttacaatatggtttgaattgatagctgtttattagattacttttacacatgaccaaattcaccatgttcttattctaccagggttcagaacttactaacctgatgttgagatctctagtataggcagatgagattatagtgaatgttccaattccaaagatgaaaactgatcttgatatctctttccacattatcaaatccactgagaggagaaacagagaaacagaggcaatcattgaatacccaaaatcgaaataattcagaaaagaaattagtatcaaaagttgtaggcactataactcaccaaaactctgtaaactgctatggttttctggaaaactatggtaatcatctgaagctgcagctgatattaatgcaagaattaaatacttatgaacagaacaaattaaaagaaaacagcctcactaaaaaacagcagcaattgagagaaaattgcaacgaattgaagaaaaaaacactcacatgcagaagatttagcgaaacttgaatgaacagtggccctttttgttacaggaggaagttgttttttcacatttaaagacatgggctctggttgcttttgataagcttgatgaagcttcttaacatctcttctttcaaaatggaccttctttacttcattcacaaccttttctccatagacaatcttgttgggttttggctttggttctggttctggttctggtggctttgattctggctctggttcttctggtactggctctggttttttaatttcctcaacacttttcttctcaacctcaatttcctcttctccttcaacaacaacttcatctccataatgctcctcctcatcttgctcctcctcgtgttcatcatcacattttggagcagatttcagtaattccacattgttagaaatggctttttcttcgcacacaccaaactccttacaaccttcatcagatccagatttcacattctcaattgggcttttctcaatttcctcaacagacccatccattgattcatccaacacctcatttgtctcactcttcaccttcaccaatccaattccattcacagactcaccaccaccaacactggccctcgccggaactgaaaccgaaaccgatttggccttcctcaacggagccgcaggcaccgaattcctctcaattccctcgccggattccctagcttccctcaacgattcagacctcgtcttcctcatcccaattggactcttcaccaattccttattaccaacattcccctcagatctaagcctcctcccctgaatcggactcctcttgattgctccatccccactcacctccttaacctgttgttcatcactcttccctttgttattctgaatcggactcctctcaaaaccatcaaaattctcccatttccacatcttcctcttcccaccaccgacattgccatttccaacacctttcctcaacttattcccagacggtgatgatactgatactgatggtgatgaaggagtattcccattagactgatcttcaaaaccttcctcaccagcaatgaagaccttaatcccacctctaacctcatcatgcttcatcctactctcccaaacagaacctgaaaccacaccaacactactcctagttccaactcttctcttactaccaatatcatcatccattatctccctatttatctctctttctctttctctttcttcttttttctttctagcaatgagtacaatgggacatagatgcttaccaattgaaaaggaagcttgaagctgaagaaaatggcggttggtttggttggtagtaccacgaagctcaacccaaagggaccccttccttcttcttccttctctctctgttttttttttatttaattaaataaaatagaataaaataaaagggttagtagagaagtgagtggggttgaatgattaggggtgtgttttaactgttaataaaggtaataatataaaagaaaagagaaaatctttaataattattattctcctttaacttttttttttatttattttcataatattccctcaacttttgtataattgcgtaggatctccctattattttattttattttttttgggtactaaagagaaaaggtgatctctttctcttataagttcacatgggaattgaatagagagaaatacagaaagagagtttggggatgatttgggcacagaaagattggaatttgttggagtgagtgcttctccatttccacaacctctcttttatcacccaatttttagaattaaattaatgtgtttttattaaaaaaaaaaaaaaaaattatcctttatactatttttttaaatttttt

SEQ ID NO: 113731 - DNA, 4514 bp, Cannabis sativa
gtgcttagtagattggaggagtgctgattacaattataacttcttaatcaatctccacgctcgaaatcacatgccgaaatattttttttcaatttttttatatagcagtattcgttatgattacaacattattcttgtaaatttttgaatagtttacagtaccaaaaatacatttgaagttttttgaacacgcgtggtaaactggaatatcaggaaaggaactctatttttggtacactgtaaactatttatttggaatttaattttttttttttaaaatttacagggatgatatactgtaactataacgaataccgctataaaaaagaatttgaaaaaaattatttcgatatataatttcaaacgtggaagttgactaagaaattgtaataggagattgtaattagcactcatcttttcaaaaaaatctaccatatttattcttttctactataccttcacacacagttatgcgccatatccttcacaaatatttgtgggagttttatttttttaatttttatccaaagactcttaaaatcatttttaattcacaaattttgagtacataatgtaaaacgaatattcatgtaaaacactaatttgtccattttgaatatatatgtatatatatttatgtaaaaaaaaaaaaattggtttagagtggtttatataagttttaagaaagaattaaatcttgaacttgagaaaatattcatgtaaaatacaaattcgtagatttctaatatatatgtaagagacttttggtttttttacattatttttactccaaatctcgatctttgaaaattgtagatttttttttatattaaagaatactctaacgatagtttcatgaaaactttaagttttttagctaaaaaaataatgtctaacgatggcgctataaaaatttaattttaggcagaaaatgattctttggcagtattgcaatgaaaactttatttttcaagaaaataaacaatgataaattgatatttagcgttgttctaacgataatcacataatttttgagataaaaacgatagtttgcgacaaaaattgatcaatttgagagggttgtattcatggtaccattactagaccatccttatagtaaatttttttaatatgaaccgtcgttatagtattaattttaattgaaaatcttaaatctatccaaaaaaaaaaaattaattaaaatttacaatttccacttgcaaaaatatgtggaagaagaaaaaaacgcaaacacaaccaaaaaaaattatacatgagtacttgaaatctatgaagtaataattgaaatgaacgtttttacaggtttacattatagattgaattttgaatcctaaaatcttgatagacaaaatttgacaaaaactggctggaacacatttttctgtaataataattaaagttggcgaaaagaaccaaaaaaaaaaaaaaatcaaatcaaatttccctattggttttgtgtgtttgtcaaagttgtgtgattcgagtaatgctgatattagtttgttcgttgttatttaatagtttattatttcaaccaaatattgttgtttcggtataattttgataatttggtcttctttcccataattcaataaaatttatcgagaaaaatacaagcgttaaaaaagaaaaatataaaatgcttacagaatacataaaataaaaaggggtattagatttatttgtgaaagctgaggttacagaagcagccagtgtgacttcaaatgacagcacaacaatgccaaatgaatcattttaaaaagaagaagaagaaaaaaaatatatcaaaataacttaaactgcttaactaaaacaaaagtttggtacagttgatcacacaaagttagttgctatcatccacaccttgattgtttacgaacaaactttctcttctcttaggaaaacctgttgaatctatacccgggcttctatatttcagctctgaacttctgaagttaggatcaacagaagttggcctattgttatggtcaacagaagctggcctaaaggaactggtggcaccaccaccggaatatctaggcggagaaacgtaccttctcgtcggccccctaaggccactccctctaagctccatcatatcgttatttcttgaagaagagtctataaaagatctgtctactctgtctccagagctagttgttcctaaaggagcaccagttgtggcacctgcagcagtggaagtagaactaaaaggatcatctggtccccatgaggtaagtgcttccttcttcttagcaaagaattgccacgctccaaagagaaaaagtacaaagaagagcacagggcttgtccaaaatatggtattgaattcccctttatatactggaaggttggagcgatacatgcccacatagccaccaccaagcccaacaacaataaacttttcacggtcactggctatcaaggggattaccctattcctctcctcatctgattcaatgttctgataattcaggaaagatgatcttaattcgtcaagaccagcagagaaaataatccgaggagctccaactctaacataatgctgagatgaaacattatgaacaaaaattttatcctcactcacaataagcaaataaccctttattgcctgaagtgcaagaggatcattcatctcgaacttcttcttagatctaaccctgcatttgaagttcattatatcacctaacagcaaaacatggataagatcaccttctgatgtaaaaccatatgctttagaccgctccatcacatcaaagacgtaattccgagcaagagaatggttcaaaccttcacactcagattccctgaccttcatacttctcaaatctaaagaccctgctccactctccgtcaggaacagaagccgctgcttcaagaaagctagtggcctactgttgggtgtagttgaaccataaagtgtcccattctctctgaaaacccatatcttccccctaacatcagtggccaaaatgtacttcattcttccagcatgatgaacctccaagattgttatggatgctccatctcctccatcataatcaggggatacaaacttaccaacgttttcaataagaagcgagctccaatcctctccacttgatccctcccaaatccgatgaatcaagattataccatctttatgccctgtgaccacataactctcgttcttataaatcgataaataagaaaccatggctgtgatgggggattcagagagagtatgatgctgaaccaaaacatccccatttctcaaaaacacataaacagtccctctctcatcaccaacagcaacatacttacttaaaccctcgtaatccctaaatggcaacacatttatacaagtcgcctgagaatccaatttcacagctgatacaaactggaacctctcagaccaaaaaggactgtacttcgtgaccgatacagctcctgatctcgactcatcttggatttttcccttcgctccttcttcttccatttctgtaatggactttttgacctcgtactttctctttcttaaatcgttttttcccttttccagctttaaagcttctatgacaagattgtcatcctcccttagtaccctttcagaggaatcaggtagcttagattctaatctagcaactatttcactaaggtttctcactatttcatccagtctttgcaacagagcaagttgtggatccaatacaaaactactcccggttttgtcatcagattcgtcttggatcaggaccgtgttacaactcacaaaagcccgattaagaagtggaggggaagctaaaacgaaaagaaaatagatgaaaaagagcttgcctttgagtgaattcgccattgaagaagctaataataactatggcatcatatcagtgcatctccattgtagcaaaaaggtagaattttgtggatctgggagtacagtatctatgtcctcaagtccattgtagattcaataattccacaggattgatctatttttggagtgagaactcaacattagtagtgtgactgactgtgttgtgtacggatcacaaattagattcagatttagggcaacaattttctgctctaatctaatttacacgagcgagaatatctagggtggggtggccggtagtgtaatagaaaaatggaaaatgttgcagtaaagacaattctatacttagataaatgtgctcacctacagtgttgtgacacgtggtggattgggacataaatcgcacctattataaacaaaacaaaaatgttttacatccgaagccgatttaacctaccagttcatgctacgtggctgaatgagattggttagacacttataaaaggaaaattagtgtcccaccaatctcattcagacacttattgcttagcaggctttgtatgtgttgatctacgtgaaaaattgttaaaatataattaatatattttaattttatatataaaataaataattaataatttttacaaaatatctattatttatctattatatatat

SEQ ID NO: 113732 - DNA, 929 bp, Cannabis sativa
acagtgaaaggtcgaaattgaccttaaaattgatttgtttgttttgttggtgtagggacaagatagtaaattcctatcttaaaattcctacatatcatttggtaactttttaaatatgaaataataaaatttttagagtaaagtatggtggttgtattaaattttaaaatattatgtggttttcttattagttattttaaaaacttacaaaattattctacaaaataagcttatgtataatacaatacaagctagtaatctttaaatatgacatagccaaattatttaatttatgaaatttagtttgagtatgcaatttgatcattttattaactaaatagaaaaaaaatttaaaggttaaatttgatttcaattattttgtttaaagatggtaaaataatatctgtttctcacatattaaagaatcaccttaaaatgtacatcataatagtataatttttaaatccaaaaagttattaatttgtctgagaaaagctattgaaattatagaagaaaaaaaagagagacaatatataatttatttattattattttagaaaaaaaaaaagcttctctttacattaagagaataaaggatataaagagagaaataaaaaaaatataagaatatataaaaaaattaatgtttgagtgtaagaataaggtagtagatgttagttttaaaagaaattaaaaataaattactccatttaacattaaattgtacatcgagcttcgtgtaaataatttaaatattttggtgtgtattgtaatttgctcaattttatttgtgatatcatcgtttgaaactatagcccatgtccgaacttttagaacacagattatagtaaatggtcccaaattataagagtgtgttagtttatgtcctcatttaaaaaaaatatagcaaatgaccgtaaattataaga

SEQ ID NO: 113733 - DNA, 4942 bp, Cannabis sativa
ggtttaccccattggaataaacaactgataaattctcattcactttctctttctctcttcttcttctttcttctcatctactttatgtaattttatattattttataataagagttaatatatataaattactatatataagatgaatggactatactcttcttattgtcaattagttttaagatttaacctcattcatcttattttaaattctaacatagtatgaaaaaccaaactaaaagtgagctaaaagagctactatcttaagggagatgttgaagttctacatcactaaattgtaaaaatataacactatacataagatgtacaaattacttttctcattattaattagtttgagataaaatctcctacattttgctataagctgtgtttgtgatacggtgtgagcttaaaagcaaaaacactgtattatatttcaacattaaggggtcttgcatagtataaagattgaaataagatggtttacaaaaagaaagatgcccaaaattcggtctaaaagcagcattactaacaaaagaagaaaacttaggaggaagggagattccgtgtaaatgaaaatgggtcacgtgggctccactctcacaaaagtaacatgcatttgcactgtgtaatcgcactgataagattctactgtcacgtaattctacctcatccaatggatattttcgtccattcgtacccctaattacgcggcgaaactagttttcaacccaataattttgccaaattcagctagaagtagctgttttccacatcatccatttcccattttacccctcgccttttaccttttgaccatcctcgtactcctcactaatttgtctcctttccctcaaaggctctcactttctggccctatcatcatcttcttcttcaatcttcaccagcaaccagtaaccgaagctatttacaactctgctagccaattacaaaccctaactcatctcttcactcactgagtttctgttccaaaccaatcatgagtcgactcagaagaatcgagctcatcgagccttacacctacttccctgcttcttcccctgtcttcatccgcgaaaccacctccattttcactcccaaagccctagctttcccttcgtttcttgaagatttggaagcctgcgagctcgacttgattatccctagacctagccccttcgagctcttcgaaagcgtcaccgatctgatccgggtcgagcgaaagccgtcgttgtcgttgcaaaagcgaattcagcgattggaaaagctagggggagacattgccgtgcagagattgagtgaccgagttagtgagttggaagctcgtttcgatcggctggcgaagatcaaagacgccggtggtgatcggaagtacacgtggactgcggagacgagaatccctgcgaagaacgttgatcggaagtacaaattgacggcggagatcaaagacgggaagaagaagaaggagacggaagtgagtgggaaatcttacaaattgacggctgagattgaagggaacggagctgacggtccgatctcgcgtacgtacacgttcaaagcatcgagcggtaatgcaagtgagtgtggagaatcaaagaagaaggacaagaaaaagaagaagaatggtgagaaggatgagcatgccacgcgtctggtgaggattgaagagacttctgatcatggggctgtagttttgagacaggtatgactgaaagtagcaatttaagccatggtagctttgtgttatcttttgttgttgggtttatttggatgatgatggccctcctctctttgtacattgctttatttaaaaatattttatttatatttttgtatgaattgaaaacgtcaatcgaattgggtccactagttgaccaattataacttgaaattcagttagttgagcttcagctaaggctccattgattttgacattgaatgaaccttgaaacaaagttaaaatgtgttagaaatcaatcgtttcttgcaaaatttaatgtgacccacccactttctattatgacgaaagaattacttagtgtttcatcgaaatgcatgaatttatcttttattatatgttttgtaagaccctgtattgatttattcatttatttggtgggttgaggaaggcttttgcgaagagaattggaggtaggagtgagaagggtaagaagaaagaactatcgcctcaagatgcagcaatgatgatccagatgaccttcagagcttacctaattcgaagatcacaggctcttcgtgcactcagagacctggcagttgccaagaccaagttgaaggagattcgaggattgttcaacaattactcttaccgcagccttgtggctcgtgatgctgcagagcgtcaaaggttctcagagaaaataattgtccttcttcttactgttgatgctattgaggtaacttatctttctcagtatgaaatgaagctcataaggatactcttgattttgaatgaagtatcaaaatatagcattaagaacttaacatgagtataattttaacaaccgattatatgaaagcacaagccttgctcgttttagtttgaggtttcaaagggagggaaggatgaaaagtgattattggggtttttatgggactgcatgatcacagatgattttgacttattggggagcaatgcttaaagaaaccaaatgtataagttctcatgttaaagtacttggatactagaacacgacacaatttcatttaaagaggagtatagcttctgtttaggtacatcatttccaacaatgtcaaaataggaatttatgtcattagttgcaaatctttctgcttcttgttgtggtattattgattgatgatccttttcctttgaagtaagacttcgttcaattttgagattttgtttcctttcttatttcttcttgaatgtggttctgatactttgcattgtactagggagctgatttgatggtgcgttctgcaaaaagatcaatggtggacgagctggaagcaatgcttgatgtggttgatccacagcctgggaaatcactttccatgagaaggagaaccttcgatatgcctgacagtgtcattcagaaggaaattgctgcaggtgtggccgaggttgtccaaatgcttaaccacggagagaatagttccagtacctttgaagcttgcttgtgaagagttcctggtaaattgggtatttgtggtgatcaaacctctaattgggtagtgttgttttttccagtagtttattgttgtagttgagatatacaacctagttgaggagatttcgggggacttgttttcccccatgagtagattcttcttagagctgcttttgtctccttctcccgtttatctctggttgaattgaagtcagttgttccttgctttcagattccatttatatttataatgaagacctttcacttttgtattatgcatttatccattaatgttctgtgtaccttcttcattcttcattcaccactcaacgcaacccattccagcaaataacttcaggtggccttttttttctttttcttttttgtttttttttttggagaaaattataaaaatatataaaaaagagatataggcacgattaaattagtgtcaacaaatgcaaattttagtgcccatagttattttgtcgtgccaataggttcgtgcctaaaacaagcaacaagcactacaaaatcggcatgccaattgactgatctaatggcacgactaatgtggtgccaagctgaaaacgtaaactttaataatcatacgtttaggcactacaaagttgtgccaattagattttatgtaaagaaaaacaaaaatatatattttaatttaaatataaattatgaaattaataaaagtgttttctatctcataaattaaaatccaaactacaataaaagtattaaaataacaataataaaaaaaaacattcaaataaacaatacttataacatcatattcataccattacaaataatgatactataatactaattttgtagactcctaatcgtcattatcatcattctctccaaactgttgttctggaatattcagcatttggggatagtaaggctactgtgatacttctggtatttgtggatagtttggttgttgtatgtgagacatttgctgcatcgatgacaatggttgcatctgagacgttggtgccatatgctgtgtcaatggcatcgaaggcgtatgcggtgtctgctgcattgaaggcatctactgcaaatgtgacatttgatgcatatgtgtcatctgctgcatctgctgaacatgtggtgtgtgttgcatggaagatggttgcatatgtggtgtcttcatggaaggttggtgcatctctcgtgtttgctgcatcgatgacatatgttgcatggaagcttgctgcatttgtggagtcttctgcatcgatgtcatctgttgcatggaaggttgctgcatttgtgatgtctgctgcatcgatggcctttgttgcatttgtggtggatgttgttgcagttgtgatgtctgctgcatttgtggtggatgtttttgcatctgttgtgtttgcggtgttcgctgcatgttcatcacttgcatttgcgacatcggcgatgacatccaaggaaaagggaatatttgcggaggtgatgacaaaggatacataaaaggaggcaactgttgggcttggtgatattgcgaagtcccaggctgtgaagatgaagcagaccctcctccagacatttgaggcattgccattccgaacagctcctcatcagtaggcagacgaacatcaggtcctaacctttgagacatccacaacataagtctagtcaatttttcaaatttttgctccactcttggatccacaggcatatcttgagtcagagtaggttgtgtgttccgcgacgaagattgccccttcaattttttccccactccacgatta

SEQ ID NO: 113734 - DNA, 1404 bp, Cannabis sativa
actagcactgcaacctaaattgcaacaaaaaatcgtataaaaactactagtgcaactaacactacaatcactttagaaactcaaaccctaaatttgaagaaaaaaaaagttaaaaaaaatagtatatgagataattctcttattttatatatcaatatattatttcttaaaaaaaaattatttttattcacaaaaaaataaaaaatatacatatataacaaaaaaaaacataagttagatgtttaattagtcataaaaatttcaatattttgtgactaaatattttttaatcataatatttatcatggttataactaaattagaaaacaaatcgtgtttagtgtgcagttatattttgtttaatgatacttaagtcataaaaatatattaaattttaaattttgatattttttattttaataatacgagtaactattttattatttttttaatcaatttgttattcatgtttccagaaaaaagacacgtgtacttccaagatctaaattcaattaacaagcgtccagtatataagcccaaacaagatatttgaccgaatttactaagtctatccatcagggttctggaaaggcatctcgtccaagcgataagaagagctcaaggaagagatcatctggatactttcggctcaatcaagataataaatcgaatttactaaatcgggccatcaaggttcccaaaaaacatcttgtccaggcaataaaaatatcctggtgtatcaatgataatctagaaaggtaattaatcagtctctagatgtcaaggttgattctgtgcttatttaatattgaatcctaccacattaggaattcgtttccaagggtgattccagaaatcaagcattccatataagaaaatatgatgattgtcaagcactcaataaattacatttatttcacacagaaatgactcatatttttcacctgccgtcaagcagatcccacataagcatataaaaatagcctcatagactgggcctcatcaaatcggcttaatgtcaatatattatttatatttacaccatcagtggaccacgtttatatagaaactctagcctataaatataatgacaatccttcatgtaaagggttcgcaatttatttcttacaagctaaggctggaaatagggttcataaatagtggacaaacacttgtgtaatactaaaagtctttcttagccaaataatattgacttgaggactatagttcattaatactcaaatgatttataagtacaccgaatttataatgatgtaataattagcgatgtggtttacttacactttgtataaatggaatgtcttttccaggacataagtaaagtaaacttgtatcagatgtattatttatacatcggattggaccgatattgacagtaaaaaa

SEQ ID NO: 113735 - DNA, 5101 bp, Cannabis sativa
  modified_base (5070)..(5070): a, c, t, g, unknown or other
ggggggggggggggggggcaccaagcttcttccagatacggggaaggagatggtgaataagaatctctgtaatctgcatacgagtaataaatataatcaacaatctggtaaatgttggacacacttcgattgtgtaccttatcattccgcgcccgccaaatagtatcgacaacaatcgaagcatacagaaacacttcatcgtattaatgccttgttttcctagaccccagatgaatttgatccagtcccacacgcgaatgcctgagtcagaaattgggaagatcccccagggggacgattgccatagatgagtcgcccaattacagttgagaaataagggctccgaaatttcctcaccaatgccacattagtcttagtttttaacgctttttgttttaattaaaagatggtgtgtgttaggggatgagttatatttgttttaggggttgatgtggcaattattttatggcaccataaagtatataaggagaggggttctcttaaaaggtattgagaaaattggtaagagttgagattcaatgtggagagccccaatcctctcgaatagattgtaataggacagaacaagcctctcgaaagcttgtgatttttaattttttccatcaattcaataaagtttctgcaagaattttagctatcctattgtgtaatgacaatggttaattctatccaacaaagaacttatcagttgcttggatttcgttgggtggctagtcaccctaaataatttggtatgcttggcgttgtggggcgtcgaaagaaatatgtattctccgtgataaagcgaaaagtgtggaataagcttaggggtggaaagctagtttcttttcttatgcgggtagggaggtgctcattaaagctgtaatctaagctattccttgctatgttatgagttggttcttgttacccaaaaaacttattatcaagcttcatttatggctgcccatttttttggggggtcttctcaagcgaagaggaagatccattggagctctagggatgagttgtgttttcctacaaagaaaggggttgggttttcagcatcttagtgattttaatttagctctcttagctaagcatgggtcaaagattatccattagcctcattccttattacctcaagttctttaagctcgttattttgttaacgttgattctatggaggctagcacgagtacatacaagtcttgtgtttgccgtagcttgttatggggtagagatgttttggctgccagtattcgatggtaggtgtaaagcgagaataacattaaaatgaataaggataaatggattcctcgccctatggcggtttctcttaagcttgtgttcaccttggcaaaaggtcgacagtgcctactacttgggttttgctgattaattatgatgctgctcttcgggaggctagtttggggtgtggcttatgcatttttgtcttggatctacgtgggttagtggttgcttctgctactgtgtataggtaggctcttttttaagctactattgtttcgtctaggtaaggagcttagttccaattggcagatcagcttcaattgcatcgtttctatatcatttcgttctgcgttcttattgtggttgctttggcccttcagcaagagcaccacacactgattgttgcatccattaaatagtcttctagttactcgattgtgtgacttgttttcattcttttcatgagacaaattttatgggtcatgccatttctttcttcatgtgttgttcttggtaggtcgttgtcatgttgtgagcgtaggcagcttttttgatgactcgtcgttgctagagtttctttctttgtaaataaagctttccttttagaaaaaaaaatcgtcttatttaaggttagtttaccttaaaaccctagcgttgcacaataatgttgattgtagctattaactccaaaatttcacaaggtgtaatctcgaagttatgatgagtggattagttaaaaactatgaggttttcccttggtggtgatatttgaatgttaatcacatagtttaagtcagtttgggtgcctttggcacttatcagaagaaacacgaaatgattgatgactaaagttgtaaggcgtgtcctaccagtagttttaggcatctttaaattgcaaacaagatgaatagcaaaacatgaaaattgtagatctttttctcagttttctgggggagcttgaatcacccaattattacttattttaagaaagttatggtcaatataataggggctacgcaataggaggaatccgagcgagagaaatgtaggaggctcaccccatcagcgatacaacgcgcccgcacatccccataagttacttggggccccacaggctagctcaaagcctcaaaactcccttagaaccattggcgttcatcctagaacatcccaaggaggcaagtgaaccaaagaagtgattatctcatggcccctttttacctcagaattaactaagtaaatatattgaggtcacgacaaagagaaacgggaagagcggaagagccacaagaaaaaggcctcgctggtcatcgtgacgcgctggacctccaaaagggtgttgtctccataagagtctcgcctcctaaatggtgttgcctccataagagcctcacctccataagggtgtcgcgtccataagagccttgcctccatgagtgcctcgcctccataagggaattgcctccatgagggtgtcctcaataacgaaagtgattttttttgtgagaattggaggggaattcattggagatagaattaaagggaggagcaaacaccttaagatatgatgaggaattccaaagggaattaaagacggctaagaaaggaaggatctaagggtatgaccacgatacctgcaaaagctgtgacaaagtagtggacgaccgttgggtacaactagttagaggtatgcatgtgtcagtaccacctgacacctgaacaacaatgcctccacatctcactaccacctaccatcataatagtacatggtccccacagggaccacttacatcttattttgtaaacatggcccattgagctcaagtataaatacctctccattccattagagagggggttggaaccttgtgtattaagagaccattttttgaatacagaacacatcattcattttagattttgaagacatgttcttcgcttcatctttaatctctccctctctcatttacttacatcatctcataatcatccaagctaattagcaaattaatctaaggtttccaaccgtaactttgttgacaagttcttgtcattaatagtttggcgccatctctcgaaaggacaaggtttaagctacgtttttcctagaaagatcaatcaaagtttcaaaatgccaaggcattctcgacaccacaaagatgttgtaaattttttggataacaaccgactagtggttaccataagaaacctctcagctttggtcattggagaaaacccaagtggatatgaccaacatggacattattaaagcctagaagaatagacaacttagcaaatagaagtcgtcatacctacacccaagaagaccataaaggtggaggttgtacctgaagatactccgggaaaaagaatgaggaaaagcttcaagcctttgacggcaagaaaggccaccacaacaaactatagtgtcagccttgggaagagtggcctcaaggaaagatgaccttaagaagttttcactgaaaagaaacccatgacctcacctaagaagagttgcgtacatgccaaagatccactcaccaaagctaccgttgcaaaagaaggacttgaaagcccatttagtcagttgtgcgaggcccagagatgtggtgtatgtgcaactgtggtatcgagaggtaataaaatcactttttagattggttgaaaggcattcacgtgtctcatgggtacgacgatccttagcaaaaaactctccacagacttagaacaatatcgtggccaaggggaaacccctgttaaactcaccgcacgatggcagaggcaaggaaagccccctagagtgcctgaaaggtcaaatgagtggagcgaagcctatcaccaacaaacttcgtctcaaacttgcaagaaaaaaatctttgtcgagatgctagaagccatgaaaataggggtagtgtattaaatgagcttgatgcaacaaccactagacctctgaccatggtgacgtttccagaccaaccagtgatgaaattttcttagaataaatcgcacccatgatgatttatgttggagaggataaaagacagttactgaggtcacatgtgtcgcccttttccacagggacgccacgtgtgtgcttttataaatttgtttatatataaactattggtttaagaatagtgtgattaaattaaaacttttgataaaatttattcaaattaaaaccttagatttcattcaaaatactattaaattcagggatcccctttttgtttataaacttttacatcacatcacaaaattactattacaaaatggggttatattttcaaaacacgatcaaaaggtggatcttgtccactgtagccaagacacagtggttgatatgtacatcgctgggcgacttttaactcatggctggtccaatatttccttccttttacctataccacgaagcacatgtgagtcacaaagactcagcaagaaaagcaagtaaaacacaaacatcgcataacacgagaaattataacaatgcataacatacaaattcatcacgcattataaatacttattcaatacataatcaagcattacctaaataattatttatcttataagacaaaccgactttgatgcctcagaaagcttccttaccacttgttactcacgagctacgtatgtcactatcgttacctaattaggtaacagataagtaagaaacctatcagcgatttcaaagtgagtaattactcatgaaaaatcgtgtttttgcaaatgtcaattatatataagaaaatataaaaacgtatgcgtctgcagaagcggaaagtaattctgttactgtagaaaccagttttgcantgacgaaacagaacaggcagaatataaaata

SEQ ID NO: 113736 - DNA, 2076 bp, Cannabis sativa
tccaaaatgatatttacccattaatctatcaatatttataaactaaataaaaaaaattaaaaatgaaagaattaaggagataataaatcatggtatttagagtgattatagaccgtcacatcaccgtcttaagttttatatatatttatatagattgatattgatttttattttagttatttgtatttttagttgaataattagtttttatttatttatttatttattttgtggatgttattcaataaaaatatttaattgaagtactatttataaaaaaaaaatttaatagtatttaaaaaaaataaatgaaaatattatatacagttttaagcaaattaaattaaatccaaaatattaccaagatgtatcaaaagcaataatattaaaactttataaattaaaggaaaccacttataatatttttattattttttccttaaaaagtaatttttaaagttttaaaaatttgaggaaaattaatctaaaatttaagaatattgaacgtgaacattataattgatgttgtttgttctggggatggaatatcttactagaattatgagaagaattggaatgaaacctgatttcagatttcatgacagatgcaagaaacttcaactaaaccatctcagctttgtggatgatgttttactgttttgccatggagattacaaaagtgtatcctatttgttgcagtgtctcaagcttttctcactatcttcagggctctttccgaatgcaacaaaatcagccatctattgtagtaacatgcctgaaaatgaactgaatagagtacttgctatatctggcttcacaaggcatgagcttccatttagttaattgggagtccctattggtgcaaagaaaatatcaagcaaggactgtgcaattctggctgagaaaatgacagggagaatcagaacatggagtacaaggcacctttcatttgctgggagggtggcattgatcaattcggttcttctttcaattcactcatactggagtcaggtcatgctattgcctaacaaagtaatttaagagattgaagctatttgtagggctttcctttggaaatgtcaacatgcttttcaagggggaggagccattgcttgggatacagtttgtcaaaaaaaatcagctgggggaattggctttagaagagtcaaggaatggaatatggctgccatggtcaagtatatttgagctgtaacaaagaaaaaagaaaatctatgggtcaaatgggtgcattcgatatacattaagcaagagagctggtggtgctaccctattccaatacatgagagctggtattggagaaggattgtagcactaaagaatcaagtatgttctcttgtagatactgctcaatttgaaagctgagagtaccatattgcagcaggatatgccctctttgcactagtccaggagaaaaaaaggtggtgtgatcaggtatggggaagattcaatgtgccaaagcatagtgttattctttggataactatttatggaaagctgagaacaaaagataggttgtacatgtttgccattgtggaaaatagcggctgcaacctttgtaacagccatgaagaaactcgagaacacttgttcttcgagtgtacctggtctggacaatgctatcaagaaatagcagattggctggggtggaggtcgattgattcgaacctgcccagggtgacaaagtggattcaaaaaagcaaagtcagtaacttcaaacgaaaattcatggttgctgctcttgctagtttggtatacaatatttggaaagtcagaaatgagacaatatggcaacaaaagacaccttcgacaacccaagtgattagccgaattaaattgatagtgaagcaaagagttacacttgtatggccaaaaaaagtgagcaaaaaagatgaagattggttccacactttgtaaataaaattgtatagaaatcaaggccttgcaatatttgcttggtgcttttagagcatctccaaggagtacactaaatttggtgtcacactatcattaaatttagtgtcaaaacttatttctactccaaccataacaccaaaa

SEQ ID NO: 113737 - DNA, 2905 bp, Cannabis sativa
gttgagttatgggtcaaggctcatggggtccctctggaactacttacggacgaagctgcagtccaaatggctaaccgagtgggaaagtttgttgcggcagatagagtaaggcgaaatggcatactggtgaactcttttctccgcttccggactcggatcaacatctccctacctctggttccaggggtgtcacttgaaggtaatggtaagaaaaaacattgggccttttttaaatttgaacaactgcctgtgttctgctttaaatgtagtgtaataggtcatatggaggatgtttgttctggtagaaagagagttgttcttgttgatgatggcaggagtgtcccgttattcggaccgtggcttcgtgatggctctcgactagagaatggattcgccttacttgaggttgaagagattcaggaccgtattgttttggagaaacatgatgtggctcaagactctgctccggtctctggccctcatttggaggctaccggtgtgagaggtgttgtggaaggggaccccgagtctagctcgaagaagattggaggtgatgcccctggtctagttagaaatgatttgctaagtgggggaatggaaggggtccctagacaaaggtctgatacggcctttacggtggcctataacgactatgtggaattaccatttccatctcaacatgtggcccaggtggccaaaatttttcaagaaaacttaggcccggttcgctttggggcgtctttgaaggatgacgacataacgttgaagcgcaacaaatccacctatcaactcaaaaagtctaagatggttggacctaatggaattccaaagacacttgtgttccgtttctctaatcgtgacttggaatcgaaatcagggggtaaacgtaagaagacttgtcgggatgactttactggtgagagtactggaaatgattgtattgcggtggtggaaaatcatcgggttaaagatgtttttggggctggaagtgctatcctacctggtgatgctgaatcgggtgatggagactccactttttccaataagaaactgtgtcgggctgaggataatttagccactgagatcttacagtgctcaacccagtcggagggtatcggtggcgcttcgggggacttggtggtggaatccgcacctgcaagaattgatggtatctctaaagttgggttgtcttgtatttcggatgctagaatgcctttgaatgtgaaacccaaaagtggtgacaatgagattgtggagaaggattttctgttggccgaggaggcgggccgtatcatgccccccaaatccccatgaaactcctttcttggaactgtcggggcttggggcaagctcgggcagttgaagctctgcggggtttggttttgaatgagaatcctgatgttctttttttgatggaaactaaggttaattccgttagaatgagtaatatttggcgtcgtttgggtttctttaatgctattgtggttgaggctgaagggtcttcgggtggtctctgtctgtgttggaaatttggtattgatgtggttaatctaggtgctgataaatctgctattactgttcgctttgccaatattttgaacaagccggcttggaatgggatctttgtctatggtcctccagtgaggggtgatcgggtggatttttgggagtccctatcccttcaggtctcgtccatgagtgagccgtggatcttattgggggatttgaattcgctgctgaatcaaagtgagaaatttggtggtagtttggtttcttcgggggaaagccattctttatccgattttctaatgctctcgggaggtgttgacattgggtgtattgggaacttctttacgtggtctaacaaacgctcgctgccttatctgatcaaggaaagattggatcgcgttattggggcgcctgagtgggtcattaacttccctaaggctggggttaaggccctttctattagggcctcggatcatgctcctttggttcttgatttgctttttgatcaagagaatgtccatagaccgttccgattcttggacgcttggactcgcgatccttcgtgttttgatgtggttagaaacgcttggaatttggcagtgaggggggttaaaagcttccaattagtctcaagaattgctaatactcggaagatgcttgctaagtggaatcaggagtactttgggttctgtaaggaaaagctctcggctttggaaaagttgttgctggatgtacaaaatcgagtcccctctcttgagaattctcaattggaggttgatattttgcttgaaattgacgaagtctctgctcgtcaatgtgatatttggcgccagaaatcccgtgagacttggctgagggatggagatcgtaattccagatttttccatgcgtctacggtgattagacgaaagagaaattttatcggagctatttctgatgatggagtgcattggcttgaaagtcggccagagatcggagagtactttaatgcgaattttaaacaagtttttacttcggcttgcccagtgattgaccctgatatttatgagttgatttctcctcgtattacttcagagatgaatgatgagctaactagaatcccctcgggggaggagattaggagggtggtgtggtctatggctcctctcaaggcgcctggaccggactgtatgcctggccgtttctatagggcaaattggaaaacggttggtcaagatgtggttgattcggttattgagttctttcggacaggggagttcgttaaaactttgaaccgcacgttcattgttcttatcccgaagaaatgtggggcttccaaatttgatgattaccgccctatttcgctgtgtaattttgcatacaaagtgatctctaaactaattgccaataggcttcg

SEQ ID NO: 113738 - DNA, 7570 bp, Cannabis sativa
catgtcaaaagacaagacttaaatggggtttaggccttttaattatgagtgtaatataaatcttataatcattttaccatgaacaatgtgaaacaaaatgcacacacaagatttttttttttttttttttagatttcaatcacacacgtaatattaatctaattaccaaaattttatcatgagattaagatttggtatttcttcaaaactcggtgaagagtgagaactctttctaaggctagtcaggctactcttatcaagtctgtggtttttgccatgcttatgtattctatgcaaaccatgaaactctctaatcgaatggtagctaaaattaatggcatggtaagggatatctggtggggctttgaaaaagaaaatcatgagctccacctcaaggcatgggataagttgtgcctctcaaagtcttgtggtggtctaggcttccgtaaaacaaaagagatgaatcaaacttttctggccaaataagattggaatttacggaccgaaggtgactcgctctgttgcaagattttgaaagcaaactacttgcaggggtaaaagcttctttcaatgtagttacaagaattcaaattcttggttttggaacaatgtggttaagtctaaatccacaattaaaaaaaggagactgtaagctgattgttgatgggaagaccacaagtatctgtgatgatccttgggttgctcacaggaacagattctttcctaaatccagtggcaatccttcttttagctataattgggtagctgatcttttgactgaggatggtgattgggatctccagaagcttcactacttgtatgagcctgaaactatcgcaacaattttgaatgggggaagccttctggtagggggagtgattcttggatatggttacttaacccaatggttaagtaagcagacttaacaagaaatgataaggtacacaaaagtaatttgggtaacatcaaatatttattgactctattttttcttgttacacagattacagagctattatcattcccactctcactccgacacatacaaatgtttggcacacccttctgctagactggatcaaattaaattgtgatgctagagtagggatggagtttgtatattgatgttgttgctagagatcaccagtggacgttttgttgggcggccactaccagacttgattttttagatcatcttcatggcaaggctgttgcttgttgtttggctttattttacaatacaccctattaaaatagatgtatcgatgtacctttatttgtttcgatatctaaaaaaatatttagtctaaatttttttatagtcgtatatattttagttatttaagacatctgataaaaatttgagaaatttgaaaacttttaacacgtaaaaaataaagtttaaagagtttattgcacgcgtgacttttatattttatatgcgtgtgaaatagacagtttgaacattaatttctatattataaattattccgaatttttcaaaattttacaaaatatcttaaataattataatatatacaagtatgaaaaattttagattaaaaaatttttataaatgctgaaacagttagaaattgtatcactgtatctattttagtgcggtgcagtacaatatattatatatatacataggaatagtcaagccacgtggcatacaaacagacaggtgtcatcatcccttaaagactctgccacgtactactttgagtatagctttaaatgaatgagataaaaaagaacctatactgaaagaaaaacatataacttgataagttgatatactaatcaaaaagaaatggcaaagagcaaagatgacattaagtatgcaacttcacaggcaagactaaatgaggatgaagctgtaagagtggcttacaagcatggaactccacttgaaggaggcaagattgctgactctcaaccacttcatctcttctcatctgttaatcccaaacatggtcaagacactaatcaatcttcttcagatactaaaacaaatactaaagaaggtggagaagagcacaacaccagaaggagtggcaacccacctgttcttgatgagcctaaataatagagtttttcagctatggtttttcctttgtttctgtcctatggtgtctggttgtataagaatgaagaaagatgccaattagtaataataataatacaaattataatgtttactatatttatgtctcttgataatgatagctcactagtttcttaattgaatttgaaaaatcatgatgatctggtccaatcaaattaaggtttagaatcatgatatgatttaatcaaattatggttagatcagtttttcaattgggttttcattctaacacttgattttattacttactataaaatctaaactgtgtatgaataaatataatatgtttttaataagatcatccaataaccctaaataatatagattatttactagatttaacaagagggttctcataattttgatcatttttcttctgcaaagtctcatcattttgattgtacttaatatagaacacaactttaaaaaaaaatgaatacctgtattgtacatatgtatatgagtttctgaaaacagatcaaacttctctaataatcaatagcctgcagaccagctaagcccaggcatctttgacatctggttttctcctttatagtctctcagttcccttgcatcatcccacctctcattaccagcataaatattagaaagcataactttgtaagaaccagtttcagaattattctcaatcaacctttgtcctataatttcagctagtcttgaatttccacaagcatcacagcatgataagagtgctccccaaatcccatgctctactggttctggcaaagacagtatcatataataagcctcttccaactctccattcatcccaagaagtctcaccatgtaaacataatgttctgtcttgggttgaatccaaaacttgtctttcattactctgaaaatgtattttccatcttcaacaaggccagcatggcaacaagagcaaagcagagcagagaatgtgcattcatctggggttaatccattatccaaaatctcttggaattttctaaaggcatgggaagcaagtccatgcaaaccatagcctaaaatcaatgcattgtatgaaacaatattcctttctggcataatctcaaaaacctgaattcccaaacccaagaaaccacactttgagtacatgtttatgagagctgagcaaaccatgacattagtatcaaatccatgtttaagagcataagcatgaatttcactaccatgattcacatctaccatttcagcagaagctgctaaaacactagctatcaatatagaatctggcttcttacctgacaaagtaaatttcttaaagaaaacaattgcattctcatgttgtccagattgagaatatccactaatcaaaccagaccatgtaactaaatcaggttgtgaaatttcactaaaaactttatatgcagaatccatggatttgcatctggaatacatgctcacaagtgcactacctacatgaacattagagtcaaaactatgtttcaaacaaaacccatgtatcccttttccaatacttgaatcaaccaagctcaaaagcagaccaacaaatgtatacccatctggctgaatccccatattttgcatcttaatgaagagttctagtcctctgtaccataatccacaattcccataagcagaaatcatggtattccacaggaccaaatctggttctagtattccataaaacaccttaccagcttcttcaacagagtttagctttgaataagctgtcacaagtgcactactacagattgagtcaaatcctaagccagaaactagagcaactccatgaacaagtttcagtccatacatatcaaatctctcagaacatgctcttaccacacaagcaaatgtaaagccatcaggttcaatatcactcatcaacatactcctcaacagagaaaaagtatgaacaaatctgtgagcttgagcatgagctcgaattatggaattccataggtaaacacttcggttgggacttttatcaaacacgtaacgagcagaataaaggtccccataaatggcatacaatctaaccatttgggtggcataaaaggggtcacatgaaagttgtgtcttgagaatcaaagcatgcaacttttttgttgctgataaagataaatatttctttgagaattgtctgtaaactaaattagtcaaagaagacattgaaatgggatttaggaaaatgagtgaaagaaaacatttaaatgggattaatggagggaaaaaatgacaatgaagaagggctaacaaagatcctagaatggaaatagtgagtagaatacactctgattcacttttaaagtgttttgtaaaatgtcaaaaatgcccttaagtagttttttcagttttagaagtataattgtacatataaatcaaacacaaactttatatatatttacctgaaaaatcacttttaactaatagaattcatcttaaattaatgtaattagttaaaatatattcactaaatatgtgtcaaatttgtaatttagttcacctcttgaagagaagcagggtaataatattttacagtaataaaaataaaattcaatacccttttcgttttgaatgtccatatgcaacaaaaatttagattttgaatttaggtaacgtttagttggaaataataaaataaaatataaatattaaaatgtcaattcttatagaatatgtcattcttatagaatgaattttccaatattttaaaagagtgattattctattttaaaatggaagaaaagagcatttaaatatcaaataaaaaaaattaataatttttttatgtgttttaattttgattcttttccattctcatttctattctcattctcatttctattctcattctcattcttataatttatttttatattttcattacttttaaccaaacgctactttagtgtgctcgcaatgaatttgacaatcaatttgtaaagtataatgtgtcattcaatctcatgccaaaagtgaaactttgaggagtgaacaaataatatgatgggacataatcacaaaactaaacctgtttcaaacaagttgtattgaaactaaccaaatttacattccaaagcaacacaatactaaacttaacctagtttgtcattatcatcaattaaaccattgataaagcaagttatatttccagagcaacactaattacatagccaaaagtgccttaggttgagtctagatcgaattggatattccaagtcacgtggcactatgagtggtcggaaaattgggatacccaattttattaggacaaatagcattactaatcacttacctagatgtacctattgcaaaagcttgtcaaagtgtcaaactaaaccaacttgttcagtctcatcacaagaaacccaagacaatcttgaaaagacattgttcttcctcaccccagaatccacaacttcttgtttaaggtaaacattcttgggcttgaatttcttccatgaattgtgcttctgcaccaatgagtccatgatttcttgtacgccgtaaactcctcttgttgtatctttttcttctacatcgggtattagattaaattcactgtccccatcttcttcaatgacttttgaactaaagttcaaacgagaaaaaacactagatcttttgtcttgagcatcagaatacaaagttttcacttccaatgaatcgggagtcccctcatttgactggcgatcacctgtctttggtgaaggaacagcttcagatagcattccatctagctttggtgtagcaaattcgacatctatattcttctttcctaaatcttcagcattcaaaagtgtcatagggaaaatcagtttaagagaagacaaaaactctgtttggtcattcttcacacagtccacttcaaactcagaattgtctggagatgacaatggtataaaatctccaagatcttcagtactaccaacatctttcaaagagtcttctaagctttctggttccttctctgatacaatagtttcactactgccacctttacatctaccagagctggaactaagtccagacacctgggattcaggcgagctggaaccagaagcacaaacattggtagtactataatccactactggactgctttctgattcattccacattacaacagttatcccagaagataatttcttacagaatggggacctttcattctccaccacttctccatcttcaaattcataatccaacttcctttttcttctgcatgataacattttggaaatgcccacatcctttcttttagaatcaaacaaccatagaagcctgttgacctgcatttaaagcattaatccccaacaacctaatgttattactatcagttatgaagattataaactgaaaagggttaatttctgttttggaaatctctaactcactgtttttgatctgaagcacatggttttgtatttgtacaaagtgataaatcttgtgaagggttgtttgttttttctaacctgtaatcttgatgtgttcttgttctttctaatttgctaaaaactataatacaaacggaaaaagattaaagataaaacgaacctgatcttgagacaaaccaaatttgaatttggaagtttcaaagtagttatcctcaattacaacacgaaactcagattcatcaagtggataacaatcccaaatcctaataaaacgaacctaataatcataataacaacaacaatcaaacgcatcaaattcttagtataataaatacaatatgcagtaaaatcattcaaaggtgttcaacaaaacagtttacctgtgctggaaagagctttccagatgacttcttgtatgcatgagtaacgatattcatttcaccatcggaacaggcctgaaagacgccatggagtcttctctgctcgtactcgaagaggaagagaaccattccggatcgaacttgatctacgaaatgggagaaagaagaagggagtccaaagagctttgagcgtagacactcgtggaaagttttacgattagacatgaaaattgctccgtaatctggaaactcaccgccataaatcttcttcttcttcattggttctctcttcatcgtcatcatcatcttcttctttcagtttctggaaagaaaatgggactgagtcacgagtcacgagtcactgagtcggtgtgcatttcccgctcccgttctcgttttatagggtcccatatgcgatccgacggttaatatggctccacgtgggtagtgtgattgccgttatcttgatttcccgccaaattaaaataaataaataaattattattttattattataaatattgtcaagacattatgttatgttttttttaatgcctaaatcaattgataattctaataggaaatttcattaatttggaaattaaataataataaataacttgtaacctgaaagtaacctaattatttatttccttataaaattttaattaagattaattatattt

SEQ ID NO: 113739 - DNA, 1062 bp, Cannabis sativa
  modified_base (37)..(40): a, c, t, g, unknown or other
aaagataaagattatattgaaatgaagttttatttannnnataaaacccaacatgtacatgtcagggcagttaggcctagagcgtacggtctttgggataactggttgtattttgtacagtcgctagaccacaacttttatatctagtgcttgaaacagttgtaaatattttgtacatgagatctcagttataaatatatgttagtttggtatttataagtatttaaataaagttttaattaatcacaatttttaataaactcgttgattagcaacaagctgcacagttagtataaaatcacgataacacgcctaaactagtagggtgttacattccttctccagctaggcagtcgaagggatcttggcaatttgctgggtcaactctttagcctttttcttctgcttggacagatcccattggcttgctccaaggtcttttctttttcagccagctcctgtctaagtcgcttaattttggccttgttagtgacggactgcttcaccacaaccttggtccgacagtagatgtatctggcctgcaagtttaactaaggaaaaaatggcaaagtcagttaaggtggaaataagagctggttggacgaaataaaagcaaaatacaagattaccttagtaaactcctcaagaaggttccccataaggaagtcgggcgaaaggacgtctccatcgcccagaagctccccaacatcttcctaaaatctatcctagtagtggttgtaaacttcctcgacgcgctttagttctgtccggggggaccatgggtctatgtaaccaatgtggggaccatgggcctatgtaaccaagctcctaataagtagacccaaaatttactaagtaaacttcctagcttattgattcctcctgactttcctagcttattaattcatcctgactccacaatagattcagaattgtactcttggctacatagaacactctatattttaaatataggcacgctatgaattatccaatgttacaatctaaataatcaacgatcctctatagacgatttacattgaatagggacaaatttactgt

SEQ ID NO: 113740 - DNA, 4240 bp, Cannabis sativa
tatttaggataattccgagaatgaggaagaatctgttagtttcccattcactgcaaatcctacgttctattctccaccttcagctgcttcacaaacaggcatcataggagagataggaaatcagactctactgaggagtggatcatcagtgcttagaaaatcatacactagtgatgatgagctcgacgagttggattcacctattacttctataatgaaagataatttccaagataaaagaaagggtgatgtacaagtagtcagatatcaattactccgagaagtatggaaagacacagaatgataataagccatttctcgtagagatcatttctgtatttcacgcaactgtgggaggtcagttaatctgttctgctgcatcttatacaatttttttagctattgtaagctggttcaaaactgggttatctattggtagactcatcgaaatcttcgagtcctacaaacttgtttataaatgttgatatatttatttgtagcatacatgaagtaacttgatgtgaagcattattgtctagatttacttcttgttattaaagggcctaattattggtataacaaattgcagttagttacgaatgatgcttgaagaataagttgagagattcataatcaagatcatttattaattttgtcagttgtaccattttgaaaggtacaatatgaacattccaataacttgaatatgaccaagtcctgtattaactatcccttcacctttgcttgaacctgtcaatgcccacatttgacaaataagggtgaaatttcaaagtctaaccaagggagcaaaaagttcctaacttgtgtgctatataaaatttacaagagcttacagcttgaattgtgcaccgcgagtagggcttcgtaaagcatcgtagtgtccacaaccattataaagtacgcgtataggattatctttaccatattcttgaccatattcagctatgatcctgaggccactagaactcttgtcattcttgtctcgcatatacactgtgataggcatcctggataagagtatgaaacttagtatgaatgaaaggcaatggaaatcaatgatctccattaaactacaatcacatgatgaaacttatacagatagctgcaatgttaagagagaagccctactgtagaacatgtgaagccatgagtaattcgggctcgcctccccagctatgaggttgtctcatctgtccaacataggtctcaaaatcatcttcaagaaacctgccaatgtgtagaaaataattcgtaaacttaggatagaaaattatacaagttaattttagaaaccaaagagaacaaactgaccattcagtgtctgctctcctcttaacaaattcgtctgcaacctgtccaaatcccaacgatgcacaagttcttttaaaggatttataacataataccataagaaattggtaaactcaaacaaagtcctagctaaaatttgacttgtttttcatactttagctctaagctcgtctgcaagttctctttgaaggctttcactgggagatggctttcctgttcttatgctagcaccgtgaaccacagaccgaaacaaacatcttccatcaccaggtattcctgtttcaacaatacatagattaattcaccaatgtcttatcactatcaaaagttgacaatttatagaatagggaaaaatgaaagtacacagcataaaatatataattgactcttcaacttgttgtttttaacaatgaaaatgatgaaagggagcaaacgaacctaagccataatccatactgatgaccaaaactttctttaatggaaggaattaagttccacaaaactcaaatatagatatagttaaatcataccaaggcgttgatgagctaaaaggtgcaaagctttacttgaaaggtaagaatcaacaaaacaccaaacttacaaagatgaagaatagcattaaagcataaccaatcattcaatttctcaaggaaaagaaaagcataacaattgatgtactcaatagtattatctaacattcttgatgatcaacttgagaattctaggggagcaaaccagacatactaaagattggtggtaatcgggcggagtcgttaccgagtagagtttctggttttggcattgttagaataatgaaacacagaacacaaccatgtatatgatcttaatcaaagttgctgaataatacaaataaaaatttactgaacatcatcatttgattttgaaaccggggttgaaaaagattaccttgaaagactaggactttgagaatgaagacctcaaatgcccagaaaagcttttgcttcatctatggtgtgacaagaccaaagaatctaattccatgatctttttcttttctccactctgagaggccaagagtagaacttgagagaatactctttctgacacactttttcaacgtacacgtgtcaagatcttacaactatcactatttggaatgcaacatacatctaatccaaacctcattatgagccttaaacgaaagttagtatatatagaatctatacaaaatctaacttagtgtccataaaaattgacaacagtaatgaccggccatttttcataaaactctaactatatttgattttctacatttagatgttcttaaaataattcccatttattttcaaaagaaaaattattattgaaagttgtgcggttctaattaatttatggtagattagtggtattggaatctaaggttgatgtaattttaactttctatagaatctaaaaattgtaccttttctttctttgttttctctcttttttctttgcagatatatcagtttttgctttggtaataaatcaaagagtactctactttgcaactcttttttcttctttttgcttaagattaatgaaattaacatattatttattttatcttttgtattagatctagaatctaattaaatttattaacttggaagattgttttttatcaaccttttcaggattcaacatcattgtcagaatgagttgcagaaggcctccattacatacctgtggtgtttcaattttaacagtagctcatagaaccattgaggttgtccaagatgcagatgaaccattaggctcaataaccaaaagggtgctcaaaatatcatcatttgcaatcccatatctctacaccttgcaatatcaatggcttgtatttctctcatttattgacgattttatcctagcagctgagaacatggtagagagaattttccctccatcaaaacatgttttcaataagattgatgatattgttcaagtcatagaaactttccctatgaaatatgataatgtggtgactacattctctaccattatccaccaagtcccatttctagattggttattagtacatgttatttctttactgaaacttctgataactacattggcttactggggttctcaaggtacaagggagaaggagattatggtcgatataaactgcgaaaaccgtgatactaaccaatttttatccatgaatgtttatgaacacacaacaagatcacatgttcatgttgatagtgagaatgataccatcaacggtgagtttcgtcatcctctacctgaaactgagatggcttctgtgaaagttgatgatgatggcttgaagagtacttacaaagaagttttagagaagaataccacaaatgacaatgaacatggaaagaaggaaattagttttacaaaggagagaaggaagaaagcaacggctgatgaaaaagttgataaaaaagatgaaagtcatagcaaggatgacccaatgttaaatttgagtacttacaaagaagttttagagaagaataccacagatgacaaagaacatggaaatggaaagaaggaaattaaagctactaaaatgggaaggaagaaagcaacagatgaaaggcataacaaggatgatccaatactagatttgttcgagtcaggttggataatgagacgtttaaagaaaaataaaaattaatactcaaaatccgccatgaacaaactaatctcattttccttttaatattaatatattagattgtttttgagtgtaattatttttattttacatcaataatacacaaaaagtttttagatttagaaattagtgtgatatataaacttagaaattaattggataggggccgcgcgaacgcaggcccccactgcaacaaattatgacgtaagttctgccacttgggcagaccttagcttg

SEQ ID NO: 113741 - DNA, 6507 bp, Cannabis sativa
ttttaaaaaaaaaaaatattgttagtatataaactggacatcgcaatcggaatgtgtttatctttctatctgtctgaatagaataataaagaaagagagggaaaaagagatgggtcagcttcttcttcagaattcactccaagagcttctcttttgtggaaaatttaaccgcccaaaggtgcacaactacaggccatgttggtttgtcgacgggtgtgttcaatctatgcgatctttcacatgtcgcagtcttcattattccattcaaggtcttttcctttcccccttttcctttttttatataatttatgtgttttgtatttgaatttcaaagttacttggcaggaagttggaagttggctaatcattttgaagacccaattactcataataatgtaacaattttcttcaagtattaaaatgtttttttatttttgggcttgtggttggagtttggactgtgaatttcatatcagaactgggttttgctctcaggtctttgattgtagtgaaggagagtcagacaccttaccttacgttcaaactcttagaaaatttccaaagcaagagcttcttagaaaggctgtattggttaggtttgattctaccattttgcttcaagaagaggctgatcatatagctcaatcaccctccaatgcactcttaactattaggtatttacttgaagctggagctaaagtcattctagttagtgattggagtgtgagaaataacttaaagctctttgattcagagtccattgcaggtgaagttttgagaagaatgtctttgttatgcgttttcttttctaatctcctgttattgctgttttggttcacatatacaagaaagttagtaagtgtatacaattcgggagtagtattacctgagcaaagttttacagttcatggacagtagaagtagctagcattaaaacatagttcaatgctatttatatttcagatatcttgtcatctaggctgcaatataaagttgttcctgtacggcacatttctcctgtgagactaccagagatggaaagctctgagagagcagatatttttcttctagataatctatcagagtttaaattggaagttgctaactgcccaaagtttgctgaagaactgtcactgggaattgatgtttttgttaacgattccttttcccattctcataaaattcttgcatcaactgttggtgttacacgcttctgcgatgtgtgtgtagctggttttcaatttgaagagagcctaaagcagcttagaaatgtgaagggaaccaaaaaaagagaaccttatatggcaattgtaggttgctatatgtgccaatttgttttataatttcttgttttttctatccaatttgtcacattggcaaatttttctcttctctaagtgagcttataataaacttccacttgctttttattatgctgttttcatctgtagattggagggggcaattttcttgataaagcctctgcattgcaatttttggcttccagatgtgaagcattgatctttgttggaatgatgtctattcaaatcatgcatgtcctggggctatcagttcctttaaatctggtggaacatggggcacttaaagaatctttagacgtagtccaatctgcacaaagtagaaatgtacaaattgtatatcccaaagattttttgtgcaagaatgttcaacttccaaatcaattagagatatttccctctcatcgtgttttggatggtaagattgcacttcacagttctttccttcaatgcaattttcttgccctgaatcttttacatcatcatcattattattattatgtttaatttaatgagatgcacatataagcacttgcccctcaagaaaatcacacacactcaccctccaactactcgggatttgggctagcctcaactcacttttcgttaaaaatgctcgaggaatgactagtcatataattttatccctgacctgattctgctggttgtgcacctttatattattatcattattattatatttggtcaatttatcctgatattcagaataatgtgatattttatttcctatgctaggatgggtacctgttgatattggacctgtaacattggatgaaataaagtccttgcttacaaaatgcaaggtaaattaaaactattttcacgtagcactttaatgtgggaaaccactttttcattacaaatactgttttaaaatcgaattgacatatcaaaactccaaggacataatatgaagcagtaaatatatcacccaccgtacggtagtttacttgcttactctttatttcttttctctctcaatgctcgtgcagagaagattggctgatgccgtattcttctataaaaaaatagctcttctaaatgcatctaggacagctaactaagactaggagccttagaaagtaaactatcaagcatacaacaaaaactgaaagcagtttagcacatcccgataaatagtcttctttatatttatgcacaaattgtattattaccgcctataactacgagagttttatgaatcgtaacaagataactttattattgttgaaaacatttgagctttatcctgaatgttgaaatgattgcttcttatttgagctttattattatttttattatgattattattatttattaggctgttctttcctttttttcatttgtggtttctattgcaaaaaggctcgtcataagaaaatcaaaatgcaaatttcttttgtactgataattccttgcactcctacagaaaaaatcaaaagtgtaaaatattgaagtttgtagtgacctgtcttctgttcttcctgttactactatgttgaggactttctttactgattgttcgataaattcactttacacattgttcttgctgatattttgttgataatcatatgtaaatatatgctcgtaatgtcagaaaactatgtggattggtccagtgaaatttcacaagagcagctgtataagtggagcatctaaactagctcaaattcttactcaacttagtcaaaatgaatgtgatgtaactgttgttgggaatattgcatgtgaagcactaatgaaggaaccaaatcctgtctctgtttgcaatatgatatacaaagcttcagttgtatgggaatatctaaaaggaagaaagcttccaggggttctggccttagatagggtatggtttgtcttcttgatctgtttcctgaataacatctacaactcatgtaaaccaaaccatgactgtgagttattgtatgaccgaaactttttcgaaatttgtgtcttatatctaaggttaggggtagcattgcctatggctagggacataaggttaatatgcttaaattatatcattttattctaatgtataaaagttcatgaaggtccactttcaaagtattggtcgttattttcaaatctcaacacaatttcttggtgcaggcatatccatttgataccgattggaattctgtgtttgctgatccatctaagcctttggtagttgatattggaagtggtacggttaccctagcccacccccatttttttttcatactcctacctattgcttaattttcttattgcttagtgagtgtaattgaaggtcaaatagaaaagaaatgaagagtaggcattcttctcaaagttagcaagtatagatggaaatgatttcacccgagtagaactataaaagaatgagatggattttcaatatttctgaatgaaatattcctagttacattttgctttattaggctgaaattgctattcttttttcctccattaactttcagatagtgaatgacaggcaatggaatttttcttctgggaatggccaatcgaaggaaagatttgaactttcttgggttagagatcaacgaaaaggttattttcctttcaaattttcaccctggatcagtgaatcctatgttcttagtcttcactgtataacaattgcttttgcactcttctttcagctcgtcagacgttgtttggattccattcatagacttacgatgaaaaatgggtatgtacttaactttagaacctgtaggagttatggcattactgttgatttgttggtctaacacgttcaaccatttagcttttagaagatggttaaaactaaacgaaattatcaaccattaagctttacaaattcacgtttctttttcctattaaagaatcaattctcatcagttgttttgaatgtgtacagattttgacttgtattcatcttaatttctcttgaccagtgaatctaatcagtgttttctttctcaaccatgttgatgaaagctgaatcttttatctggcctttgtgtgttgccattgtctacatcaggtacttcattgcgacgaatgcaacatcgactttccgttctattgtttctagctatcctggagagttgtttcttgtgtcagtacaggttgagaataagcttattagctattgtcattataaaaattcacttctagaaaaggctcaaatggagttccaactgttgaattgtaaaattatagatagtaaagttattgctatttcatcataataagcaaatataggatacagtgaatgcatcccagtcaattgcttcaaactcaaacaaagtcaattttagtttctcgtagtgtcattattactcttgcactaccatgatggtttttttttttccaataaaattgatagtatagtcaaataatgttcaaaatagtaatttcttacaagtgattatctaaaatcttatttttaccaaatagttaattgtgaaattttaagttgaggttggaaatacatattcatctatcatttaacatttttgacatacaattatgaattatgataaaaagttgaggagagcatatgtactccccgagcatgatctggctcctgtcaatgaatatgaaatatgatatggatctgtaactcaagtaggacctcctttctttctcaatgtagtgcccaaatcctgatttcaacaatccagaacatagatggagaatggtacagaggtcattggtagaagctatagtggaactccttgtaccaaatgggaaggtaatattacttttggaatccacattggcaaaaaaaaaaattattcatgtgacacctaaagaaactcaattttaggacctcattttccatggtttttagtgttgaaatttcacaatcgaatccatgttaaatatatggtattgatttgttctttatgtttctcatttctttcacctttatttggggataaatttttgtattttccaggtctttttgcaatctgacatagaagctgtttcactgagaatgaaagaagagtttctgaaatatggcaaaggtagactagttgtgcatgaaggaggcaatgccataacaagtgaagggtggctcaaggagaatccatttggaattcggtcagattgggaacgacatgtcttagatcgcggtgatcctatgtacagattaatgctatctaaattaaccaatgttgaaatgtgaagctattctgagggtatgatgtgtgaaaccatcatcaccatatgtgtagtgattgtctgattgatcatcttgaatagttcatttgtatggctaggtggttagccagttttgaatcaccaccctttgttttaagacactcttttttctgagctatatagtaaaaaacataatttccaactgggtttctcaatttacatatagtttcagcaacaatgtagggacagtgcttagcaaatagctatgctaagaggaattttaagagaatgctcaactaagccttttgacttctgcaattcaatatacatacaggtgtgataatacaactgatttctagaaatataacaattaactaaagccagctaatatacaaccaagacacagctggaaccaaactaattctgttagactaaactaactcaagaaactaattgggctctatttcctctatcctaacactccctttaaattggaaggagcatcatctacattcagcttgaattgaagatagaggaattgagcttcgcttaacggtttggtgattgtatcaacaacctattatcgagttggtacatattgaacttcaaggagctaaccagaaatcttctctcgaataaaatgaacatcgagtttgatatgcttagtacgtgcgtggaacgcaggattagaggccaaagctcaagcacttaagttgtcacaccataagatcagagattgagaactgccaaaggaaatttgtaattcctgaaacgaaaattgcaactacaaaatctcagtggcagcttgaacaagtgcatgatattccaattctgtgctagaacgagcaacaacatgttgctttttggcactccaagcaatgagattaccacctagaaggatgcagttacctgtagtagaacgacgatcatccaaacaacttgcccaatcaacatctacataaccttgaagaccaaactgttagaatatattttaccaggacttagatttactaacaagtat

SEQ ID NO: 113742 - DNA, 3719 bp, Cannabis sativa
ttttttttttttttttaggttgggtaattaaaataaatattctttactaatagttggtgatcagtttggacagaagctgtatttatacatttgtaattgattaaattaatctccatgtaattaatctagtagctaccctactatatatacttgcaaataattaagtaaatatggcttagatcttgtattatttgttttgtagtttgatatataagagttgttgctctcaccatttgatgagtatgcaattagtatttttttttctcaaaaagaaaaaagtgaaagtgactaagctagtaagcttgataattactcttacattgaagggatttcaacttttcaagtgattacttcattcttattatgaccagttctaagttaagacagactaaatctgtgttttgggctaccgaaactcaggtcccaaaattttgggctactaaatctgtgttttcaacataaagtatttaaatcacatttcttttatggatttgattttttttacaagtttttttatttattttttcaaaaaagaaaatgctgttttcaagcagcagcaacgtgaaaatgaaaaatcaactgttcatattttcgaaaaaaaaagaattaaaatccataaaaatgttaaaagaaaatgtagatccatattttgtaaaccttttgtcattttgtagtagagaaatattaaaagtaccatctaaaaatgttatatcgttattggtataattaagtattgggtctcacataatttaatttaataattattatagaatatcgctaactaatacaaaacgttacctctaggtggtgctaagcaccactgataccttatagcagtactattttggagtatttatcaaaataattcctcaaaaaattaccacaataccaaaccatcttatttaatattgtggtgaatgatcactcttcaaactgattgttacagcagtaacaatgttcaataaaacacaattccaattagaaccaatcacaagatcaaaactagaacttagatgaaattagatagaataaacttaacttgagaaggaatgaatcatggatctttattgattaggaataatcactagtacacaatgagataagtccaagaatacaactcaacacaatgaatgattacaaaaaatatcccacaataagggaaatcacttctagagtaatactctcactgcatccttcgacacacactcactatgattttggactctctctcttcagacttgattctgaaatttgaagtacgagctttggagattggacatcagaactcatcttgagagagtagagatactcttatttatagttattggtgggatgctttttaagttgatattgaagccaacggttataattaacaaaactttctttaaattcatttgatgtgtaaatagatagacctactgactttgagatatttatgaatttaatcccaacaaatattaatttaccaaaaatatacttataaaggtccaagattttattatacatatataaatattagtgtgctttttcaatcttttttgttctttttttttatgatgagaatcttttttattcttgtttatcctttacaacctatatataacctcgattatttttatataacttttcagagtaacttatttgaatctcatgaataaatatgtgatggtgataagtgaatatatataacctaaagctagactactttttagataatagtaccaagtcaagttatgtagtactctctttaaagaataaattgaaaaatataaagcaaatgtaaagggggaatattatgaaaatataatgcttaaaagtctttattgtactaatggcatcttttttatttttccaaagataagtccattttgtgcatatttcactgttatgaaaatatattaggtaaatatgtctatcattataaacatttatacttgttaatttttttttttttataaagatgtctaaaattaaaataaataggatttaacctccctaaattataatttttgtaaaattttatcttgaacttttctctattgtaaaaattctcctaaattataaaaattgtcgcaaagatcttcctatagttacattcagctcatttctttaaatattttgttgatatagtactaacataatgttaatttagtccaattcaagaatcaagacaaaaaataaatacataaataatagtctaatgataaattatgagagtatatatgtacattcgtatagttattatttgtatgtttaatgccaaaaaattaattaaattttaggtagtttaaagctattaaataaactttcacttataatcacatgagaaattattttaaaagatgagaaaaatgtaacttgtgagaatatttgcaacgattttatttatagtttgggagtaattttcacaacagaaacaaattcagagagcgaaacttcatctattcttaaattatgctaaattcatttttgaaatattttaaatttttttgtagggtcatttttttttaaatattatgtttgtgtatgaaaaagaaaagagtttatttattttttaaatagttttcatagcaaacttaattatcaaatttgagttgaacataattaattaatttagatataatgttctatatatatctttcatcgaactaataattaagtttgaactctattcaaaataatggttgaatcttaaacccaaaattgatcaattcattcagttttataatcttgaagacaactttagaaatgaatctaaaattcaaaaattgaccctattgtatttgtatagcacaaaaattttgaaaaacaaaaagcttaacatcgatttttttttttttttttccattcaaaaaaaaaaaacatcgattattattattattattattttttttgtactttatgaagagctagctagctaggtatatatttccaatttaattatcttaattagaggtatatatatatatttaagaataataatatccacataaacatcaatagccatcaagtgggtattatatttttattttttttttctagttcccaaaagaaaagaaaaagtaaaaatataattataagacccacttaagttgttgtgggactttaaagtgcatatgatattttgattaggataaataaatattattttgtactcctattttataaaatttatttattggattttttattttattaaataataaattaaattgtgtattattttctaaaataatactaaatagtattttaaattaatattgtcaaaataaaattttataataactcaatttagatgtattattacaaaactggttatattttttacatctattcgtactaaaaattatatttaagttggttatattaaaaaaaaataaaaattaaacttatagtcttatttgtactattttaaaaaatatatgatctattttatcatttaacaaaataaataatttaatcaataatttttataaaatacagagttcaaaataatattaatatttttgattaattattaacaaaattaatagagttgtaaggtactaagctagctagatctgttggtgttcaatattttttgcaattaaattattatcagcactctactgttgtttgagaaaatagacacatatatagggtaatactatggtaggacctagcaaaagttccctaccgatagggaactttttttctaaccgttgattttagatcttgtg

SEQ ID NO: 113743 - DNA, 1577 bp, Cannabis sativa
ttaaatatataataatttgttaagtacacaacaaaataggttagatagacattttatatattaggtaagatatatatatactactactctaatttgtggattgttatcatcatatattccatattatatatgttttatttttatttaatttttcagagaacaagactgcaattatatttcatcactttctataatataattatatctaatagaatagtatttatatatgtagttttttttttttttttttttgagataaagataaatctgaaactgtattaataaatgtttgaaaataatcgtttacttttcacatgtatatgcgtacaagcagtaagtgttaatatatatggtatgtccgtgtgtgactttatgagctcagctgcaacttccattttgtaattttagcccatttttctatgtttgctactcgtgaggagtgagaggactgagtagtgcagacaccgagtcactaatcaaccaatcaaaagaatacttaaataagcttgtgaaattgtttcaagtgtgtggattctcttttattatagatgtcattataaattagttaattaaaattattatagtatctctgtttactagaatctaggttaattatggaaattagaaacattctcatgaaaacccaagtatgagacaatagaaataggaaaaaagggcacaaaagaaaaaaaaatacaaagtaaaccaattatcatctttagaaagaaaaaatgttgagcgaattagtatcaagcactacaagatgtgatatactgttactagtacatttcaatatctggtctcatacatttttatttaataaataaaataaaaaattactaactaattataaaattacaccatatactattttttaatttttttttttcaaatttacagtttgagttatttttgtagtttttacggtagtttctatgtggatgtcatataaattttaattacgatttaaattacttcgttagttgctgtaaaaaatttcgtgtaaaacttcgtaaaaatacaaataaaaaaatgtttcgaattttaaaaatgaaaaaacccaaaaagaaaattggggttaatgaatttagcctatgatgacttctgatcgtccttgtaagtgacatcactaaattttgttggaagttttattggagtatatatatttttgaacgattaatatatattaattggcatagctaaacataaatatgaagcataaaatcgaaccaatttagtaactagtaagtaatgaaatgttgcattctaacgaaaaccagtaattaagcaattttacatgtgatagggaaacttataaaaataatgtttttttaccaaatgctttaaaaaatactgggacacggcaaattttacatttttactgtccaaacctatttttatttcttttatactgcccaggcccaatatatttacttttatactgtaaacagtaacaaaacacaaacggcacctctccttcgtggttagggatggataaatcaacaccagaatcatagaaacataaggaaaaaaccataaaatctggcaaagagaaaaaaattactaaatcaacaaca

SEQ ID NO: 113744 - DNA, 2538 bp, Cannabis sativa
gagagagagagagagagaaggtgtacgtacgagggagtatacataagatacttgagaagggggaacagagagaagaaccacttgggaatgaactcgaagttgcagtgccctaagttgttcatgaaatcgatataagttatgtaacctattaataaagctacggagacagtttctgtaaatgctgttatcaataatgggattgcaaacagaaggaaatatgccatgtgctctgcaaatggatgagccacagctgcagtaattaataatatactcatcaatataataatattattaacttattataataatttcatacaaactaattaatatagtgcttacaagtaatgggctcggtgacaatggaggaatggtgatgagagtgataacgagaatagaggtaatggtggtgtaaagctctgtgaagccaatagtataagaattccacaacaaaaacatgaagcagaattgttataattatcccatctgtcttccatatagctacatttctaccatttggaattatacgggtccccaaataactcagtattgcagtgaacaatatttggtcatccctaataattaaaatatatgtaattattataaaaaaaaaaaaaaacagagaaaatatatgtatttatatattagtaatgtagctatatatatttatatatatatatatgtaggtaccaatttctttctctatcaacttggtcaaagtcaaggctcttgtcaacgattcggttgtttcctttggctgatcggtaacgagaaagagagatccaaatctgattgtgaacatatcttgacaacaaaattgggaaaatggtaaaggttgagaagtctctctccattggatcatcctttgttaaatacatgtacgtgctactaatcgcccatggtgctacaattaaatactaggaaaaaatttcatgtttttattatttataaatttcagttaaattaaacattttttaataaaaaaaaatgatatttattgaataatatcgaaaaaaaattaattaacaactgaatatatatatatatatatatatatattaacaacttagcatttctctttggggaaagcacgtacgtaccttaaactttccaagaggcttccatggccaatcagtgaggattccaggcttagaagccattttcagcttggtagagtatatagctcgttctattagctagcaatcttatattattatttgtttcacagaaatgtacacatgcatatgattgcatgcgcgtatatataaatatatattaaaaaagtgtgttataaacacatgtcattttattttagtcatatatatataagccacctataaatatgtatatgtatgggaatattcttatctctctcaaactcaataaatatgtattaatatatataacattcttctcacatataataactaataaaaaaaaacataaattaaggaaacaaacccaacaaacctgaaggagagttatcggattagtattcttgtttataagtgggtacatcttgcatgatagaggtcacctacttaacactcaccttatttttagcctgaaaatatctgtccactttattaagtgtacaaatttactaaacaaatatgtatattaaaactgttttatgatcaacctatttcacttcatgaaaatgttgtgaacaattaatttatctttctatataaactagttgtgaagcacatgcctccctatatacactaaaacttttatttaatcaaaaatatttctaatttattatatatatataaaattttaaattctaattttccataattataaataaaaataatttttaaattgtaattaactatcatataaaaataattacatcttaattaaatatatatatcatggtattatgtatttatttatgtaaaatcaaaaaaatttccacatacattgtatttactgaaaataattttattataatacaataactctttttgatctattataatataataatttttttttattattgttgttacattaaatattttttactcttttgattttttttctttagtcatagcttatcaattagaatacaattatttagtccataaaagtattcttaaatagaagttttactatatttaaataatatttacatatattctcaaataatattctttgatttgaagtaaatatttgaagggaaaaatatatgtttattttaaaacttttatctgacattaaaatttcatagaataggttattatatatacccttgttgatgttatttttcgtcaaataatctaagaagatcgtaaaaataaaaaagtccatggtgaattaatttgactaataaaactgcaataatttaaattgacactagagatttatagtagtgttcacccccatgtcgcgatggtaacactactacaatgttggcctttagaggctgttttttcactcccatttataaaaaggaaagttaaaaggtgtgaaaatatacgctttgttcgaaattgacatttagaggcagttttttgataaaaactgtaggta

SEQ ID NO: 113745 - DNA, 1167 bp, Cannabis sativa
aattaaaaaattagaaagtgaaaaaagtttctagaatatgattttagaaaatatttttacttttctaatttaaaaaaccaaaaaataaaataattaaaaaagtattaccaaacacatctgaactgttaccaaacatcaccctagtaaacgaaacgaaatatctcaaaatatttatcaaataaataaatacgggtatcacgatggaatactgaaattacttgcttagataatatatagaatttgagttaattgcaataaaactcctaaaattttcaattcactagcaattaaccatcaaaacttattttttagcggcaaaaccccaaaaactcgtattttgttagcacttttttatttccatcaatttattaatgttaagtgccatgctagatcatccacgtgtacataatatacacgtgccacaattttattggcccaaataattaaatatttaaaatataaatataaataagaaattaaaataaaactaattaattaaacaaacaatttttactttttttcctttcatttttgttgaacatttttttctttctttcttcttcttcttcttcttctccaagcctatcaccaccaccaccacccacaaaaacaaccacccaccacaaccgaaaccaccaccacatcacaactcgtcacgatctcagatcttaatctaagatcttacaaaaaaataacgactcaaatctaatctagagaagaaaaatctcacatctaaaagaaagagagaaaatcacatatttagaacttagaaaacctcaaatatgaaggccatgaactcaaaaacctcatggtgaggtcatgtcctaccaacggtggcctaaacggagctaggccgagtagttgagtgaccttcacagtcgcacgcgacagagaaaggtcgaagatgtattgttcatggtcggagatgcgtccttcgtagttgaagatgttcgtggccaaagatgcaccgtttgtggcgagatatgcgtcttttgtggccgatgtttggctcgcaaatgtcgacgtacaactgggctgagttgggcagaggcaattttatctactcgttcagtctctctccccatatacgttactactacaaaaatgggttttctagacgtttttaaacagtcatttaaagtattcccgtcagtttctataaccgtc

SEQ ID NO: 113746 - DNA, 1364 bp, Cannabis sativa
attgaatctttctcaattaaattatagagcacctaacataaaactaagtatacgtgccttgcacgtaactttcttctagtatatatagaagggacaaaatatatatgatttgaatatcgttttaaaatgtaattaataaaattcagaattttttaataataatttgtaatttatttccataaatatatagatgtacgtacgattgtcgttctcaagctctaattttgggtccatattcatgccaccatgcttacaaatcaattcacacgtccccttctatataaagttaattaaaatttttgtatcctaaattttgatatgtatctttaaatttttaaaatcgttaaaaatttttctttgaattattgagattgttggatttaaagatattttgtcaaatttcattaaaaaaaatttaacatggatgaaagttcaaagagcataatttaattggtacatgtaaaagtttgaagaacatgatttagtagaaattaaagtttggtgaacatgatttagtacataaacaatcactgaattagtaaaactaaacacaattggacaaaaattcttaaatctatacaatttcaatagttcaggaataattttcatcggctaaaaaagtttaaaaagtataatttaatacatgtcaaaatttaaggataaaattcttaattaacctatataaaaatataaatcaatatatatttgtttaaatgttaaaatatataataattaagaagatataaaaaagtttaggttgaagaaatggatggtgaagaggaaaagcactactgaatggaaagagtgggatatttagataatatagaaaatgggagggagtgtgcattccatacgaatgccaccaacttataacattattatattatcttatatatttttacatataaattaatatatagactctcccaaaaaactaaaacacaatttaaagtggtatttgttttttgtttcttcctttttgacttccattactatctataatcattccactccatcattaattaactaacataacaatattacttaataatattgcaactgggtacagtgatgtttagcgtcacttttaggtgataccttacgagtgattattgatattttttaaaatttattaactaaagttatataagattcgatatttaattggatcattaagaagaatatttagcaccataatagttacattttgattgtaactatatggttacattttttttaacctctaatagaagctggtactaataggtacaaattctatttttagaatgaattaattataattaactatatttttaagtaattaaataaatatttaagatgactttttttagcaattaaaattt

SEQ ID NO: 113747 - DNA, 2451 bp, Cannabis sativa
  modified_base (348)..(364): a, c, t, g, unknown or other
aggaattcaccttaacttttgtatgatccaagtcctccatcttcagcacctttccaaattagtggcccaactatgagacacttaatcgccctccaacaattagctcagctattggatcataaaaaatctcattcaaacccatatactaaagaaacttgaatttttttttttttttaaaacttataaaaacactagaattttgtttaatttttacaaaaatactgtcacacagaattttttttaaaaatactgtatttttataaaagaacaatagaactcaaaacaaacagcaaaaaataatagtggaacaactaataaacaatagtaaaaacttaacatagtacacannnnnnnnnnnnnnnnntatttttgaaaaaaaattcgtctcacgatataaaattaaaaaaattgaaaatttcagtatatagtgtaattatctttattttgggtgctagagttgagcaaaatagctaacatataagaatacttatcaaacatgtgaatctgataccatcaaagaaagacatcgaatgggaatgggaagacctcatcttaaattcacttctttaatgaaacaagaaaggtagtcatcatcatcacccttccacaaagaaatcattgagagtctttgtaagaagggattacacagaaaatgcaaacaaagatgttcaccatcttcatcttgcttctaaaacatacttttctcttgtaaatattcaatctctcattattcagcaaaagaaaagaagaaatacctaatcagtcattgaagcatacaattactacgattcaaccctctaatctttctagagataatttgattaagaaacatgtgtatgttgagtctgctatatggccattattgagatgaacataaaagattatgcacacttgttttttacatgttcatactcttggaggattatgcaaagaataggaagttggcttgggagttatcttagtatatgaatgaaccgtaatttgtgcatatttgaaaagaaatgtttaaatccttcttgtatagatgactttgttaaagaaaatttaaaagttagagtgaatcttgtaaatgagaggaagttaaatcatgatgataaacatgttgtcaagcttctaaaagttttgtaaatgttgagttgagttagagggtcttttcccttgttagttgtaatataagcctttttgattgatgaaatattcttttcttcatcaaaataataataaggaatacttgtggtataaatatcacatgttttcaattttttatatttataccatttttttcgatgaattaaataccaaaggttacatatttgttacttatgtaactaccattttgctaaatgcttacagattcattaatattaacacgtgtcatcatatgattagaaccaaaaatgtaatgttaataaatccaattaacacttaacatataattgaaaatatatgatatttacactgcaaatatcccaaataataataattttctcaaattgttcttatcactagagaagaagaaaactagccattgattgatttaaaacaaaacaattacttcaaacaaaattttcagcaaatgtgcagaattatttacttaaactaataagaacataaacgcttgggcctgtgagtttgatggccttccaattccatggattcaaaagtgaggtccgtctagtgggattgttttcaatttgatttgcctaattgggttttgattatatatctagagctgttcaatgaaaaaagaaaaaacaaccccaatatctcagataaattcttttacttattgggactattttatatgtattcatttcagatcctgacatacatatctatgctagaaactcaaagactttgttatgaaagtaatattattatgacaataatgtatataagctaaacttaattaacaatcacacttaacttaatcataagcactaaactaggatactagcatagcaacaacattcaaatattaacaactacataaattgtatgtacccaactaacaatccaacactctcaatcaaacaaaacaattcataccccaaaacgaagaacaaagaaaccacaaacactttagaaaaaacaagacataattagattgatctgaataaacttttacttataagcataacctcatccccaaattacaccccagaaaccccaatcaacagttcaaaacaaaataagaagaagaaaagaaaatcaaaatttccccacactttaacacagtcgagaacaaaaagtaataagaagaaagaggtgaagccaacgggcataggtttagaatctcactacgaatactacgtaaaacaaacacaaattcattaattgcttaagaaacgaaaaaacacactaattaattttcatttttagcttgcaaaaatattgtatttttccaaaaaaaaaaaaagttatttcattagaaaatttaaaaaaaaaaat

SEQ ID NO: 113748 - DNA, 1612 bp, Cannabis sativa
  modified_base (1427)..(1427): a, c, t, g, unknown or other
tttttctttatgaattgtagtgttgatgagttgcggaagcttttgtctgataaggatgcataccatcagttcttgttgtccctggatcaggttaaaattcaaaacaatgtaagttagctttattgcctcaatactgctgaaatttgttggtgtataatttcacttgacaaaactacaccctgttttttttaaatgtgtacatcagtaaagttgcaaatatgtgattagtggtcgttacaaatctatttttgtgtccatttctaatttgactgttagtatgttttttattttttgttcttaatttcctttttaattgactgtcatcagctacgagatgaactacggaaggaaactctgcagctagcaagtaagatattgtttgtacatatggttgaaattgatatgcatattttttcttcctcaattttatttcttcctcaggaaacaaattataaaatgtgtgacttttttaggagaaaacttggaaaaggaaccgcgcattatggagctcagaaaccaggtaaatttggtttttgctcttatatctccagtaatttttcttagttgctctgacttctgatggtgaaatttcttctcttattttgtggtgtcacagtgcagaattatcagaaccactgaactcgctgctgctcaggagaaattaaatgaccttgagaggcaaaaggaagaaacgttaaagctctgctctcccgcttccctcttccaaaggcttaacggtatgtagtacgagacaatctaaagttttatgatgcttgatatcaggacatgaacctacctgataattatgatccaaattcttaagttttgtgcatcgccaaaccctttgttttgttttgcagaagcgatgaacaaggtggacgaagaatctgaaaagctgcacgagcagctccttgaaaaggagatcgacattggagcttttgtgcagaaatacaagaagctccgcacaacctaccacaagagagcactcattcacctttcagccagaacaaacacagttagttaaatgtggttgtagctttcttctttttgaatgatttgggattttcttgcttcaaacaagtcaatgaactatagatgtctctttctttggagagcagtgattggaattggagggtaatatactaatatatgttatgttatatatgtataacttggcgaacttctatttaaaaattctctattcaagaataatttttaatttattataaaaaaaaaaattaaatctcaatttgaggataagaataatcttttaagggtaaatattattttggatcatgtattttacaaaagttacagattggaccctctgttttgttaaaagataaaatggaccttgtattttctaaaatagtaaaaataagaccctgagcttaatttttcacaatttttttttaatataaccaacntgaagacaattcctaatacgaagagatacagaaaatgtaaacagttttgtcataacacatttagatcagatttttattaaatttgattttgataaaaattcagttcaagattctatttgtaccattttgaaaaatatagggatctttttgtcatttaacaaaacagatggtccaattggtaactt

SEQ ID NO: 113749 - DNA, 3260 bp, Cannabis sativa
tttttttttttgtaaatttgaggtatcaactagatatcaccgttaaataacagctgaattattattgtattggcttcgaaatttaactttcacgtacatacatgtgtacacagtagtcatcaagttggtatttaacagtgatatttaactgatacctttaatttacaaaacaaagtaaatttaagggcgttttgtcactaaaaaaaataagaaaactaaatgtataaaaattaacgcataagagaacttcgctaccaattactggcattaaaattaaacaatcaatctatgatatgttcaccttatacatttttttatttaagcgtttatatattacaaccatgtttttacttgggtatcgaacctaagacctccaagacacacacactcacctatggccacttgaggctaagcctcaagtggttagttcaccttataccttaaacctcacaccacacacaataataaaaataaaatgagatctataaatagcaaaatatttgacaatctcaacactagttaccaatacttattcaacaatccaacaaatacaaagcccaaaaaaatccccttgactttgtccaagcataggcatgagatgagacttgatgagcttataaccaaaaatcaattcatataaatttcaataaaacattttcttgccttagtttgacttgaatttagcccttttatatataaataatcaaactttagttctttggtcattaattcccaactttctcacaacaaaagaaaagtctctgtttttctctctctctttccaagagctttcctcttcttcatctctcttcttcttgttcttctttttcttcattcttcaattcattttaaacaatctttcatttactattatttactttctcatcaaatcaagtccttatcaaaaacccaagtgaagaaaatgaaggtgaaatttccctcatatattattcaacaatattattattctcttaattaagctttattacacaaaattattcttcttctgtattttattattatgtatctttcatgggttataatcacttttttaaattatgaattgggttttaacttcctattttttttttggttgttgcagaaagtaatagtgaaattggatttacatgatgataaagctaagcaaaaagctctcaaaaaagtctcaactctttcaggtatgtaactaaccaattctcctattgggctttcatgggcctatccttcctttcataggcccaaatatttgagctcaacaatactactaattcaagtattaatttaatttaatttgtgttgttacatgaacaaattattttgaatatgtgtaggcattgattcgatttctatggacatgaaagagaagaagttgacagtagtgggtgatgtagacccagttgaagtggtgagcaaattgagaaaaacttggttcacagagattgtatcagtgggaccagccaaggaagaaaaaaaagatgagaaaaaaccagaagagaagaaaaaagaagaagaaaaagaaaaagaaaagaaagatgaaaaaaaaccagatgaaaaaaagcctattgatgataaagaacaaattgcagctcttgttaatgcctatagagcttataatcctcacatgactcaatattattatgtccaaagtatagaagaaaatccaaatgcttgtgttatttcttagtttaattaattaattacttaattaattaccttttatttattaccttttatttgttatgtatatatatatatatatttattatatgtgatgctttgtgaaatttttgttgaactttggtgattttccaaacacccttttttttaggtgacatttttcttatattaggacttttatttttgtttggtgagggatttttgtattggtagaactatattttgggacaaattaaaagggtttttttttttttggtttgtgtagtacatataattcttcttcttcttcttgctatgaaattattggaggatgtcattaatgtatactataaattattgagtaatattattactatatttatattctatcaatgtgttgaacattttgtttcttcctttatattaaattaagttggccaaatgtcaacttctatagagtatatatattaataagattgtaatgagtgttgtattattatagcatatgaaatatagcctagttttaagaacttataaatgctaatatgaagtgatacaaggaagaagccttgtatattatcttaattcaagggtctattaggatttttttattttttaaaaagtaggagatttatttgcactttattaaattataaatgcacctcatttaattagttttattttgtataagaattaagaatatatatttttaatttttactttttttttcttgccactcacattataaaaataattacatatacagaataaaatgtattttttaaaatattaggacaaaaaaagaattaaaacaaaagtacatgacatattattagaataaaaatatataaaaaaaaacatcacaaaagaaatattattgaaattaacacaaaaaaatgtgatagatttttttttttttaaaaaaagaattattcttgttaattaagaataagaataaattttaaaaattgatttaagttgatttttttttttagaaaaaaaaaattgggggaaatttatttatttatttttaaaaataatactcttataacatgaactagattaaattttaaaaggaataatttatttttatttaaagagtaaatataataaacaaaattaaacaataaataaggccattaggggataaataagaatatgagagtcattacacacaaatgattacatgcaattctattttaagtaaacattatgccactataatgaatacgatgaagaaaaaaacacattttgtgagctaacattttgagagtattttgaaaatatgtggcttcatttttttttttaaaaaaaaaaacaattaaaaaccttttcctcagaaatttcacaaattaatattaaaaaatcaatgtaatacttttttttttttttttttttttcattttccatcttctcacccattccaattaaacacatcattatatataatactctttttatatttgtgtaataagttataaattattcttataaataattaaatttaaattcttataaaatagcacattgtagtagtactatatgatgcgctatattttataacgtccctactttaaatctttattgagttttttttttttttt

SEQ ID NO: 113750 - DNA, 5566 bp, Cannabis sativa
ccatggttatatcctccaacttccactcaggaagtgtcaatggctgcaataaacctgctggtctctaatattcacccttgctctgttgacaagttaggcacctggatacaaattctaccacattcttcttcatcccgctccaccagaagtagggtttaagatcttggtacatcttggtagtaccaggatgcaatgaatatggcatggtatgatcttcctcgaggatttcatttctaagtttcgcactatctggaacacaaaccctggtcttaaacaacagcatcccactatttgacaccgtaaaatctttggcttgaccagctgaaacctcttctatgatcttcactaattctggatcaactaactgagcagcttaaattcgttctaacaaatcagattgtagcatcatgttatgaagtttgcctacaacaaactcgatgtttgatctgaccatgtcttctgctaactgaggtgaaatcttaatcatactagttacctgcccgagacccttcctgcttagggcatcaaccaatacattggccttcccagggtggtaaaagatttcacagtcataatccttaaccaattctaaccaacagttctgtctcatattcaaatctttctaagtaaagaagtacttgaggttcttatggtcagtgtaaatctcacacttctctccgtagagataattttgccaaatcttcaaagcaaaaaccactgcggtaagttttaaatcatgagtcgggtatcgctgttcatattctttcaactaaagagaggcataggcgataacccgatcggcctgcgatcggcctgtatcaatcctgtatcaatacacaatcaatacacaccaatacacaccccagaccctgtctggatgcatcacaagtgactacaaacttttctttatttgatggtagggctaatactagagcggtaatcaatctccgtttcagctcctgaaagcttgcttcacacttgtttgtccgtacaaatcgttgattctttttaatgggctcggttaagggcgtagaaatcttagagaacccctttacaaactgacagtaataaccagccagaccagggaaacttctagcttctgtaactgtctttggtcttggccaatccctaacggattcaatctttcctaaatcaaccatgattccatctttactgacaatgtgtctaaggaaacacacctgagatagccaaaactcacacttcttgaatttggcatatattttatgttcccgtagccgctgtaaaaccattcgaatatgttgctcatgctccttttctaattgagagtacacaaggatgtcatcgataaatataataacacaaatatcaagaaaatccttgaataccctattcatcaaatccataaaagctataggagcattggttagtccaaaagacataaccaaaaatttataatacccatacctagtgcagaaagccgtctttggcctgctatttttacagtggggagctgctcttttttggtactttttctcgaaaccccatttttcaacattttctcgctatttaggttttagtcacgctatttatcgataggaagcttttagttttaagtttaagtccctgaaaagttgtttagcgtatcgcttataagttttgtgtttgttgtgacttaggggcctgtaaatcgtcgagcagcaattccactcaagttgaccggcacacctaaattcagaatagaggtaagattagtataatgatatgcatatgtgattacatatttagcatgcatgtttatgaatgcctgttagattacattgatatatcggtatctgtatacatagagttatattagatatcgatgaatgtgtgtttggcataagtactgattgacctatcacatcagtacgactagagtacctagtataagttgatattatggtcaatagtactatcgtacaaatgttctagactccaaatgtgtgggacatgagatagggttatgattgggtgtatgggaacctagttataatctggtttatgttatgatatttttatactttttttaccgactctgtcgactcacagttattgtttacatgtgtagataagggcaaagctaaggctaagcagcagtgaatgcgagcaaatgaatattgtacatatcggagccgttagacctagagtgttcgatctttggagcatcagactgtattttgaatagtttttaggcgacaacttttttgtaattaatgttttgtaaacatttgtaacttttaaaatacgggatcccagttcatgtaaagtctactttgttttaattaaagattaattgagtaaagttttaattaaacatgatttctaataatctcgttgattagcaacggattgcgtagataattttaaatcgcgatagtatgcctaagctagtagggtgttatagtaatagtctgtttatactcatgcttctgacaacttgcccttactatcagatcatgggaggtttaagcgagttcaatttagaaccgttggatgggtgaccacccaaatcgcttcatggatctataaatctccttcatctcccccttttttttcaaattttcactttcacgacttctcttagaatcccaaaccaataaaaattataggcacaccagattttctcctactttttctctatggtgtcaagcacgagtttacagtcactgcgtaccagctctttcgacagttcaaacttctcccattagtaagttgtttttcatttttattttttttgctggtgatttttttgtataaatacgatatttttacaatatgactgttgtttgacggttttcttcaaccatcttcagtttaattctttggttgtggctaccatacctaaaggttttagaacacaccatttttttttctctttgcctcatgtaccatttcttattgtgtatggtgaaattagcacctcatgcttggcataggaaatttctaatttctaaatatgctagcatccgaagggggcctcttcttaacggttaggggagcccattccctttcttgacttaggatttgatgtgggggttaactgttgagtgtattcttgttttttagatgagaaaagtttcgagagatctacacccgcatgaattttatgcatttgatggagaaatcctcaaactttactctaagacaaaaatgtcgaatcttggagccccttccaactattcatctcaggaagcgaccttacttcccgctatcatccctctgttggttgttattcagggttcgtttctgattcgcaaatatttcactgagctattggaggggaagatgatgatctacattcatctctagggtgtgctcatttaaagagaatgagattatacctcaagaacctagggtttttcatcgtctagcttaagaatttgagacccgtactgataattatgagggtttcttggattggagccaaacgcatctcatgtctggggcaagcttgccactctaaaattattttattgactttttaatttttgtaggattatctccttaccaacttattccccaaggctaccgcttattattgggcctctttattttttatgtgtttaggggttggagtgctcccaagcccgtagaaatattatacttttatgaactaatttccattcctaaaaaaggagacagattcaaagatggcttctattcactacaacctcatctagctaacgagaccccagtcccgtttaattttcaaatgaagagaaggatttttttatcgatttttctactcctccagttctaaagctttccagcgtgaggaccttttcactgagtggacctagattccccctttgttgtggatgacccctacttaactttttctcaaccatgtaccagtcttctctttgcttagtagggagtagctgaacgttagaaatctagtgaccacggttaactgccacagaattgggcttctacaaggccatcagccgcttaaggacaccaatttgtctacgatcaattgcccaaatgccagaaacatgaaggctaagaagatgcttgggtttgagataatccaagaggcttagttgaagtacaaggcatatcagaggagaaaggagcaagaaaacatgctcacttgatttcaaagcacaatagagcaagagatgaagaagaaggccgataagaaacttgtggctccaaggccatcttttccttccttgatcttaaactctgagactcttggagcgagtacatctggtatcagtaagtctcccttatctttgcattatgtttcttcgatttagaactatgctcaagctagaccaactggctttgacaagaggttgtatatgttatgaatgcctcattctcggtggagctatagggagaaagaactatattttttgcatattggagataacctgggtaggtcctgaatgagatcagatcctccgattctgattcttcttaaccactcttcctacattacttcgagccggttcctctcttcagataaatttctagggaatgacaacaccaacgatgtagtttatgaatttattagggaagaattaggccataagggcaggattagttcctcccatttgctttattccagtcccataggtggcaataccctcccatcggtggatttctcaagagtcatcgttactcccgggggccccaaaaagatgctccttcaaacctagaggttgtttttcaaagacgaggaggaagtggccctactagaccgatagtaaaaagatctgaccatcaacttcaggtccacaaatagcctaaagttgtccaagacgtcttcccaaagtactgatgactcagggatccttttcgaagcaactatctttatgggtgtcttgtccatcactttgaccccggtctatccctttgaccccaatccatccaaacaatgctcccttacaactccagttggccaagaaaaatttttctgtggatgagcaaacttaggggaatgctaaggcagaggctttgaggacatggttgatgaataaccaggatggccccctcggggggattacgctgaccaagtcagagacctgaatttggatcctatgacagactagttctcaaacttcttggggtcttctctagctccttctgcgtctaaaataatgacccactttgcctctaacatggttcggcttcctacaaagaggttctctgcatgtgcttcatccaacccaatctaccaaatccaggacatgagcatagccttaacctcagtgagtctgggcacatcttatagcttgtttacttcactagtgttttattttactaaatgttacttctcttacagtttgaatagattgttgctgaagctgaccacgtgtccaagactttaactgattagtgatatgtcgttgcggctcatggcagcaaaacataggtgcttaggaagctggaggaggccgagaagcaaagggaggtgttgaacaatgacatccttgcggagaaggtactaagtgttgggattttgtgccctaaataaaacccatttaaaaaataatcatatttactaattaataaaagatcagaaattatttta

SEQ ID NO: 113751 - DNA, 1546 bp, Cannabis sativa
aggtcgaacccgctcagaatattcagtcctaattagaatccttcaatatcaaactttccaaaataatataaagcattcaacatctagtacaattttgatagtagcaatataattattgaatcctaaaatagtaaaaaaaaaaaaccaataaataaaattaaaataactaagggaatcttttctactcaaattcaattaatggtctcaaattgattgtgtatatcttttactaggtaattaaaatgttagaatataatattagaaacttttggtatacttatattctctttaggcataaaaattaaaattttaattcttttgtttacatgattacataaattgtaactacttaggaccatttataaattttcaaaaaaaaaaaattgaatagcttaccgtaccaaaattaaggttcaaacaattacttactacacgcatcaaaaaaataatcgtacgtgcaagaaaatatttaaattttattttcgatattgtaaactattcaaaattttctaaaatttatatgtgatcctttataactataacattcacaatgatgaataaaaaataaactaaaaagttattttagatgcacaaacagatagcaggtctatcccgaaatttttattcacgagagtgtactataaactttataaaatttctctatttggttctatatgcaattcatattgttgtggacattgtcccacatagaataaatggtagataattgagtcatatataagaacatgggctactccactcattgccaaatggttttgagatggaaccccatgattctctacatgatatcaggagtcttgactctcgacaatgtcatcgtcaagctgcaactggatattggaatccattttcgaactccttgtcctcttccctcaccgtgaaactcgatcaaactaatttcctgtcttggaaatcttaggttactcccaccgtcataggccatgatctcgacaagatcctattcattggcgtaccaccgcctcaaaatcttgtcaacaacactccaaatcctgaatacagtcagtggagaaagaaagatcaacttctattatcatggctgtgttctttaatgtctgattctgttcttgcctctgttgcaaattacactacctctcactctgtttggcgtgctcttgaacagaaattcgcatcacagacgaaagcacgtcgtctccagctcaagggtcagttctcccacgtccaaaaaggaggtctatcaatatctgagttcattgacaaagttcaaagcattgctgactctttggccattgctggatctcccgttgatgatcaagatcttatgctacaagttttgaacagtcttggcccagaattcgatctcgtagtatttggaatcacatcaagaagtgatgtcttggctattgaagaagtttaagctctctctctttctctcttttctgctctgtttctcaacatggtatcagagccatattccttgcgggcaagtgatcctatccgatctgtacttatacagatagtgactatgtccactctgatacggttc

SEQ ID NO: 113752 - DNA, 3562 bp, Cannabis sativa
  modified_base (3533)..(3536): a, c, t, g, unknown or other
aataattaaagcccatcagtgggctgaaaacaacaaggattgggccaagcccaatatcagttaaccttccgggaaggaaatcatgttactcatccaggtgagtctctgtcaagtataacttgcatccggaggacttctagctctacatagccagaggaatttgccagtgtgttcttggaagtaaattatagtttctcttttccaatccaagtagaatcaggaaattactttccatagatctaggatagagaacaatattaagcttaaaagggaaataacataatttaagatcaaataattaattacccacaatcaaagaacacggtatgaacaactatcgtcgtgatcaacttgccaagtcagcatacagtcattgccgcatgggctggggttttcacgataaatccaatgtattgtattatgaaagggtaactaagtataatttttattactctatacctacacaacaaatccttcaagcaaagggttagaaattcttaactcacaagcttgagaagagaatagagcaaatatattcattgtaatccctttggcttttctagcctagcagataataaaactgactcgtgaactaaggctctttaacgccccaaccacataaaaacagtgttctcttttgattattgttccttagttcttacattaaataatttgttttgtaaaaatttcgataaatattttggtgctatcattcagagctaaagaaagaagtgataccacctcaaattacgttcagcaattatggtactcacccgaaaaaattttggtcgtcactatactaatcctaatgctaacgcaggagatacaatagatccaactagggtaaccagtcgccacgaggatcaacatagtaaagaccaaaatcctaatgatcctatagtcgaagacaatgaatcaggagagaatagttcagatgatcaccaagatacaccgaaagatgattaccaagacatgcctactgattgtggcgaaaagaaggacgacctagacaagtcagatcctgtggtcatcatggcgaagaagttacaaatagttgaaacaaaattaacttgataggaagaattttctttgctaatgcttgagaaaatgtcgagaatagaatttgtaatgacatcactggctatatgaaacaaaactaaacaaacaactccaacggacaatgccaccgggaaggctgattagaaaaatcttggaacttatgacccttataaagataaaaggaaagaaaaagtaggcaaaacttcgaggaaagctccttaaactgaccaacaaatgacatctaaatctgcccccaacctcaatagaaaaagaaaggaaaccatgcttgagggtagggtaaccgaactaattctaggggcagagctgcgtaaaaagataaatctgatgccaaagccaaaaagcctactgcctgaaaggatgcaaatcaatacgacgattgactcagacaaagtgacaatgttgaagaagtgcatctattatcagatcacaacagtgggagtctctccacaactgatcttcagagaaaattaaatgcaaagaaagaaaaatctagaacagagaaagtcagacctcgtggagatgacttaaggaatcacattaatgattaattttacagaagagaatctttagatgacaaaactcaatgcttggaatgcaagtttgaagagttaatgaaactcacggagaagatctctcggaagcataatggaactgtgtctaatttggaagaagaagacacagagccatatgtgaaaagaattatagacgcactactataggagcatttcaaaatgcttcatatgaaattgtatgaaggaagaatggaccccaaggaccatctatccaaataccactatatgatgcaagttgctaaggctagtgatgatgcaaagtgtctttgcttttcacttactctgacaaaatccattaaagattggtggaagaggttgtctcctcgatcaattcataactggagagatttgctagccatgttcaagaaacaatttatagcaccaaaggatttcgatctagaagttagctccttgaccaacatcaaacaacaaccaaaagaaagcctcaaaaaatacatacagcatatgatggatatttctacaaagatgaaggttactgatgatatgaagatggtggctttaacatcaagaatatccactggatccttactatggggtgggcttcagagaaagagggcaattcaaggattcatcaacctggaagaagcttatgcttaggcatatggaatacttctaacaccatcatcaaacacatccacaactcaaataactactcccgctattttgcctccaacatctacattcacaacgcctactatttacagagctggtacttccatataaccaactggataagcaagtttctctagctttggagtggcacaaactgaatatagttctgctcttagacaaatgaaccaacaaaaggaagtaccagaatcgaacgttagcaatccttgaggcaaaagaagttctaaacccccaagtaggagcgaatcttcgaagaaggggagaacttaggaaccaagataatctgagtatacaagcttgatcgatactcaagataatgtatacaaatcaacttgcagcacgatgcactacataaggtatccgccaatgtataaaagtggaaaacaaagaaggtatctaaataaaaggtgcgaatatcatggcgatgttggtcatacaccgaatgaatgtgactacttaacagaaaaaattgaaggattagtctgccatggccacttatccaactgggtaaggattttagttatctatcctagacaagcagtagcacacatacaatttttttattcctggatagcctggagccataaatcctccttagggagtaggaatccagtaagctcatagaatacaagctccagctatacaaacccctcgggggtacaaaatgccctagtggtaagaactacagttgctcttggatctggaaacccgtacccacctggagctgctctgctagcattttttttttgaatgaagctgctctgctagcattagatggtcatgtagccacaatatttggaggaccatatatagcaaaaaacatgagaaatgcatagaaaaggtatttgaatgagttgaagcatggtgaagcctatagtctggtataatcacctacacaacgtcctcgaatgatgattcttcctataatattcacggaagaagatgctaagcatgtacatttttcacataatgatccattggtgatagaagcttaagttgctaacaagagagtgtcatagattctcatatataacagaagctcgatcaacattctcttcaaagaagcttttaaagtcatatgtcttgtggaaacaaatctatcatcttgcccagttcaacttcaaggctttaatggagatacccttgttgcaatgggaaaaatacaaatttcggttacattgaatagagctagttttggaagtaacacaatatgtgttgggttttatgccnnnnataaaactctttacaatctgattagt

SEQ ID NO: 113753 - DNA, 1537 bp, Cannabis sativa
  modified_base (1508)..(1511): a, c, t, g, unknown or other
caacatacatgatagtaaatagatcctggtaaaataatttccaacaattacaatgttgggatgtcttttttggaaactaagagaagtaggacacaatgtgatgctagtggatggcctaaggtggacgtgagccttactatctctaataataatttttctacaactatggatatacctgagtgttaagtcatcactacaggggagcagttggatggtgcaaaatacttggatggggcgggtattggtgtccaggcccgccaagaattaggaatgtgctatgttggaattgttgggggcttgggaaccaacggagctttcaattccttagagaagttgtttctcaaaagggacccaattttatttttctttgtgaaactaaatgtcataaatcaaaaattgaggggttggccagttttttacaatttgaaggagtttttgtagtggaagctattgggttttcgggtggacttgctcttttatggaaaaacaaggaggaaggttctttattgggtttctataataatcatattgatttaattatttcctctcctcagtctagagattggagattaactggtctttatggtgagcccaatcgaaatagacgccaaaatacttggaccttacttcacacgctttctagtcagtcggagttgtcatggtgtattgttggggatattaataatatgattcgacctaaagataaacgaggaggtagatcatatccccgatggttaatctgcgggtttaatgatgttcttcgtcagtgtggcttatttgatcttgagctacaggggcacccttttacttgggagaaaggcaggggttcacatacctagattgaagtgcagttagacagagcgttagtctcgagttcgtggagcctcacttttcgtaatgcaactctcacaaatttagaactctctacctcgaatcactctcccatctttcctgaactgaaagtggcgaaaagttttacttctagtcgccagtttcattttgagaatacttgtttgaaggatcctttatgttttgagatcgtgaaggattgttgggagcaaaatcatttgttatatattggtgataagcttactctgtgtgctgacaagttatcccgatgggataaggagataccgggtactttaaaccatcgcatcaaatgttataaggctgatttgaaatctctccattccaagtgggatagtgtttctgtgcaatggtataaggaaattaagtagaagctctttgaatcacttgaccagcgtgaatcctattggaaacaacgagcaaaaaaagattggttaaaagaaggggattcgaatagaaattattttcacaaggctgctagcacaaggaaacacaataatcatattttacaattgcgtaatgaacaagggaactggattttatgggagtcaggactacccgatgttgttttttaaactacttttagggtttgtttactaccagaggtataccttgtagtgagtgttgggttttatgccctnnnnaaaactctatttcaatgtaatccaga

SEQ ID NO: 113754 - DNA, 3152 bp, Cannabis sativa
acactatattatagtctaacataagcttcaccctgaaactgccaagcatgcattattagattgctccagatcgaggaaagcttggaaatcttcaaggtttgctacctattattataaatttaagcatcttagtttatatgatttttttcttagtattacacatgagttggataagaattatatttgtatcttttgttgttttttatgggctctttggaatcaaagaaataatatttttttaccataagcagtctctccaaccgtatgttatttatgattggagtgttaattttttctttaagtacttggatatgcagcaggtccctgcctcatctagtgctcctaatatggatccgccagctttgcaagagtttcctactgaggcatctttccaaatttttactaatgtagccattgatatcaaccgaaggaagtatagcattggagctgttgtgttgaatcacttaaaccaggttgtagctgttttgcaaagccttttacaggatgtgtttccctggtggtagctgaagcaaaggaaattttccaagcattacagtgggcctcctttattcatctccctgttgatgttcttaaaacagattgtaaatctactgtagataagttaaattcctgtaattggggctctagtcttttggatgatctattattatgtattaaggacttattatctttctacccaaatctgagcttggtccatgttagaagggagtctaactctctggctcatagggttgctaagtggggtcttaggcttgataatgagtttctgtggaatggttcttttccttccctttagtcttgtgtgtttgtatggttcctttgtaatacacaagattttattcaaaaaaaaaaaaaaagcttttctctctttggaactttctagtgggttgtatcccgttgtggtttcatttggtaccaatccagcgtactctctccctcatgatgttggatccttgtttgtttgtttaatctattttccctttgttaattactcgtttctctctcctcattcattgtgacttcaccactcttaatgagttttgtctacttgccctttctcaatctcattaattgtttcaccctctatcccttcctattacctctctttcttcatttaattttcgtcaaatctctacagtaaatcttcttttaggggattttcctttaatttatttgcccttctatcttccgatatcctatcaccataaatggatgccaccattttggttcttccaaggaggaactgatgattatacctaagattcgtggatttggcctacgatttctgcaggcttggatgatgttcttcatagctgacttccttaatgaatctcggacatgcaagtatttttctaacttcagttatttaagagtgtgggttctctggagatccttactcttctgctttctcttactttccttatctgaaaaatactggaaatttttcttctttattctgttatgggaaatggagggtattactaaaaatatggctcgtgttttaactcttgctgagaaagaagctactgtccatgagcttcttgatgatatgggaggggatcaacaacctgggaaagctttctaatttgtttttcgtgtccttactcctcgaactatcaaaatcgagtggtttgaagaggcaatgaggaatgcctggatcactcgagctcctattactttctctgaatatggtaatgggatgttcatggttgagtttggttgtgaaggtgatatgcgtagagtgattcagggccagacatggcactttgaccactatctggtcactagtgctaatcctactgaccttgacactctccttcccaaccaactcaggtattctcccttttggattcaagcccattccattccattcggtatgaaatcttataagcttgacaaaatgattggggatgaagttggggattttcttgaagtcgataaaaccactcttctaaaatctcaggcatgttcttgcatgttagagttctgttagatgtttccaaaccaatccctagaggtatcttagttgatttaaggaatatccacaaggacaaatggttgaattttaagttcgaaaatttacccaatatctgtttctactgtgggatgtttgatcacactttaactaaatgcattacctatctgaaaaagtgtgatgaccatgcctatccaccccacttcagtacaaaatccccttgaaagctcctactaagtctaacttcaagcgtaacccctttggtctctctaactctttcccgttggaagagctgcctttggcttatggtaatgttgaccaaagtctagctgttgctgttagccaattccttaccactgaggatgttggggccggttcttattcctctggcacaactatcagaagggatgagattaactcttaagggcttcttgatagcattcctatctctactcctaagcattctgcctatgagaggatctcgattgttcaaagtttcactcatgctttggatttgtgtggtgtcgctttagttggtgtccattgtgatacctctcaaatagctcccccactactgctattactgtgcacattccaagttatgttgatcctgatactgtcaggatgttgctaagactttaaagaagtccaagggtaaagccattactggtgcaaagcgttctgcattcataccacattctggcatggtgggagattctcttagaaacatccttaaaagagctcgaggtggccctgttatcaatgaagtttcttcagtttctgtgtctccttcagatcaggcaggtgttgtggagcaaccccacccaaaaaaaatgattctcatgggttggaatgctcgtggggtagggagtccccgagcattctgaaatctctcccttattgtaaaaaatcataagcctagttttctttttattatggagtctaagttgttggctggtagctgtgatgtacttaagactagactctgttttgacagtgcttttaaagttcctaggaatggtcttagtggtggtcttttgttgttttggaaaaaggaggttaatgttactattttgaattattccttaaatcatattgactgtattaccacttttgaagataatataactaatcatatttcttgttattatggttc

SEQ ID NO: 113755 - DNA, 2792 bp, Cannabis sativa
taaaatacatatacttttttttctcgattttttttttcagggggggcgactgccccccctcgctacaatgtgggtccgccccggtgtgtgattcggattgccagtaaattctattaccaaactatttttttatattttattttttttttaataatttacgatataaatacttaagttaaaatgacacgtaaataataatttaatatttaattattagataattacaaaattttaaaaatataatttaaataattaatattataactacaaaaaaaatataatttaattatttatactataaattatttttttatatatattttaccataacagtgaaaagcagtttatgcagtaataggacagattacatttaatgggctgattaagatagggacagatgtttataaagataagcaaaatcatttcaaccacccaaaatcaattatgatcataaaagtgaaaaataaatatacggagacaaaagtagttaatgaatcatatcctttgtttccttctaaatattttccttgtcaccaaactgcaatggaaaaacaaattacattccctttatgtttcattaccaaatctaatccactacctctgcatttctctttttctttttaatcttttatgctgaatttgattaacaattgctgtaaaaatgagttacttccccccattaattcaaaacactatataatatatatataaggtggaccaatctatatatttagatgatcatgccctacctcaaggcaaattaaataaaaacttctaaaaattactgacactgttgagtaaatgatatcattatttctatccatacaggcatatattagctctgtaagtgtaccttttcttctatcataaatgaggaagttaagaattaccacgggcaattttttttttatttacttttttaattattgtagtaaatactaaatatgaatatgaccccatcccttccctatggctgctatagttaattttcttttattaaattattatttataattttaactggttccattccacattaataatattaataagtaagaagtacctgtttggagacgttactgcaaaatcaaaccagcgccgttgattttcatgccacttgatgattcggccgtcggatacgccggtgtatgggccttcaccaaagctgtcaaaggcatagctttcagggccaatagccccatcgattgggataaactcaaaacgtccgaaatcagcaccgtcaaaatcacgagaagaagaagaagaagaagaagggtatgagaactggaagaggttggctgcaaggacagatgagagaagaagggctcctatggttgcagtaggaaagagtttggacgccatgattttggcatggaacaaaacatacacattaactagctaattcaactttataagatgggttggtaaagggtgataatattatgctatgactttgttaatgggagaggtatagagcttctcctttcttggagcacaactattttgtgtctatatatataaatatacatgtttatatatttagtaattaatgctaattaaggtgcataacgtacatgtgtcaaatactagaaagatcaactactatactatactctatatccaataataatgttttggtcatgataaaaatagcataatgttatctctaattacacacaaaatcaattttttttggaaaaagaaaacgatgtcgtgtggtccatgatattttgataggtctcaactcccgacatgtaatactgacacttatgtcatttttgttatgataacacctcttctttattttctacagctttaataattagttccaaactaatatggtaagaatccgttaccatcacattattgggcttttcactacgtatatatggatagtggacagctactttcgtacaacagagttatacctaaacggtttaagattttgggattaattttgggatgtgtagtcaatgtttatatatataggattgcatttggagatgaattatagaatggatttagggagggttgggttggatttactgaaatggaatgaatttttattttttttcattttattttattatttggttacattttaaaatattaaaataattcaataaaatattatttttactgttttagttgaatgattactctattttaaaataaaattcaaaatcattccaatataatataagaaaaaatttaataatttttttatttatttaaattttatttctattcattcttatttttatatttttatttctttcaaccaaatactaccttagtgtttaagtaggaaattagaacaccctacctttcatttaaaaaaaatacaacatcttattattatttaagagtactagtacaaggttaatacactttggacaatactaacttttacaaacttacacactttgaacaattttgcttaaactttccctttagacacacaccatacttttattttatttatagactacacaggaaatctctaaatctttctagaattttcttactttccaaagttgtaaacaagtttctactactatctatagctaatgtaagtaattctatatttaaaatttaatagaatgttctaaattttctcctaatactttcatagaatattttaaagtattctagatttggtaataatttttttttgaacaaaaattgcaatttttattaaagcaaatcagctaacaaaatagcttcgaccgtataagattaatacaatctgaaacaataagaccaagaggagaaagaatttggctcttgct

SEQ ID NO: 113756 - DNA, 2449 bp, Cannabis sativa
tttttttttttttgaggaaagaatggtgacctttttagtaagcaactattgaaagaccataattacatgtacacttcttattcatttatttttataaattaatgctcaaattgttacatgtaaactttattccacgtacattttaaaatggagagtgtgaaagagaagatagtgaaataaagagtattgttagagcatctaaattggtgatttattgttaaattataattcttcgtgtacaaaaatttattttaatgtgtcaaaagttaaaccaaatttgttagcaaaaattaatttaaatttaaaaaatttacatcacaataaatatattatttttatatttatttttatatcatttttaatattttatattaaatttatttattggattgaattataaatattttatattttatatattaaaataataacaaaattaaagataaagctgctatttttctatatatatacatagtaaaaaatattaaattttgcattaaattttgtaaatgtatattgaagtgtaatattaaaaattaataaaaatacatcataacattattggataatgcttcaatagatgtattgaaaatgacttaatataatacaatttttatatcttccatatctcggatgtctctaatggttgaatcatggatactaagtgggctcttattaagaaacaattttagaatattggactcaatggtttacgaaaattaaaagttaattaccatgagatcctagttaaaaatatcacaagttttggtaaaacagctagaaaactaagtgggaatgaagttaaagttgagtaggtgagatttgagtatgaatcattgaatttaagtgaaataatcaatgcgagttgacatatatacaatgcaatagtaatttggacagagaccatactgcattttggatagattccttagctttttaaatttgtatattttgtcgggttattttagtttagtttgtgcgagttatttgagttaggcagtttacaaaaagcttttatgtacattcctatgctgctgtggagtgtttgactagtactcttagcgtttggttaggagaaataaaaatatagaaatagatatagaaatagtaataggaatgagaatgaataaatcaggttatgcatctttataaaatggttatgtaagattggtaaatttgatttggcttttggagttaaggatgagatgggaagagagaaaatagcattgggtttaactgtttacaacacttttattagttctcttttcaaggttggtaagaaagatgaagcttattggattttggaggagatgaaaatctctggttgtaaacctcatactgtaacttacaatgcaaaaattcatgggttttgtattgaaaatgattttgatgcagcttacaaggtcttggatcatatggtggaagaggagtgtaaaccaaatgtaattagttataatatcataattggtgggttgtgtaaagatggaaaatggagtgaagcaaatgatttgtttgaagatttatcaagacttggttacaaacaagatattgtttcatttagaacaatgtttcttgggttatgtgattgtagaaggtttaatgaagcagcaattttcttagatgagatgttatttaagggttttgcacctttttctgagggtagaaaaaaaattgttgatgggttgtgtgagaaaggtgatatggagttgttgattaaagttttgagtagcttgggaaatgcaaatttgattggtgtagatacttgggagttggtgatttgttctatggcctacaagaaggagattctatcaatatcaaatgtatatgagaaacttaattctttaatggtgccataacttgtataagcaaaaagaagattacttcttacgggagaagcttgaacaacttcctgaaattgagcgcgcctttgtccatttagattaaaagttctcacacaaacctgagcatgcgcggtattagtcttagtgttaagctgtaaaaccagttgttattatcttcttcttcatcttatctgagcaacaaattcaagagattagggaataatcaatatttattgaatattttgtaattaacaccatttattcacttgtaactctacaaatagtggctcatttcactattttggggaccaaattcatattttcaagagagctaatacgctacacaaattatcacttgtaattctttgagaaatattgagaaactcatctgactatggttctcgtgatcttaatattccaataagcaaatactaaaaaatattaccatataattagagttgaacctctataaatttctgatgtcgtttatttatctactgtccattaggggtgttcaataaaatttacaaaccgcccaacccgaataaaccgctcaaaccaaaccgaataaaccgataaaaaatacaacccgaaataatacaataaaa

SEQ ID NO: 113757 - DNA, 2793 bp, Cannabis sativa
agggaagtgattgaaagttgattgatggttgatagggaagccacacgtgtctgtgcatggaattgatgtgcaagtggtatatgtgtaataaaagaaagaggaaagataaaaaagatgatgtaaccgtatggatttttttgtaataaattgtgtaaattgtatttttggtgtaaaaatttctttttattttatatgtatattttctaccttcaaattcacatattgttattttctttttttagaaattgtattattttttgattttgataattatatttttttattgatattggaggaggggagattccaacttaggatatcctttttatgagaaaaagtgtgaaactactagggtaaatgtataactgcattttactaattatatttaagatagactaaaattgagcaggtaatttaattaaaggttattttacaacttaattaattcatatagttttcttttggatgaaagatgaaaaataatagagattcaacaatttttgtttacaacgaaaaatacattataatagtttttattttacgattttatctagcaagagtgtatagtaaagactaaatccacccacaaataattttggagacatgaaaaagataggctcctcttttgaattttgaatgtacaatgtattttgaaatatttgtacttaatattaatcaagtttactccttacaatttttttaataattggtccccctatgattaattccagcctcagcccctgatcataagtgtattagagatcaaaaaagatacaaattaagttttgtcctggtctgaatcatatgtagatgtagtgtggaatttcaatgtatgatgaaggccatgtgtgacagtggcagactaacaaaatcaccaccttagcttagttaactctttgcaacaaagtttaaatatggtgaacctctaattacttggtactttgggatggttcaaagtagagaccaaagtcacatttgtgtacatataacgtgtatatatacttaaagcaaattacctaattagttaagtgctgactcggacagtaaatactaaatagaaaataaaacaaaatggacagatgatcatattcttactgtcaagcataaatttcaacagctagcaatgtaattcaaatttagtaacagtacagcatatataaaatagataatgattacctaataatctaaccaaatttttcaataaaatccctgatttggtagaaaggatgaattacttataaaatatatttaatattgagggtaaatgctgataccctatcaaatcaatattattataattattatatattaattgtcttaacatataattaagaaattaaacaaattaatcaggggcacttgggttttccctcctgggttttccaattgttgtagcaagggcaggtttccttgtggccgtagacgcctggaggaacgcaaaggcatgttgcgcaacacttctcgcagaagaacttgcatggcttcttgtgtgatgtcgctgagcatcggtaagcacatcttggcttgcagtctgccaatttatacaccatcatgtaaagaaaattaatatatatccacagaattataatttatttaagtactactaacaatacatatatatagataggtagattaatttctattcttacctatacgagcattgttatagtaccacacgattaagtttctataatatttattaaagtaaaacaactgagatttaatattaaggtacactacttatagtaatattacaacttatatccggatttctctctgtatagatcatgatacaacagtctgtaaataataccttgaggacgaagcttctgttgacggccatgagcctgatcagaagacaatacaaattaaaaaacgatgacttgaatcaagtgatgatataaaaaaaattgtacaagacaaagtagtatatacgggtaagcgtacctcagccacatgagaaaatgtgactataaaaagtatagcaatcaccaaaaagaggacggagctgtacggacgagaagaggccattatttttcaaagatatataccaacactttctgatgctttttcactcaacaactcgatctcttagtgttgccaactctaggatttggatcctataatttatagaggggaaggaaaaggtgggatgtattgggttgaaagagtaaattgatttttatttaattaattattaacaaaataaaagcgtagattaaggcatgtaacggggttatgaaccttgtgtgtgcatgtgaaagatttgatggggaagagattgagcgctgaacgcggcgtgtttggtgttttgtttgtttggttttgctttcatactctgcttttctaagatttactttaaaattattaattttttgtttcaagtttttttcccattaacatttgtatttccttttatagtttctcatttttggaatgtagcaaaacactctcaatttgatcttttctcattttagaatgtttaactttttggaatatgtttagtggattcttaatgttattattattaggaggtttgaaagaaatattgaattttaggtaaaggtttatatttatagtgccacatgataaaatttacatttttgttgtcttggtttttttttcatttatactgtaaacactgaagataaaatacaaggcttttatttttcacacccagggacacaaccaccacagcaacaccagaacagtcggaaaacaaccattaattctggcgagatgaagtagaaacattaaaactcttaatactgggctgtcatggtttttctaata

SEQ ID NO: 113758 - DNA, 3424 bp, Cannabis sativa
  modified_base (1000)..(1008): a, c, t, g, unknown or other
  modified_base (1727)..(1727): a, c, t, g, unknown or other
ttaaatactattttaatctggatattacagcatacaactatttactttttataaatatctcatgacttttttggctgcaacccagtaatcatgtccagacaagcggtgtaaggcgcgattttattttgacataaaaaatgtgttataaagtttgtaaattaaagacatgtctattctatataaaatgtggctatgtaaccgaatttttagtttaacgatattttttaaattaccacgtcaacttaaatagaatatctaattgcttaacaaaatatttctttattaattttataatattattcaatatatttaaaaataaaatttgtatagatattttatataaagaaatttaaatttaaatttaaaatttttaaaatattatagatatttttaactttattattatttattttatattttaaattgaaatggttataataaggaattgattgctttctgtttttagttatggtaaatcgattcacataccatatttttcgtaagtttgggaacaaatttcctttatatcaaattaattacgaatccaacctatatgtactatgtagacacacttaaatttggtcatgtgagtttcggttaagaatatagcaaattataatatatgcattatcagatacgttatttaattaaaaaacattaaaaaattaaaaaaaaatacgtgtatataatcacattcaaatgacacactaacgtaacaatagctaaaaaaaaaatttaaagatcaaaatctcaaacttcattttaaaaattaaaaaaaaaatcattatctaatttaaaaaaattaaacatacatgtattgtacttaatattacgtgattgaacttaattaaaaagaaaattaattacatgtaacatcaacctagtatatatatattagtttgaaaaaacaacgtatatttccatatcaatcgtctctccagatccggttctgtctagaataggttagaggaaattagactttataccctttttatattgnnnnnnnnnatttttaccttcttttttaaaatttatcattttacatctttttctaaacactttactgattttacctctgtcacctcaatatattctctttgtgactctttatgtcagggtatttcaagtacaatacatataaaaagatgtatgtttcaattaaatataatattagaagtagatttggttaattgataaataaaagaagtatttttgaataaatcccaatagtctaggcccggctgaggattcagtcaaatccaaagtcgaaaacttttgtacatatagattatgtacaggaaaaaaaaaaaaaaactagatttgttattttttgagcaattagcttattgggctaacatttgagcccatttcttttacttttggacttacgaaagttatcagttcctgtttgtcctcctaactctctttcacgtttcaccttttacaaaaatatatatgcaaaagggtccaattatttttactttctaaggcccacgaattttcgaggtcagccttgcggctctcattttagcgcatttctaattgtaaaaatttagagaatatttattcagatatagggaaatttacatggtatattaatttttgttacttttttacgaaatactgtcaggtagtattttttatttttttactgtgtttttttataagtttcatattgcagtatactgtgttaagtttttactggtgttctactggtgttttttagntgttctactgttgttttgagttcttctgttctctgttctaatagtgtttacaaaaatacagtatttttgaaaaaaatttcgtgtgacaatatttttgtaaaaaataaccaaaattctagtatttttgtaagtttcccttgatatattatgtgaaaaaaatattaatatgctatattattagataaaaaataatattattcgaaaaatttacatggatgctataaaaaattgaaattaaaaaattattttaactaaaaattaaaataaatattaaataataatatgtgaaatcataattataatatttttaaagaatattatacaataaaatatttttaaaaataaacttatttaaaataatgtgaaaaaaagataaaataaaatatggaacaagctgttaattaagtagagagctcatcccgcaaaatctagttgtacaaaattagataaaacaaaatgtagcatcggttctgttgcaattcatgagtagtactagtagggtacttatactatgcaaactatatatgttcccggcaaggatgttctaacactgtaaaaactaagaaaattgggcaggagaatcatctttgggcaaagcctaatcgtgaacaatactttaaaatgaattataattaattatttactaaataaatataaccaaaaatgaaaaaagaaggaccccctcaaccacgccactctccactgtaataactactaataccccaaaaccaataactaagaaaccaagaaccaataactaataacattgtaattagagactaatgttaaaaatattgtaaaatttttaaatgacaatttattttgattcacataaaatgaaagtggagcatagtgttggaggtgatcggtaaaagcaaaaaacgagaggaagaggttaaaaatctaaaactgtcacaacttaatatcatatttaacctaaatgaaactatttttattgaaactatatataaaacaaatctatatttaaatgaataataaaatgttaaaaagattttatttaataaaaattataaattagtggcaaattaggtaataaaaaatgtgatatttattgtggtgcatgcaagtttagtttattcttcattacacattttatataacaaaattagaacttcatttttcttgaacaaaagatatgttcaaatatagcaatcaactatttttacaactctctattagatgtgctctcaaaacaatatgacttttggcgatgttgataccttagcatttttcaattttttttttcttttgtacagaatagtgagctctaagtttttttttcttattgagctatggcttctacatcttacgacttacatccaaaccgtgttccgttcctcccggcccattatgttctaatcaaaatcttttaaatgcaaaaggtatttttataaaaatactggatttttagtaaaaatttacaattttactgttacacggaattttttataaaaatactatctttttataaaataaccgtaaaataataaaataaaataattaaaataacagtggaataatagtaaagatttaatacagtacacaccccatagtaagaaagaaaaaaagtgaaaaattttagggaaatttgaattttcatacttacaataccctaaaattatttccctaaatgcatagttattaaaattggtcatatatgaccacattgttaattt

SEQ ID NO: 113759 - DNA, 3642 bp, Cannabis sativa
tattctctttggatccgcacaaagagaaaagtacctttatgcccttgctttatgactgttgggtgttggtgtagggggcagtttcggaattgccattatttcctacagaacttaagtctactgttacatcatcagcttgtgaaagtggaaaattggtgaagttgttcttaagaaggttgtgagatatatttaaataattcaagttaaaagttttatttgggaaccggaccagagaaatacttgaattagaaatgtctagatgtctgagatttgtttgggtttggagggccaattaagaaattcaggacctaacttgcaagaagccaaatccagaggagcttgaatcccctgcctcattattgttaccatctcgaattccttcaattgaaccttgcacagatgatcgaagaattggctttcaaacaactcttttcttcttcgctatggaagaagaacagattgagcgctacacgcgccttttttgcctcataattttttaaaaatttatacataaattaattatattttgtatttgaatatttgaataattttcttaaataacatacaatttactaaatttgttgttgtattgttttaggaaaataacaaaagaaatgtttatagataacttttattaaaacaattatatagtaaccaaaatctattggtgaaaactcttgacagtagattggaatatattagtgaaacaatattgctacaaattaaattgtagcttattggaatagatattagaattaataactataaagtatgtataaatatatttatggttcaaaagtcaattggattgatgatgagagaatgaatcaaattcttgagcaaagtgggttgtgtaaagccatctccttctctataaatctcatggttcactcgtacaagctttagaacttgcattaagagtggcctagggatagtgattggattgagaagatcttcattgagatctttccatgaatctttaacttgttggctaagtttctctatagcttcttcaccagtcacgccatattgtttcatgtaacactccacagttgaagccacaatttctcctgatgatttctttcgctccgactacaatatatgtatatattaataataatagttgataaaaaattgagcaataataacattttggtacatagataaattttaattttcttacataatagtgtatagtataatcacaaaagtgttcttataaattctattagaaaaatcaaaataatttagggtgtcaatcgaaattgtgattcaaaaaccaatgcgtgcgcatatgcatgcaacaagttgtttgaattataatttcaaaattataaattattcaaaattttctaaaaatttgtaagaggtttccattgaaggtaaattacaactttatcacttcactgaaaatattaaaaaataaataggtaattaaaagcatcaatactatagtaatatccataattaataaaaatatatatttataaataatagataatatgatttaatgtatatgtgtacttatgtttaaattatttaccttatggtagccaatgtcattcataactcttccaactattgccatagtttgtataattttaggttgaggattagaaaatatccaatccatagaatgttttgtaacaatatctcccattccaataaaaaccattgaaatgagcataaaagatcctgcactatcaatcccaactggcatatattcttctaatgttggtatatattttgtgtgtaaccatttggcttccttaaaataagctctaattagagattgcacctgaaaaaagaaaaaaaaaatcaattaatgatttgctataaatgttgtgaattaaattaactaatcttttatataataataataagtgctttacccctttcttagcatagctagggcagtatgatctttccttagaaaattgttcaatttcattgtagatctccaaaagtttcatgtaaaatattttcatgtactcaggcagagtatctatggcacatatatcccacctaatcataagaaatatataaactaattaatagctatatatatgtcaaattaatttatataagtcaatatatatatatatatatatttatacctttctattgcttgagtaaaaggctctagttcttcaagtgtaccaaagctatcataagcatcatcaattattgtgagaatagcaattaatttggtgattattagtctgatttgggaagtttctgcctcaaaaaacactccataaacccagaaatagcactccactattctgtcttttataaatgaatgcttacttttgtaatcaaactccttccaccaccttaataattaatggtcataaagtcaaacattattcataatataatagggtttatttaattgaaaaaaaaaatagaactttatagatagtatatactccatgaattatataatcacaatcattaataaatttcatgatatatatctaggacaaataatattttagaagtgttataaaaattactgataagatttttttattttgttaaataataaattggactccgcatctctgaaatggtaccaaataattctcttagctcaattttcattaattttttttttttataatataacaatctgaagctaatttctaacatgaacagatacaaaaaaaatatatatatataataatcggtctgatcataacacctcgaagtcagattattattaagttatatttcacaaaaatggagcttagagaatattttgtatactattttaaaaaaatatagaaactatattgtcatttaacaaaacaaaaagtaatcagtaacttttgcaaaatacaaactccaaaaataatatttatctatatatatctgtataatattgttttacgatatatgtacacataaattatgatttgaacatcttaaattatccattttttttttaaaattcgtaagtcttctgcaactacattatatatgaagtcatgcaatgatgaatgatgaatgatgaatgatgaaaattaaaatgtatatgtgcttcttagttaatcatgagttcataaagcactaacctcgttatgtaacttagttccttttgatgtagtttttgaagcaggttgaaatctagtttagcaagtattaaaagaatctcctcatgagaaggtagttgatgataaagtgatatgtaaagtcttgcctctcttctttgtaagctctttcgaatagggtgcattagggcatgtttcactaggtctagataaggagagctcaattgacatgttttaactgaggattcaagatgagtagttgtaaagataagtgcttcgtctagtattttctctccatgaactctcatttgtgcagcttcatacaagttcaacattcctcgaatgtcactcgaaattgattctttaaatttttcattttcattcttgtacttgtcgaatatgtctgtgttaattaatccacccaagccaccaaacaaatttataatcagcaataataataataataaacatataagaaaagaatagagcattgttataagactacatcagtgataatattactgtgaggtgatgctcagggtcgaacttgaattgaaatggaccataagcaaaaaaaaaaaaaaaa

SEQ ID NO: 113760 - DNA, 1725 bp, Cannabis sativa
  modified_base (63)..(64): a, c, t, g, unknown or other
aatgttatttctgatctatattaacaagtaaatctgattatatattgaaatgagttttatttnnggcataaaacccaacactatcagcaacacctcatgtggcttggcaaaacaagtaactgtcgtctacgaagaacatatgtgttattgaaggtgcatgttgagcgacatggcatccttgaatatgtctattggcttcaaatttctagatgagagctgagaggccttcgacacatataatgaagaggtaagtagaaagtgtatcacgttgacgtattcctctggacggggagatagaatcaagcacatgaccattatgaacaactttgtagcgaaccgtagagacacaacccataatgagatcaattgatttgctagcaaagcccatacgattcataaccgctctaagaaagctccattcaacccaatcataggctttgctcatgtcgagtttaagagccatgaagccttttttacctcttcttatccgtttcaaatagtgcatgactttaaagacaaccataacattgtctgagataagacggccaggaataaaagtactttgggtttcagagataatacagtcaatcaaatctctcatgcggttcgtctaaactttcgagatgatcttatagagaacattacacagtgatattggcatgagatcacccataacaacaaagtttttcttttttgggatcaaaacgagattggtgtcatgaagtccatcaagcataacttgagtgtcaaaaaactccttcactaagttgataacatcatcactaacaatatcccaatggtattggaagaaactaggtcccatactgttagagattagttgatagtgagatcaaactattgagagttttactacaatttgcttttcttttgacctttaaaacctaaaaaaaattaagaaaataaaaacactaaatttttaagtcttatattaagaagaagaataataaattgtttagataagtgctgttcataattttaatagttcattttttttaaaaaaaaaagtatttagtttagtaatttcttaaaggatatataaaatttagtatttagtattgcattttcactagtattgtttttgtcattaatttatgagtaatactacaaaatccaataatagtttcttctaaactaatactaaaaaaaggttctatggcaaacattcctattcaaaaacagaaaataaaaagatgtcaataaaacagaaaatataaaatataaaattgtaatgattattataaataatttgtgagtttatatttgacttagcatatgcaagagtgtgaagatgagataatcctttattttatttgtcatggtccgggtcagatggagatatgaatcacatttcacttcgtttcacatggccagctggctaaaaatgaatggttctctttttcctttttatttttaaattagaaccctctcattcacacacaccaaaatattaggcatatacttcagtcagtttggttcggttatagcatatttttactaattcaatataaatatggaattataaatatttaattgtaacttgtccaattaaaaattaaaaaaagttcaactcatccaataatttcgtcagtttggtcggattaaggcatccaaactgttcttcactttttttttaattattaatattagtttctagtatttaaataattaaatttaaaaaaataaaatatattatttatatttcaa

SEQ ID NO: 113761 - DNA, 3791 bp, Cannabis sativa
tacctaaccaattataactcattcccctcaagatgggctatatatatcccttaagcccatcttgtctttaaactgattgaactggttagcaaacaatggcttggttaaaatatcagctagctggtcctttgttgaaacatgcactgtcttgatgatcccttgctgcactttctcccttaccaaatgacaatcaatttcaatatgctttgttctctcatggaacactggatttgcagcaatgtactgagctgatttattgtcacaataaagcaatgcagggctttgctgttcaatctttaactcttgtaagatggacagtaaccaaaccacttcacaagtagtattggccattgccctatattcggcctcagcagaagatctagaaacagtatgctgtttctcgcttttccaagagatgattgaagaaccaacaaaaatacaaaaccctgtagttgatctcctagtgtcaggacaagcagcccagtcagagtctgtataagcatgtatcttcacttctgtttctgctgcaaaaaacagcccttgtcctggactgtgtttaacatattgaagtactctttgggcagcatttaagtgagaaacacgaggtgcagataggaattgacttagcttattgacagattaggagatatcgggtctagtaatggtcaaatactgcaatttacctactatccttctgtacaaagtaggatcagccagattctctttctcatcttgtccaagtttcagattgccatccattggggtattcataggtttgctacctaagaatccaaggtcttcaaggagctgcaaagcatagggtctttgagacacaaatatttccttatttgatcgtgcaatctcaagacccaagaaatatttgagtttccccaaatctttcagcttgaatctatcattcaacctgatctttaaggcttcaagttgttgcaggtcgttgctagctaggattacatcatctacatacaccaagagaaaaatgaatctatcatcaaagtgtttgatgaatagagagtggtctgttgcagagtgatgaaatccttcatcggttaaggcactagaaaatttagcaaaccattgccttgaagcttgctttaggccataaagtgacttttgtaacttgcaaactgggttcagtggcaactcccccttaggtctatacccttgaggtagagacatatacacttcttcattcaaatcaccatgtaagaaggcattatatacatcaagttgatgtaagtgccatcctttcatggcagcaagagccaaaaccagtttaacagtaacaagttttgtcactggtgcaaatgtatctgtgtaatccacaccctccagttgattgtaacctttagcaaccaaccgtgctttaaatcgctcaatgctaccatcagcattgaatttaatcttgtacacccatttgcactcaataacatgctgatcatcaggtaatgtaaccacgatccaggtatgactcttctctagagcatcaatttcattgtccatagcattgtcccattctggaatgccatgagcctgactgaaaaattcaggttcaaagtggctggaaacagtgaggacagttgctcggaaagttggagataacctgtgataatcaataacttgggacagggggtgagaagtaacaatagaattctgtgaagaaaacacatcagaatgagtggcaagataacaatggtagtcattcaaataggatggtttaacaacttgtcgacctgtcctactttgaacaatatgagaatcagtaggactactggacacagacttgtgagacacaggtgaagtggtcgaaacagtggtgttatgcacaggtaaagtagagaaaaaattctcgtattcagctgaaaacacatcagattgcacaaaagggaatatgtgttcatagaagtaaacatccctggaacaaaaaattttattggtattcagatcaagcaatttgtaagctttcattcctgtaggatacccaataaaaatgcatggtgctgacctaggagaaaattttgatctgttttgactaagtgtagaagcataggctaagcacccaaaggcttttaaatgctcatatgaaggtggtttattgtgaagaatgtcaaatggagacttgtttttcaggttgggagttggtgttctattgattaagtaggctgcagtagagacacactctccccaataaaccaaaggcacataagattgaaataaaagagctctagcaacattcagcaaatgctgatgttttctctcaacattagagttttgttgaggtccttgcacacaagagtgatagtgtatgattcctagttcagcaaaaaggtcattaaattgcaattcttttgcattatcagatctaagacctttaatggtagtgttgaactgattttggacaagtttaatgaactgtggaatcacaatttgggcatcagatttttgcttaattagatggatccatgtgaacctagagcaatcatcaactatagtaatgaagtatttgtatccctctgtagttaatgtattgaaaggcccccaaatatcaacatgtatgaggtcaaaacacttttcagcaatgttgtgattagaaataaatggcaatttttttttgcttagcataatgacaaatagagcaatgaaaaggggaattagaaatagagtgaaacttcaaagttttattgagaggatgagtttttacacaagatggatgacccaatctataatgccaaacagtttcactaatgattttagaatctgaaatagaagaaaaaacagagggaaaaagcttgctcttggactgatcacaatctagatagtagagattgccaacttttctacccatcccaatcaccttgctcttcatagtgtcctgaatgacacatttgtcatgggaaaatatgaatatgcaattagtctttgctgttaaagagttaacagaaagtaaattgcatttaaaagaagggacatataagacattatcaagagcaagatcagaattcaagttaattgttccaacacaatcaactttggactgtaaaccagtaggcaaaacaacagatttaaggataggatcataatgagtatctcgaaacaaagaaaagtcagaacaaacgtggtgtgtggctcttgtgtctataatccaatcagatttattaacaagaaaactcttaccagaaaagtgtgaaacaataggttgctcatctgaattattggtaagagagttatctgcaactttctgagcaagcagagccatcaacctttggcattgagaattggacaagctagacattaaatccttctcagtggatttttcctcagaattctcctcttcaccagtagtcaaattagcagaagctgatttcaatggaggacctttagcatttctgttggggaatttaccatggagtttgtgtccaggagggtaaccaatgattctaaagcatctattgatggtatggcctgtcataccacaattagtgcaagaatacttaggtttaaaaggttggacattaccagcaaactgtcctgaactgttaggagcagatttatcagcatctggactcacattaacaccaccggttaagctcctttgtctttcctcctgaatcacagcagcatatgctttgtttacactagggagtgggtctctcatgagaatctgagacctaacactgctgtaagagtcattcaagccaactagaaattcaagtagacgatcctcctcttgatattcatgaataatcttcatagcaccacaactacaaacaggt

SEQ ID NO: 113762 - DNA, 3176 bp, Cannabis sativa
gattctggtcgtcttctcaggggaagtcgctggaattaatggtggttctctttctcattgaatttttgtttcgattgcattgggttgctgcgttgttgcacaatggttgcacgataattgcccaggaagcatggatcctgagttgaaggtgtgtgtaagtggtatttgggtaattttttttttatttgggttgtatatatgtttatttggccagctaaaaatatttttgtaatattgttactttttttggttaaaactgaaaaaaaaaaaaaaacccatttttaaatgaatcagttgcaaatatttattcaaatgtttaaatattattatccaatatttaaataaataaatatcttatttaattaatctataatattattttattagatatgagaccccaaagagaagttttcaaggaacctacatctcccttaagttcaaaacatcaaaaaaggtcaagaaggttgaaggaaccaacatctcatatcagtttgaaaaattaaaagaggtcgagaaggttaaaggaaccaatgtctcccttaagttttaaaaatcaaaagaagtcgataaatattaacatttaaagactccatcatacaacaaaaaacatagcatagctccaaacacaagcaccacaccaacgagcatacaaaatcaatattttggagagacaaaatgttgaggtaggatttttgggtagatttagacattgtcacctcaagatttgtattgcgtaaggataaaaaaatcttttccttcgctttcaaaaggctcttaaatcattaaaaacagagtaagattgaaaaagttgtgcttaaaattcagaaaaagtacatagaaagtgtgaccatcttggcctaaaggagggcagcacatctcagccatgtttccaagtgtatcttgccctttcgacatttttgttatctttctaaaacatcttcaatcatccaaatagtatatattgagctagttatgctaaaaatacgaacaaagcacatggcaggtgtcaccatctcgcctaaagaagaagggagagctgctcctcacccaatggagtctctcctttcccaaaagatgtctctttacacccatggggaccaaggtgccacatctcctccaagataataccacctccccgggtgaccatcaccaactcaacataagttgtcaccaatcaagtgccatcaagcatggaaggcataatcaattactctttctagtctacaagaacacttgagataattcttgaaaactaggggcaagtgttaaccctgatatttcacaaggtaccttgtaatatcgaagttatacaaagtggactggactctaattataaaataaccaattgacaattatatttggaggctgattacaagattaaattcattttaagtgtctttgacacttaattataaaaagggaaacgggtgcaactcggaaggctatgaaattatatctctccaagcaccaaggttcctaacattgccatctgatgtcgtcgctgcccgatgtcgtcgcctaatacctctagtctcaagcctcaagaattgagcctcatggcaagcatcaagcctcaaggttcctggcatcactgccacccgacgcctcatgtattgagcctcaagcctcaagcctcaaggtgaccagctcgacaagtgcatgcaagaaccatcttccccaagggcatgcaagaaccatatccgccaagtgcatgcaagctccactcagccaagggcatgcaagcttcatcttcgctaagtgcatgcaagtaccatctcgatcaagtacatgcaagaaccaacacttcttcacattgaatacgtcggccatgatctccccaagagcatctcaacgatgctcttcctcaaggagccaactcaaccaagcatgcaactcgacgaagataacatcaacatcaagcccttatgtctttcaacaatgcaaccaacacttggtgaattttcttaagtgttggaaaggaaactattggaggaagagtcaaaacgacaaggcaaacacgcgatcgatcacatgtcagggtatagctatgctatctccaagacctgaaaagagaggacgacctggagtggaggtacgagtagtggaggcacctcacctgcatgctctaacatcctgaccaagagtacgctacaaacactacccttgcctgctgggaccacctgttacctaacaaggattaactgcaaccactacctccttcaacatgtgatctacaagagtacaacgtccatcgtacttgttttattggggactgcttatgtatctctgaccattagagcctaaatattctattttaagatttgaaaatgttgaaaaatatttataataaaggcatttcgagagcaatacaaatttctacttctttttcattaacttttgcaacttgcttgaaggttttaagtccttaaatctttttctttcaatttgtcttaaatctttgatttttcggccaacttcgttaaccaaaattagtagcataaagtgataatgttgattaggtagtgaactttttgttgttagagccacatttaactatagaaactcaaatttctcatttgaaatatatgtcctggtcatggctaaatttggttacatggtacaacttgcatagggtaagaacgagaacgattcagatctacgacaagacaggaaaactgtgagacatgggatcaaaattgagttcacattatttatttttcttcaaaaagagaaaaaaaaaataaacaaataaaaggcagtgcagacagtggtactttctttttggtagggtttttcaaactcaatagtctacaactgttttgcacttatggcaccttgccatgtgagcaatatgcaaacgtggtcaagcaaaaactatcagacaaatctatcatgacccctattaaaaaaaggtacttgggattgatgtgccttacaattttgttttgtcacaacaaaggcaatccattccaaattgacatggcatgcccaaataaaatcagtctagttaatagtactaaaacatacacattagggcagtgaaataattacactcttcaaatgaatgatgtgttaggtgtgtcaaagtgaagaatatggtttataaattttgcaatatcacaccatatgttgatttgcatactctagtgggccccatttaatggaaatgatagtat

SEQ ID NO: 113763 - DNA, 1302 bp, Cannabis sativa
  modified_base (27)..(29): a, c, t, g, unknown or other
acttcaaacctgccaaataaagtttannngatttgttctaataaagacaaaactgaaatcatcaattaggaaaagaaaaagtcaagtttctcaaaattaaacaactttttataagagaatttcttttcttacaagaagtttcctaaatcaaaagagactagctaacaaggaatattttcttagaagaaaaaagtaattagagacacaagttaatgtaataaaaataatctaaatactcaataaaaatgcacattaattagaaaatattttgacaattagattaaaaaaaaaaaaaaaaaacttaacacttataatattattagaataatccttgttgtaaatatgattatgaatgtttgagtttagacctttctaaaaagatatggatttcctttcaaaccgttaatttgtacatggatacatgttcagtggatattttttacaggatcataataatgattattgaaaatgagcacctttgtcattaggagtacattccttggatttatcacctacaaagatattaaattaatgtaacatgttcaatagccatttccttagcttagaagagagtccaatatatttgactatgacaataacgtagtttaatttatttaagcctatgcgaaaggtaaaattaatagtactctagaaaaaccttttccacaagaaaaagttgaaaaaaaaaatagtactcaaaatccaaataaataaattaggtaggcaaggccggtgggaaagctcaccattacaaatacaaactagaaaaatcctataaggtgggctaggtgtaaagaagtgagtggatgttaccttttttgctaactcaaactagtagccaacaaaaacaacaacttgcattgccaccaattatcgttcatttcctctatcaaaaaaagaattatctttcatttcccaccacttgtcgacccttcaaataagaaaaaaaaaatcaatccaatacaagtcacaactttcactttcccgttttacccttagcctcaacaaaattcttcaggtatttaatcttttttgtttttgttttgatggtattcagataattaatcttacttatacaaccttgaccaatttccagaaaaaaaaaataaaaaaaaattaatttcccatcaattttacagaagcctactaatcttgaccaaaggtcaaacatcatttggctccaaaaataatacactctaaaataaaaagtcaaagcaagtaaattagccaatacccaatcaaaacttgccatgtttgtgaaacctagctgtataggtccgagttttttttttttttttttaa

SEQ ID NO: 113764 - DNA, 1504 bp, Cannabis sativa
ttaaaatgtaaaaatgaaaaaacttctaaattttaagaagtatcgttaattaatcacatagtaacatatttaaacatgcttaaacaccactcaccaataaactcaaaacttggttgaaataatgatcttgatgatggggttgtacccacaaaaaaaaaagatgatggggtaatccaataaggatttgacaggtggaagagattgatatctaactaagggatacgtttacactgccacattactcgagtctctctttctggttcagaaaacttctgttattggcagtgtgtgacccactctctctctctctctaaatatatttatttgatttaattttttctcttgggaaatatcaaagaagtcagcgacagaaatgaatgggtttccatacccaaatttgttggtcattattttaagggtttctttgtaatagtgaaacgtggatgtgctacgaatcacagtgtacattttatatattctcttctcttcttgcatgtgggttgtgcagttttacacttcgaatcaagtatctagtcactatcttttacaaaaacatgtgtattatttcattcaactatatatattaattggggaccgatctcatttacataattatataactatatatagatatatattttacaagaatctaagaaaacttatagaagaggtaaaatagctaatagttaaaaaagtttagctaagaagtaaaaaataatgaaaaataatgctctatatcaattgagttattatagctcaaagatttaactcataaatagtacttattaactatatgtatgtgtgtaatgttattatatttatttatttattaaaaaaatgaataaaatatattaaaggaaatagtttttaaataatattaaaaaaatatagagaagttgaaacgtatgaggttaaatagaaaaaataaacttttaataatgtattataataaataatagaatagaatagagaagatgatgtgagtgttcatagcccccagcttttgaaatattgattggcaaagtcttgcatcataatattttcaaagttacaaaattacatccaaatataatttatttttctctacttctatatctaataccactaaaatttgtgactcaaaaagtagtcattattataaatataaaatttgtgatataagtaacttttatttaattatatgaactaaatgtaatatttaatgaccaaagaaaataatgttctgagaccatagccaatccattgtaaagaaaaattgttttttttttctcttgaaaaatttgtaattaagataagttatatatatgggtgcactcttaatgggtattatctatgaaaaggtaaaattaaaaaattttgagtttttatgcttaatttttctatctagctaattaaaaaaagggaaacttacaaaaatactagaatttgggttaacttttacaaaaatactgtcacacggaaattttttcaaaaatactgtgtttttataaaacaccagtaaaac

SEQ ID NO: 113765 - DNA, 3129 bp, Cannabis sativa
aaaaaaaaaaaaaaacaaccaagtcggtattaacaacttctaatttgattaaacctaattagttaattaaagataacaaaatgtcaagatagaaattccttcacaagtaaaccaaaaacgacagaaatatttggtgtcgtttttaacaatgttttttttttaggaaaaacttgttatcataaaataaaaatatgagtcatttagatactttccaaccaaagcaaacttcatccacccttaatgcaaatttagccaacccgtgaacaattattgtaaatgtgcgtttgacatgtgatatttttacatcaggaaaaaaaaaagacaaaaaacataaacaattagatcttgaaaagaagaaattgcagacgaaagagtgcacagaacattaacaaccatcaaggcatcagattcaatgttgttaattggtagttgctgctgagatgcccaattcaaactgtggaaaagagccttagcttccatctcatgagatgcataattaccaataattggcatgaagagggctgctacaacatgaccaagagagttacgaacaatagcacccacaccaattatatttttgttagcgcccaccgctgcatctacgttgagtttgagtgggccagagtcaggtgccagagctgctgttggaggtgacagcccaggagttgcagcaactgctgggtggaatttaattcttgctgcccgaaagttgtcgatgtaattggtagcgaagacagcaacattcttagcagatttagctttattatgtccatgtataactcgatttttttcagtccaaattttataaagctaggtactatcctaatggtacttttttatctgctactttgggacaaaatccaagttttaattggcgtagtattcttgatgctcaagagctagttcgggcaggggctaggagatctatgatacatggctctctaatacgttaaacccgtatgttacttcccatcatcctggtcttaatggtcaaaatgttacaagcttaatgtgtgttgatgctaatagatgggataaggaggttgtctcggatatgttcaatttaaagagacaagcaccttattctttctattcctttaagtgactcagcagacatgcatgaatgactgatattggaagaaggagggtatctgggctctattcagtaaagagtacttataaattcttgcaatcccaaaagggtgagtggctgcttactaaaaaaaggccatagatggaaaaaattgtggcaaattggtgtgccttcaaaggttcttcattttctatggagagtgatttcaggttgtccttccactaaggtacaattgtccacaaaacatgtcaatgtcaatctcatgtgtctattttgccacacggctatagagacaatttccatgtcttagttgaatgtggctttgcgtgctcctgttggaacctttatgtgttgtcgactggggagaatgtgactgaatttagcagctggtttttccaccatctcaaccatggcagcccacaataggtggaggaggcggcattgattagttggcgaacttggcaagctcgaaatgacatgttttagaacaataaatcttgctctgctttgagtgtagttcgatcggctaggatggttcttgatcaatggaggattgctcaacaacaaatgggtgaagtgttgttcttggtgaataacaacaatggttgccagcagtggcgaaaaccaatggcgaatatgatgaagattaacaccgattgagctatctttgaaagcgtgagtagatacggctatggttgtgttatccatgaccatgatggttgtttgatagaagttgtggctggcagcaggattggttgtgttcaaccggagcttgttgaaatttttggggtcaaagaagcgctaagttggatgaagagaaaaggcttgtcgaaggtggtggttgaatcggatgctttactcgtggttcaagctgtcaatagctcggttcccatgacctaacttcttagtgattctttttaaccaattcctagacatatgtcaatcttgataagaatatctaaatgtttaatgcaccataaaactaacacaaaattcagaattaatgagtataaaaagaaattactacatgtgttaattaacataatatttaatttatttaaagcaaaaatatttttatgtatttaatttaaaagtttttacaatagaataaaaatttgaaaaaaaaatacaaaaatacatcttcagcaaaaataataatttacttttgtggttatattataatttatttatagttatattataattatcatgggttgttgttttggttattttatagtttatttatagttatcataggttgatttcttattatttttagttgttttcttacttttcactcaaaaaagtgttttttgtaactttaaaactttaaatagaggaaactatacttaatataggttttttaaacttggttacaaaaatatagcacttttaggtttggccacttttatggcatatttagttcttgaattattttacggaataatctatgccatatatgtgtaaatttaatttttaaatcccatatatgtttggataaattatttttaaaaaaaaaaataaaaaatctcaaagctatttcttctccttcattcaagtaccctacctgcctcgcccctcaacaatccacctactaatctccgttcaccagggacacattcagcaaccgaaatcccaaaggatcgaacgaattttgagaaaccttaaaaaattggtttcataataaacaaatcttaaacatagcatgtaataataagaaaatgaatgttggatattattttctgagttgttaaatatttttttattgcaactggtttgtgtattcaatttttgttttagttatttaggtaagtagtttatgtgagttaagttttaatttaattgttttatataactattttctctgtgtaatgactttacatggataatgactttacatttaactgtttggtacttacagagttcctgaaatataacttaagtattattaccactaaaaaataagagaaacttacaaaaatactgaaatttgggttaatttttataaaaaaactgtcacacgaaaaaaatttcaa

SEQ ID NO: 113766 - DNA, 1624 bp, Cannabis sativa
actaagcggtctttacaataacacacaagtacgacacccacaggacatctgtgtgagaccacgtggtccctagctaaacagataccttctccccatgagccaaaataccgccaacggccctaaaagtcatgtatttcatgtatttactccaatagtggacctagtttgcacaaaatcctagcgggtcacaggtatgcccaaatccaaattctaacctataaatactcccttatgcattcatccaagggggacagacgattcacttcacacatttttaggttttcttcctctctaagctagaaaaacctaagtgagaaaatatagcaagaaactagggttctcgaacttgtaagatcccactgtaatgcatcaaagtcattcagcctaatacattgactcgtggactagggttaatcaacatctgaaccatgtaaaaatcctcatctccattctatatttacttatttagtttcttaagctctttttaaatcagttttaaaaatctcaataaaaaacagaaaggattgcgacaaagctttagagagagtctaaacttgttcatgtcaattgtatttgtaatttttgagactttactaattgatttctttctctagacgtgacccagtagactagtaataatcaaatgaatactaataccgtatatatttttcttgtgtaaaattttaaattttgtacaatttatttccatttatgttctattgatgcaagtctgttttcaattgtaataaattctctatctattgttacaattatgtttttaattatagttattaaggaaatacattaatttatgcaaaaaatactatttgtcaaatagcaatgctcataaataggtcggtgcttggagattgggataagttgagaactaccattttttattacatattaactaaatataactataaaataattttaattgataaataccgtcttttataatcaaagtattaaatataacctcatataactagtcaaaattagagtccctaatttatatcatgagaatatgatctattaaactaagtataaattaaaaaataattaagaaaaaagtaaaaatttaataaaaaataaaaactagatataaaatataatttgctcttggagatttgatccctcccatcccatccatcttgagcttaagagccaaatcactcactatggactaccctacctaagggtgttaggcccttaaagaaagagaacttgaatgttgcaccgacctagtatttgaactttgtagtgtcaatttgcaaattcttacaatcctttatttatacataaaagttatataagtaattttcttatttcttttcacttagtttcccacgtgtttaataatgttttcttcttttggtaccactttcactaaagtaagctgagctcaagtctcactctcatccattccattaaagtaaactatataatggtatggtattcccactaaatttccttaatttaaattacaacttttataaagcaatttataaagggaaatttgataatttatgctaaaaaattagatagggtgtttaattatacccaattattacacataaaaaaactatacctatcttttaattatcttccaaaaatacccctg

SEQ ID NO: 113767 - DNA, 4116 bp, Cannabis sativa
  modified_base (337)..(338): a, c, t, g, unknown or other
aaatttctatttggaatttaaaatttaaagtcaaagacttaaatttataccaaatatttcttgagttttattctagcttggaccaccgctactaatctaaatctaaatcgaagatttatatcattttagaaatagaagaatttctggggaatatagtagtcatttgcgtcattcaatttcataggagaaaatagagtgacatcataagcaaatgatttataaaccatttatccaatgatgtactttctaagcaatttcttaatgaaaaagctaagaggaaaaataaaggataattttgattaaaataaaaatctgatgtcccgtttaggcgagagtnnaagttattcttattttataaatttttcattatttcatattgtaaatactagtccaacttcatatttggatgaacaactaaatgttgcatttacaaatacttatctatcgagatctaacattattatgcttgtcaaatggatgtcaatcttttgggatttgtcccattaaaaattacaaactaagttagaccaacaatgaagattcgaaattttatactacaacaataataacagaaaataacatgattcaatataaattcatacacattcagaaattatcaaacatttaacacgtaataaagacatgtaaaaatataaaacaaatacatcttaaataatttttaaggtttctaacaaactgatacagtatcccgtattaggcgagagtcaaagatatcatctattgaatagagtagttaactcatctaaaatggaaactattctagcaaccttttattcgatcgaaaagagaatcccacgttgctttgttttagtcgagagtcaaggtcattcctatttcatgagcttataccattattttatactttgtaagccctactcttagcagccactattcggatggacgttactaagaataaaagacttacaataatacttatctttcgagattctatggcgttaaattgctaatgaacgttcatctattagggatgaatctcactaaaacaagaaccatgtaaaaccaacaatggagatcgaatgtccttataactaaagctcattattttaaagaatgtattttcatttgatatttattttaatattaatatatttatttaattaaaataactaatttagataactctaaatattaattttaatttaatttttataaaattataccctaggaagatttagaaaaatagaatttattttccatccttagtaaaatctatagatgagattttatgggttgaaccaatagctttttcagaaagcgaggacgatggggtgaatatggatgcgccaaatctagcgaatactggcctatttcaagctccactgtcgccaaagtcatcgctgaaagtaatacagcagcgggaagagattcgcacggagtttgccttctttatgcaagctaatcaacagtgttcagctgcaattttgaaaggtaactctcctcaaccccttgtgcttgggtctgaatctgtgagaaagaatttagctagctcttttgctagcaaggaacagggaaagaaggtgaaaatacaattggaagatattgaagatgaaatatcttagtggtccccttcaattgtatgttatgtgttaggagcaaatccaccattgtcaattttggatggatttgctagacgtatgtggaagggaaaggttgataaggttggaatgcttgcatatggaatttttttgattcggcttgagtctattgagttcagagatgaagtgttagcaggtggctacatatttttcaacaggaggcctgtcataattaaggcttgggacccgaatgtgaactttaagaaggaagatgttactttagtcccaatttggatacaagtaaaagatctagagctgaaatactgggggaaaaaatcattgttcaagataattggacaattggggaacccagtgatggtggattcggttactacggaaaaagacaagttaacttttcctagagttcttgttgaagtctcaatgaaccaagagttcccagatgctattgagtttgaagatgagtatgggagtaatgtagaagtctcaatcaagtatgaatggaaaccaattaaatgtgctcactgttatggattgggacatgccactactgagtgtagaaagaaatctggaatgaagcaggaatggactctcaaaactacaggggataagaaagaacctggtgtactgacagcagagaaaaaataggggaaaaaaccagcagaggtggattcagagggattccttccagctgggaaagtttggaaggttaaagagaaactgcctggggttccaacaacaatggtcaatgcttttcaagttctagctgaagcatcgacaagctatcaagatgaggagcaaggtgatttgtttgaagctgaaattccaggacagagtggaaggttggacaaggaaatagttgctgaatgtggtaacattggaggtggaggagagcctcctcaatctaatggataagatgttgagttgcaatgtccgagcgatcaacaaccaaccaaagcaatcactagtaaagcaatttattgctcatcaaagaattgggttggttagtcttctcgagacgagagtcaaggctcctaaactaggagtcttgtacatgagagtttttgatagatggtgctttacgtcaaatatagcttggcatccgggtgggaggatagttcttgcttggaatccccagagttataatgtcaatataattaaatgtgatagtcaatttattcatagcatggtgactacaacagatgggaggaatggattctatgtaacctatgtttatgccgtgaatgacaaagaggggaggaaaaagctgtggaaggagttacaggagctgtcaacacttgatccttggatagtgttgggggactttaatgaaattctggctagagaagaaagagtgggagaccgagtacagtatcacaaggcagcagaatttattgattttgttgagaaatcccagcttgaaaatgtgaaaatgagtggccaattctttacatggaataataaacaacctggaggagataggatctatttgaaaattgatagagtccttgctaatccaaattgcatgggcaaatattcaaatgctgaagctctattcctaaacgaaggaatctttgatcactccccgggggtgttaacttatcattctgaaatatccaatggtaaaaaaccatttaaatctgttagaatgtggagttcacactcagaatatgaagagaaagttagagaagtatgggcagaacaagtcaatgggacaaagatgtatcaagtagtcacgaagcttaaagctctgaagggtgtgttaaaggaggtcaacaagcaaggtttttctgaactttatgttgatgaagtgaaggccaaagaagcactggctgtgtgtcaaaataagctacaaatggaaccccaaaaccagctgttgcaccaggaggaattagaggctcgacaacaatatttaaaagttcacagttacttattatccatgctacaacagaaagccaaggtctcctgggtgaagaatggggatgataacacgatattccattcaagccttcgggattgaagaagacagaataaaatctagtctattgaacagcaagatgaaacctgaactgatcagcctgaacaggtaactgatgcatttctttcctattacaagaacttattgggaagctccatggacaacaagaaaaaagtcattcgtagtgttgttaatgtgggaccaaaagtcacaactcagcaagctaaaattctaatggagaagttttcgaaagaggaggttaaagctgccttatttgcaatccctagaattaaagctccaggtccagatggatactcttgtaacttttttcaagataattgggagttgattggaaatgatttatatgaaaccgtggagtcttttttgtcatcaggaagaattttgaaagagataaactccacaatacttaccctcataccaaaagttaagtgcccgaacacagtgaaagtgtaacgccctaatgctaaggcacgctacagtggtttttcaattattgtgcaatctttgctaatcaaagaaatt

SEQ ID NO: 113768 - DNA, 1641 bp, Cannabis sativa
tgagtagatctaagatcctgttaaaataatatccaacaaatattccacctggtcgctgggtgcactaggtgccctgagcgcctggtcccttaggtgctaaaagttaaaagtgttgtaattatgattctgatgcctcaaatatgttcgtgacatgtcttactcatgtccaagtacacagttagagccatttgcactaagacagacctgaaaactaaaaccctagttgggatgttaacttgggcgctgggtgaaaatcctaggcacccaaattgacttccggggtgcaaatttgtctcttttcagctttcatgccttggtcttgatttttcttatctttttgatttaaaatactgaaagatagtgagttggaaacaacttggtggatccaaacacacatatcggagtttccagagtcaacctaggcatagggttagaggcccctcgcagattgactattatgactcgagactactcaactccagaatgctttctttcttgccatgtgtcgaacattaatatccacgttagtttccaagcaaacaaaagtattcgtgcattggagttgtaatatagaattgtccaagaacttaactatcattagttcatcaccgccaaatcttataaattttgagttcttggcctctacatttacatctaaaagaatgattctcattcttctctaaattgtatttattaattgaaaatggatagcaattggaaccatcttttcaagctgtccggaaaaatgttacataattaattcaagtattattcgcacaagtgcataccagcaattatgtgtgagggattaaatctttgatttattattattatgatgatgatgttgcactaaagtcacgtccaatgggcctataggtatatgcaaagaagagaactttttggtcccatcgccatattaaaaagagatagaaatgtcgatttttgataattgggatttggaaaagattgactattattgggtgtgggaccatcatatgcccatgggtccaacccacgtaattgctttttataggtagaagaaaatactttgcctatagtttctctttgttgagttagctttctggtttgttcagtgttcaccatccctcaatatagggacagaatttcatgtatgtttatatgtatatatataaaaaaatagggttacagctttcgaaacaatcagagtgatctctctcttggccatttcaccgtctgcggcaggagattttgggctctgagacctaactgttgtctagaagtacgataaaaatctttttttagtaaggttttacaagtcactcactgtaacagctcactacgcaacaaagtattttgtcgcattgcccttattacttactctccatcattttttattttaattttagccacctttcttcgttttcattgaataattaacggagttaatatagcaatgttgattatatggaagatataagggctatttacaaaaatataatatggaaaaaaaatataagttatgatatatatggcataaaaacttaattatactagatataacattcttcaaaaaaaactttaaaatatggaaaaaaataaggaggaataccacacaaaaactttaaattgtgtttctctttttttttttttatttatttt

SEQ ID NO: 113769 - DNA, 2791 bp, Cannabis sativa
  modified_base (26)..(37): a, c, t, g, unknown or other
aggatgttaataaaacatacttggtnnnnnnnnnnnntcctggtaaataatttccaacagtcttgtctctctggtctcgtgaggtcaaacatgtctatcgggctcggtttgttgaaggtagaagactttgtcagtggggaaccatgacatgtttgtggaaggtaacaaccaaatgtgcttggcccattttatctttaataagggtctgactgatgggtcttaaatgtggatctggagtccacgtgtccaatgccgaaaacgcgaataacagtattaataatgatattaatattaataataataattattttactctttcttaatcgctaagaaatgtttaaccctagcgtattttgtcaactctgagtaccctaaaataccccagtaattctataatcaacttatctcaataatcccatcaatattactaaataaaccattgtgacatttttggcctcctatcgggtctccaaggttgccaaacctgaaatatttttatttctaaaataacctacattatattcacatattccaaataaatctccgaaatataaattactctcattcatccacttatgacaaaatttataatctatactaaattaggttagcagggtcataatcctactctttactacctaattaacccataccatataataagccctgattattacaaccaccttcctgtttcactacagtcattttaattagtggaattgccttattctaaagtactttctccttccagcctaaaacttggatatgctattcctcatataataaatatgtttgaagctgaaaatcatcacaaattagaatatgggtcgaatttgataggctacgtatccctctcataggcaatacttggataaaaaagaaatctcccatttgaaacttgatgaggcgagcatacaacttgaattcattatatagccttataagttccttggatctttctggttcatcatattcttttctcacctgcttcattccaatgaatagatgtcccatatttctctcgtacaacacttatgaaagtacctaaccaatggtacatttaattattacttttataaaaacactccgtcaagaggaaagattattttaagataatctaacctttatcaaaaatgcttgttaaccccaaaaattagtgctcttaaattttgggattattagcctaagggataaaagattcgcaaaagttggccaagctagcgtacttgcccaaggcatatttttcaaaggcaacattccaaatgtcgagatacgtctgcactatcacaaaagttaccacgtgaatcctgtgaagatgcatgtgtgcgtaaatgaaagacccgcatgcgagcccttgtgagggcttcagggcaaactaagcctgaagtgagcaaaggtagcacggaagtgtggaggctcgcatgggagccatgtgggcaaggtgggaggtcgcgtggtgagtgagtgtgggtgctcgcatgcgagcccatggggggcttgtatgcaagacgtgtgagcaaggtgggggtcgagtggtgtgtgaggatggggccttgcatgcaagccgtgtgtgcaaggtgggggtcgcatagtgtgggagcgtgggggctcgcatgcgagccgtgtgtgtgagttggggggtttatgtgtgtgtgggaaaagggtgccaagtgtgatatagcatgaatgtatcttgaagggatatgagtataagttaagatgtgaaggcatttagaaaagaatggcattagatgagaactcaagggacaaggcgtgtcagggaaagcatattaccacgccttctgaggcctctgaatgcaagggagtatgagtagcagtgacaacataccttcaaagtctaaaggcccgaccaaaggtacgctgtggccacttacctattactagaaggtggggacctcaaacctacagttggggaccacgcacctgcagctcgggatcactctgctgcaacttgcgaccacatgcttgcaactcgggatcaccctcctacggttagggaccagatgcctgggatcagagatcacttgacaccagacaaaagtacgaggtgcaagccaaactctagcacctgtagcctacaacttgaaagcaatgtgttctccccttgggatcactttatacttttggccattagagcctataaatacccctatctcagatgtgagagggggttggaaattagttggtgcaacttagatattgaataaagagagaggaatattcagacatcttttcaccttcatctttgtcttgatctttatcacgtttctgggtaacttttcatatttcaaaccactaacttagttgacaagttctcaccgccaacagtttggcgccgtttgtgggaacaacaaaatttggcaaagttgtttctctacacacaaccgtttcaaaatgtctagattctcacgtcgcctctgaaacgtcaaaatttactttgacaacaattagttggtcgccatgatgagagacccaccaccccctgtcatcggggaggaggttactaataatcatagacctcaataacttgaaggggatgagggcatccctagacctcaagcagaataagaaggacacctccgtgaggaggtcccgatcagcgaccaactcgacgtagtgacaacctcgataaccactacaagagaaggtgtgacgtagtggcagagagtcccttcaccaatcatacaagagaaggtgtatgttattgatgttgattcatttgatagtaaaaataaatggttaatcgttatgaatgataactcttggttgt

SEQ ID NO: 113770 - DNA, 2851 bp, Cannabis sativa
ttttgataattttagccgatatacttagtgatctatatatagttagcacgaacttaacataacataaatgtacgaatttttctaaagcttttgataaggaagtaattaggccagttcaactaagttttttgctgttaagactcattactaattttagaaatacatattatctcatcacatgatatgtttttttgttgattttattttattacttcaattttaaaaatttagaaaggaagacttggtaggttaacaatgtattaatagtatttattatttctcaattatctcaatacatagatggatgagatatttttatttctatattattcaattattcaaagtgttctaatatgtatgaaatattgtatcctgcgtttgataaatttctaacatgtcaataccaaaacagaaatactttattttatatgttcctacaaattaattaagaaatacaatataggctttcactccttttcattttttataattctcaaatatttatgtctgtttgttgtttgtctcatccaaattcataaaatattctattcaaacctcactcatgatttaagtagtactatattaagaaaaaattaatctctccaagtctccaagaaataacatcaaagaaacagtgtttaattaattgttctgtaaacgtgattaacgttgtgtttaattagctacattatacatagttgaaattacaaattttaattgtcatagatgacgccatcataaattggaaatcacatcaaataaataaatacaatatttatttccacaataatcatcattctcacctctaatttaatcatcaagtcaatattattaacttttgtcataaaggtatatctagttaaggcataattcatataaatacacgttacatgagttagcattaatctaggttaggtatgaatccatagtaatttcatgttttgtgattaagagattgcagtcatatatatattgtaaaactccacaaaataatgcttttttatcttctaaaaaaaattctaaaagtcataaaaaaatttaatatatagtaagcttaaattatttgaaagaccatattaacattttcatatatattttttaaaatcaaattttgtgtgaacttactacacaccattcaactttgatgagcaaccatcttgttatttattcggttaattattacataatatttctgaaaatttcctatttctctattaacaaacaaccaaatcgaattatattaattaataataataaaactaaattattgttattgtaaaattcgtacggtacaccgtagagggatggggccagcattcggctcacgccattaactagtattttgacatgaagtctaaagcaaaataggtcagaatatttttacttctcctaaaatgaatactaggttgagaggtactatagataaggaggtgtccaagatcagtggtttaattgaaaattactacttggtcaaagacatggatgccgaccacctttcctctaagcatattccctcttactgtcatcctccttttaccttgggtctatggtcaagagcccaacccattctctaactatcagagtcagctcataatatttccctcctggccactacagccaattttctcaagtacgggctttacccgttcacggagattcaaggatttgaataggcagctgagggggtcattactgagttggaggctcctattaagaggaaaaatcccaagaggaatcaggtgtcgattgaacgacctatcaagattagagatgaccctgaggaagctgtccgtcctaccatccaggcgacaagaaagtggaatgccataacaatggaagatgatggggattcttttgatgaagattcctcgtcgtttcttatttgggagggtgcacccctgaagtctagggtagttattactttacccaattttgcttattcttacttgtttagatttttaacaagtgttttcttctgtgcagccaagttggagaaaatgaaacgagcatttagaaagaggaccggtgatgcatctggccaaaagtcaactgtcaaaagatcaaagatggatgcttatcttcccacaagcattgccccaagctccaagacaccccaagtagaagttgagaggagtacgacagattttgtcatgaacgttcctgagttcattcctctagtcaagaagtctttgaaaactcaacctccagttgctccggccaaaagatctaaggggaccaacactgagtagcccgacttgccaaaactagctagatgttactcctcccaccatccagccagagagaaagaaggctaaagaaatgatcagtttctatcaggattgcctaatgcctgaggtcaattagcagcttaccggggtggaggatatgcatgtggaaatattggtcaaaataaaacttaatagatctatagatgttattatgacaaaattagttatattttttgtatctattcatgttagaaattgtcttaattaaagttggttataataaaaaataaaattcttgaaaattaagcttagtgccatacttttattattttagaaaacatagggtccatttcttcatttataacaaaaacagagagtctaattagtaacttttgtaaaacacgtagtccaaaatagtattatgtcactcctcccaccatcccgtcagagacaaataattttaaaaaattcttctaattttttcctttaatataatttgtcttgttgttcccatatttatgctcttccttgtattttcaataacgacattgtcgttattgatgataatttttttttttttaaaaaaataataatagttgtcccaacgacaggtaagtgtcgtt

SEQ ID NO: 113771 - DNA, 2879 bp, Cannabis sativa
  modified_base (1598)..(1599): a, c, t, g, unknown or other
ataataataataataataagggcacgtaatttgtggtttatttgtgtgtttcatgcatatcaattatattggtattgcaggactatttgatttttcagatgggaaatcatcaagggaaattgctaagtgtattgatttggctaaggatggaattcatgctgtggtgttagttttgtctgttaggaaccgtttcacaaaggaagaggagtctgtttttcatagtttgcaaactctttttggtaccaaaatagttgattacatgattattgtatttactggtggagatgactttgaagacgatgtgacttttgaatttgagcattacttaggccgtgaatgtcctcatcccctgaaggtacttatatatttctcaagagatatatcatgtgtttagtaatcatatattaatatttatatgatatgtataggttatggtcggaagatgtgaaaatcgagtgttgctctttgataataagactcgtgataaaataaagaaggctgaccaagttgaacagcttctgtctcttgtaaacaatgtggtggagaaaaatggtggtcgtccatatactaatgatttattctctgagctaaaggtatatatattatgaaataaaggattatttattactatttttgataaattgcacaaactaaaacaacaacaacaatggttttaggttgctcatgcaaccaattcttggttattttattgatataatttaaattatttacaggaaggggctatgaaaattcatgatcgggaagatttgctattatttgatcaagaagggcctatgaagaaaattgttgaaatggtatttttttctttctttcttcattcattgcccttttcttttatgggtgggctaagtcttatatttatattttatgtaattttttaaaatattaatatatagattgaggcgaggttaaaagagacagttcaaattcttgaaaaacaattggagaaagagaaaaaagccagacaaaaggcaggaaagagggctttgcaagaacaaaagatattagaagagagaattctcaatcttagaagggatctcgaggaagcaggcaataacaagtccaactgtgtcattctttgaagtatgaactgtgaccacctaaacacaagatcttctaccttttccattaagattctcaactctatttttttttttgcatttagatcctcaactctgttttttgtttttgcatttaatttgttatcttccaaacatattgcagtcgttatatttacatttggtaactaaaaattgttatttgatatttaaagttgctttataatattgtataattattttttatattatttattaaattaaaatagataggacacgatattaaaatgcatcaataacactatatcacgttttgtggtataacccttaactggtgtttggttgtgatggaatggtgattgtaatatgctattagtaatataatggtacactacaaaaaactgttacttttagtgacaattttttaatacaacataatttttttgtaattaaatgtgatttttagtcataataaaatgttaattaaaacatactatttagatacaagttgtcactaanntagttttagtcacaacaagtattgtgactaaaaatacatttaaccatagatcttttagtcacaatataggaataataatttgtaattactcacaattttttcacttttaaagtaagaattttttgtagcggtaattgattgctatgtctagtttgttattagaatgaatattggaatagatagtaatttgacaaaattatctttactttagtaagaaaaagtataaaatgagactaagatcattttaagtaatttgtaacgagagttcatgaggtataagagtataatcacttttcatacatgtaatattaattacaaatataggaaattgttaattaatcacttgtaatgcaccacatcagtatggttagatatgttaattcgatctaatttgtattatttttgctcatagtattctatctgtactaagtataaattttatattttgcatccaattcaatccgcatagtaattgaaattcaacttaatctaattacagattggataagctattttgaattaattattttttaatattgaattgtttaatatttattaaaagtatatatttttttcacctaagtaacattaaaacaaagaaaattattgttgttttatgtactataaaaaattaaaataaataaaacaaaaataacaaaattaaagcaagaagaaaaaaattgtatgtataaaaaaatatttaattttattttagattatattttcttataaataagaatgtaatatacatttgacctattatattttaaaatatatttgtatcatatatgtattaaatttttaaattattattttttacattaaaatattaattatatattttttaaaatatatatatatataaatatgtttggattagattggatcagttatttttacatgtcaatcaacatctaatctatacaagtgcgaattttaaattttctaatccaattcaatctacacaaatgcggatatccgcaattggattgaattggatattttatatgaatggtagattataacataaatacttaatgtttcagattttatacacttaaatacttaatgtttatttttagaggcaaaaatatctaatgttacaattctcttacactgttactactagttccgttaactcataaatatgaacatgtggagggttcagattcattccatttatttttattttattttaaaatttaatattcttcatattagaaactaaatgctacttgtttaaaaaaaaatcaattttagctcataacaattttcacatg

SEQ ID NO: 113772 - DNA, 1092 bp, Cannabis sativa
gaccttccccaggcgatgtgggattgtacaacttacctagtattttcccttgcggatcacgaaatggaactcaagcttgacctctaatggaaaattttggtaggtgttgctcttgagttgtgctatctgttataataatgtttttagaatgttttgtgtaatttggttgaaattggttgagtttggaagggtttatgaagtttaaaactcgaagtgttggtttcctagagaaaagagcagaccattttttctgatagtgttctcaaaaaatggcctaccatttttagagaaacgacctactgtttttcagagactttttcccgaagtcttgttttttatgttttctctatatttacggtacgaccacactatttatcgatagaaaaacttctatttttgagtttaagacttagaatgagttagatcatgttgtcaactaatttatcattgttgtgtatagggcccaagatcatcatctattctccacttaagtttactggcacacctgaatagagatttgaggtaagaaaaatacatttgtgccactttgcatgtcaagataagttatgattattatcgtttgtgatccgattattattgattataaagaaacagtaattagtatttgtaagagtcattactctatactgagaccgttgttaggttttttctacttatcaattacctcattaggtaacggtggtgaggtggtgacattagatgctggttaggcttattagggttgcccaattaggcaacaacgggtagggttactttatgaagtagtagatataaattgtcttatttgacagatatttgtgtaattttggattgttatacatatatgattatttgtgctgtttatttgtaaagttggcatgtgattattttttttttaattttcttgttaagtctttgtgactctgggtgctttgtggtacaggtaagggcgagggtaaatcaggacatccatgagttagaagtcttctctgacaaatgtacatatcgacctatgtaacaccctaatctatagggatgccacgtgtgtgattttataaactagtttaatactaatagaataattaattatta

SEQ ID NO: 113773 - DNA, 3236 bp, Cannabis sativa
tttttacagtttttatgattttatagaaaatacgttcttttgatgtatttttatattgtactcttgttaatttgttgttgattttttgttatttgtatgccattttttgttaatgttttgataatatttttcagttacttttacgcaatttttttgttattttcgtgttatttttataaaaagccataaaaaatattaaaaaaaattaaacataaaaatgtaaaattctttccagaaacaatattttatgtgatgattcttattttttacttattttacatcttatatattagaacacaattataaatagtatatcaaatataatacaaactaattttttatgccaaaattcaatacaaattttagatctagcattaaaggcgtcatattgggattggctagtaatatttcagaaaaaatattattaaattatattagacttgatatttaataatattaataacatatgtatattttaatatttctctatagacaaatgcatatatcttctttttttttattaatttaatattgagtcttatatatattttaatttaataattattataaaaactcacaatcacttagaaaacgttatggtaatatattattatttgtataattaaatatttttaatttataatactaatataataactactattaaatatcatcactcaagataatattaaacaccactcaaataataataataataataataataataatttatattagagtggggtgtttccttggcggtggtagcttgaatatcactaataattaaaaacaataaaagaaaagaaaaaggaatgggcatgttcttatattttattccattgtttctttgttggagacaagtctctatctttccaaattttcaaaaatacctttcattacataacataaccaaaacaatgaatgaacctttctaatttgtcagcctaattaattatctcactaatgtttattaaatatttagtagtgatagatatgagatcaatgagattcaaattaagttgaattttgttgtgacatgacatatttatatatcatagtgtttaaaagtcaaatgggtccattttttattcattaatagtaaaaatcaccaactatgttccttgtagttggagcaaaaagataatatggagaaagaaataacaagatttattagatatttttttttcttattttttggttgggaaaactaaaacaaagtagtagaagaagaaaaagtgaaagtaccaaaccaagttgataaaaattaaaaggattaattggtgaactcaaaagggtaaaatggtaataacacatgaaatgtgatgttgtctttttgtaatttgatagagacaatacatttaagtttgacagctaaatgtcgtaacccttttggtctctaaaaatgctgtattccactttgccctaagctgccacctcatcacaccaccaattacactttcaacatttttttttaatttttttttttaatatattaccatcaagtttctaaggatttccatatatattaagtaaaaaaaattgatgaaaaaataaataaaaatcatctattcataattttattaaaattaaaaatttacctcttgataaattattaaattgcttgctatcatttttgtaaattttgtaagttgcattctagatttgtaatatactctcatatttgagatttaatattacagctgatttttaataagaacaaaatataatatataataaatttattgtacataaatttatattaattataactaataaaataataataataattaaatcaaattaaatatttatttatttaaaatattaaataacatatttataatatttaaataagtattgtaacactaattaatttagttacagatattatttttaaattaaaatatttactttaaatttattagtaattttgttaacattctaactatctgtttatcttttagtactattattttactaataaaagttaatttagatccaatttaaatttatgtatgattttttagtcatgtaattaacacttaatcaatattcgatttgttaagaaagttaagattttatattgactatcagttccaagtcttctacattattagactatcaaaacaaaaattataaatttcttttttgagaaattttaacgagtgaattaaagaatataatacctgaataagtagtcataatttctcattactttggttgatatactaattgaccttcacttgtgatctgaattatgtatatatagtaaatatctagtttgataaaagcaaagtaattgtaaacgagtcttgtcatatataatcttatatcatatacaatacctttattgatatataaaattacatcaataatctaaatcaaaattgctcacattgagtaacgggtattagtaaaccgtactgataattgttgatcaaatatctcaaattttaatatgttactaactattttattcatattaatttttttacattgttacaacatcatagcctaataaatttgtcaaaatttatatataaattattaattataaataaatcaacattctaacatatttcaaatattaaggtttatgccctaaaaacaagtgaataaaagataatatattattgaatatataaaatataaatatattataattgaatatgttaattattgtaaaataattaataaatatcataaatttcctgttcatacatggaatgtatgatcttgtagaggaaaagagaattaaaatcatattatatggataaaattaattagtagtttattaaagtatgaaatctttaatatgaaattaccatgtacagtttattgagtactaaatagtagtgacacgtgagtttgattcggattatatgtagatagacatttattaaatataccgtatttaatttgattatgcataattagataaaataatttttttatgacattgtttattataattacagtattgttcttatatattttttaaataatttatcatactaaaaataaaatttttattattcaaatttactatacgtgttataaaatagctaaaatttattttttatactttatatcttttgaaattttcaaaaaatttataatataatagtataattataactaacaccatcaaaaaaaaacaaattttacaaaaaaaaaaaaaaacacaaataacacacaataatctcaagaagacaaatttctgatgtggaaga

SEQ ID NO: 113774 - DNA, 3176 bp, Cannabis sativa
  modified_base (26)..(31): a, c, t, g, unknown or other
  modified_base (60)..(65): a, c, t, g, unknown or other
  modified_base (92)..(97): a, c, t, g, unknown or other
  modified_base (124)..(129): a, c, t, g, unknown or other
  modified_base (156)..(161): a, c, t, g, unknown or other
ttattttgggcccccggaaagtgtgnnnnnnattttgggcccccggaaagtgtgggcccnnnnnnccccggaaagtgtgggccctaggcacnnnnnncggaaagtgtgggccctaggcacgggnnnnnnaagtgtgggccctaggcacgggcctannnnnnctatgcctagggccggccctgattgtatgtttagtccacttcactcttagttttaaaattttgtcttaattttgtcaacactatattttggcttataaactatttaaaagtgacattaagaaaataattactccaaaatatacttataagtaatggtgtagtacatcccttataagaatcgttcggatgcacaaaagttttgtatttttttttattcgtataatgatatatgctgtagctatttaagatttattgtaaattttgagaaaattaagaataatttatagtgtcaataaaattcaaacaattacttaccacttattaaaaaaataactacttatataataaaatatttcataactgtaaacattagaatggtacgtggcccaataaaattaattaaaataatataatttctttaaaaaaaaaatgcttggaatgatctatacatttcccttgtgttcaaaaataattttactctatatgaagataatttaaataaatttaaacgcattgaaatatattgaaccacattaaaaattaaaagtgacacttttaattaaattttaattttcttaaataaaatattcaaacaaaaattttgattataaacacataagaatcaaaatattgtataaatattaaatatctttattaaaaaaatacataaatatattcgttttaacttttgtatatatattaggttattgttacgtacatcgcacgtatatttaattatatttttaatttttttttattatgtgtattctaaaaattttataaattaaaggaaaaattacttaataatttttcaatttttttaaaaataatatttaatgttttaaaaatttaacaatattaaaattgaacatgcacaatctcaatattaaaaattacaaataaaaaacaatattacaaataatatattatatttatatttaaattaatctaaaattagtataagttcaattaacttaaaacaaataatattaatattttatatatttttaaattaattaaaaataaataatattaacatttacatatatttataaaactaactctactaacgttaaatttaacagaatattttaatattttttaaaatattctattaaactaacaaaaactgttaaataactacattttatctataaaaatactttttagatacatatatatgtagtaattgaaaagaaaataggtatatatattaatgtaatgggaatggaaattagaatactatattttaaaattaagcataactctttggctgtcttaatcataaatgtaggtaatgaaaacttattctttgacatagattaagattaaatatagtcttaaataatgaataatcactctgtcaaatttcttaattaattatacttatttattcttacttcttctatgattatagggttggacagcaataattagctatataccttttattttcttctcttcttcttcttttttaaataataataataatacaattaaaaattgaactaacaattaatatgtgtagatcgagctaggcttgcatgaggctacttttttttctctttacttttctttttttaataaaattatataaaaagtgtcaaaaatatattggtcatattcttaatacaaggaaagaaataattccaatatagtaacctcgtaattttttgtgtgatatgtatatctactgaagcaaaatataataaaatcaacatatatacacccaaaaagacaaataataaaatctaaaattaaagcattaatttggtgctaaatttaattcccatattgctgcaagaatattaattaacaaattcttacttaatttgaaaatcatatgtataaatatacatactttataattaataagtccacaacaaaactaatataggaaattcctttagtaaattattttaagggtcgttttggtaaattttttatctatttcgacattgaagaaagttttatagtttattttttttaaaaaaatcatatacgttataactatttaagaaaattttttgtaaatatttaaatttttttgaatagtttataataatgtcgaaaataagatttaaacaattacttaattattgcgtacgcgtttggtattgaaaactacgtactcgaatttttttaaaaaatttataagtggacctaaatagaataacgtatacgattacaaaaagaaattagactaagaaatctcccttttaaaatgactgtaagctcaataatatatatatatatgtataaataataaaaggtatattttaaaaggtagggaataataataatagtagtagtggtagtagtgatgatgaggatgctaataattgagtagcagttggttattcaaagataaaattatgtatagagaatttggtcagtaattgccaattgaaagcatattttacagagagcctacttatgtcgtattttgctataatatatattccaattgactttatataaatatatataaatagcatatcgattatatgtgccccacgatcatattcatatatattcattcaataattcatttgtaaacacaattaattgttttttaaaattatatactaattaattccactacgtaccttatataaatttctatttatttaattatttaatgtagtttgattaatttatttttgttgattctcttcgatgacaatatctcgtgaattatatctaatttacctattaataaaaaaattatttttctttatataaaaaaaatccactaccttaaatttctatataatatttataaatatagcaataaactattattaaaattcttttattttaagtactttagctcgttcttctagttatatttctgtttttcgcgagacttttgtctctgctgatttgaaagctatcttgatagctgatttagtttaataaaaattaattttttggctaaaaaaaagaaataattacataaggcactatttttttttgtaaaatatttacatttttacgctcaaagaatgtttt

SEQ ID NO: 113775 - DNA, 4201 bp, Cannabis sativa
  modified_base (41)..(51): a, c, t, g, unknown or other
  modified_base (3955)..(3957): a, c, t, g, unknown or other
ctttattgatgttgaataaaatggattacattgaaatggannnnnnnnnnnggcataaaacccaacagaaggaatattttgtgttgttgttcttggcgatatcatggatgacttgcgaaggtgtttagtggagtcgtgagacccttgctccgcattttaagcgcgtttctcgggaaaacaaataacgaatggttttgagaagatgtctgctttcaggttcattggggatgctgtcatgaaatgatgagtgataaatactttattcccttcctttagaagctttaaatgttaaactttcgcatccccaaccgttggatgactcaacccccaatcaatttaatctggaccgtccatttcaaaaatattccaactgttgccatccttataaattgggtttttagtactttaaatcactttctttacttcatcaacaatctttcgactagagaaaaatcccttttagacaaaccctttgctcagaaattttgtttagccttctcatacctctttgacccaatctcaacccccctttttcccaactccacagttacatttctgtgatgtctaccaccatcttgggccattctgtagtcgaagctaggaaggccactgtcgtcatgtaagcaatgaaatcccaacacaccaccatcattcccacctttatctcgcagtacaagtaagtattcctcaacttttaagctatttttccaatgcttgattgaaatatagttttcgtagttgagggaatctattacttttcatgcacaagatctgattttaggaattcgagtgatttgcatctagaattggtttgtttagttcatagatgaatatgtctagttttagggttttagagaggtattttcttttaggctcaagttgagatgcatgtttaatagttgagactccctagttctaaggggttagggtggtcatttttgagctatccgcagtcttctcgtttacttcctctttggttcattgtgtgcacttgttttacttcatttgcaaaaaagaaagttttagcctttttgttgctgttgcatgttggggttctcgattcgttaccatggcaggctactttatggtagtgatcccaatggttatgagtccaccagggacctctttaagcagtttgggagaggtttcctcaggtaccctatttgttatttggatgtagggtattgattgcttggactttccttccacttttttaggttctggtgaaagcaacaatttctaactagccttagtgaatcatgaagtgattctagaggggtcgcccattgaagtaacccctgttgaggggaacctcgaagatcccatttcagatgagggaccttacgaatccattcgatctaagtgacattgtaaggggaaagcaaaagctcgcgcagtgtctttagctcccttagttcttaataattctatttgggagatagatcaaaggccaaatcagttacggaactacgatcttctggaagcatactcgactgatggaggagtgcaaaacatttcaggacttatatggcaccaaatgtccattcttaaggaatcagcatcccaaagcgtggatggcttgggagagtaaccaagaaagatgcattcctcagatctgtattccatcttgtgatgagaatagggcctcaaatgagagaaacaaacataaccaaaaggcttttgaatcttgtaattaggttgttgctaaaacgagcattcgtaaggactaacattgccagtaactggagttgccattctgtttatagagtagacatcacattgaaatgcatgccaccaatagctcatgtcaagacctaaatgagcaagcaatgttaatccaatttctgtaacatgtctttgtttcatttccactctaccattttgctcatgagtgtgtgggtaagatagctagaatttgatgccttgattagtcagaaacttctcaaagggtcgatattcacctcaactaggcttttaaaccttatgaatacttcaaaagcttgagattttggtgttagaggaaaaatccaagagaatcagttgtaatcatcaaggaataaaatgtaatatttatagttgcctttggacacaacatgagatcagtatgaacaagctatagcggttgagaggctctactagaggataaggaaaagggaagtttgtggcttttcctaattgacaggaattacaaaactttagattcttaagggactgtgctatatttgatgtggacaatattttacttaatgttacaggggctggatctcctaatttacagtgccacaggtttatatcattgtgcaaagtagtgttatagaaattagaagataaagtattaatatgagatgaaaaattatctttattgatagagaaatgattacaagttgaaactgcagtagcaattgatttacaacatgaagtaaatgactttgttttttttctttttttttttttttttttttataaattctattacaggaaactataacaaaagtggcaagattacacttgagagagtgactagacaatttgaagtggtcatcccctaacaggtacatgtcattcttgagtatccttctgagtaggacaacacccgattgtttgtccttgacaaaacaacaaaatttatgaaactcaagaaaaatatcattatctctagttaatttggaaacactaaccagatttttggtaatagatggaacatgtaaaacagattgaggttgtaaagggtttgaagttaaagaaagaagagtagttttaccaatgtgagagataagtaatttcttaccatctcctacaacaacagattcttgtccagtatagggagtggctgaatcaagactttccatagccaattcaacatgattagttgctccattgtccacataccagccaacatcatcaccaaagtttggaagagtttgagtgacatgtgcttgaggatcaaagccaccactttgttctatcagattgacttgtggttgggatgaggtttgctttggtgtcacctaataattacaaattggtgcagagtgcccatatttcatgcacaattgacacaaaggtctgttggttgaaggaggccgactatagtttcgaagaggtaatcttgatggattctcagtatcattagccctgccagagggaaaaggatgacgataaggtccatttcttgatccaaaggtgagattggcagccatcttaatggaaagatccatcatggatgtatgtcgttcaagttgagtctcatgagacatgagaagagcttaaacttcttcaagtgtgagagcatcacttcaagaggttataccaaaaacaatagggtcaaactccgatcctaggccattaagcaaatgaagaattagatcgagatcagtaacggagtgaccagcaatagctaaagaatcacaaatcaacttgatcttgttaacatagttagagatgctaaggttaccttcatgaatgttggataattggcctttgagttggagtaacctagctttggactaattggaaaacttttgctcgagggtcgtccaaacatcatgggaggagttgtagttcgagactgttccaagaatcgcttcagtcatcaaggatcgaagccaagaaagtagaaactgatctttcttttgccatcgaagatacatagtattggtatcaccattgacgagtttctatggaggactgatattgctgaacaatatctcatcgaggtcatatccaatgactgtggaaatgacttgggatttccaagcaaaaaaattagctcgatcgaacttgattgtaagagaagaaatcaaggaattcgagaaaagatttcattgaggaggagcagcagggggtgccgcctgaggtcgaggatcagtgacaccaactagagacgaatagtcattggaggaagccacggacgtgagccagaggtgcttagatactaggggtgttcgcggtgcgnnnggtgcggtttttgactatttttttcaaaccaacccgcacatgcagttttttcaattttccaaactgcacccgcaccatgaaactaaaaaaccgcaaaacccgcaccgtaaaaaatagtgtggtgcagtttatgcggtttagactatgactaaataattaaaatatcacaaatacaacaaaacttgagcaacacttgtcaaaaatacaataaggtttgaaaataaatatgaaaaaaaagtttcaa

SEQ ID NO: 113776 - DNA, 2361 bp, Cannabis sativa
  modified_base (92)..(100): a, c, t, g, unknown or other
caatcaatgtaaggtttcttaaacacttatgtgtttatttcattattttagaaattcatattaggatgctaatgaaacatacttgttagtannnnnnnnncctggtaaaataattctaacacttagatactttcttgggcttgagattgcaaggtctagcaaaggtatttttatttcacaaagaccttatgctttgcaattattggaagatttgggatatttgggtagcaagtctattactacccctatggagatcaacttgaagttgagtcaagacagtgatgacaagcttgccgatcctactctttacagaaaaatcattggaaagttgcaatatttgaccataacaaggcctgacttagcttattctgttaataagtttagtaagtttcttgcttctcctaaagccactcacccaaatgcagcacaaagagttctccaatacttgaagggaacacctggacaaggattattttaccctattaagtctgatatcagacttgaggcctatactgatgccgactggccatcttgcattgacacaagaaggtctactactgggttttgtgtttctcttggcgattctctcgtgtcttggaagagcaaaaagcaacagagtatagggtcgtggccaatactacttgtgagttagtttggttgctttctttactggaagaattggggattgagcatcatggacctgctattttacactgtgacaataaagcagcctaacaaatagcagttaatcctgtcttccatgagcgaaccaaatatattgaaattgattgtcatattgttagacaagaggtacaagaggggattatcaagacatctcacacctcaagccaggcgcagattgcagatatttgtactaaggcattgtcgccatctcagtttcaagctctcaaggataaaatggggttgtaggacatatacactccaccttaaggggaagtattagattgtaaggtgttgtgtgtatatgagttagttagagtttgttgtactgagttagttaagtgtgagtgtttctgtttactgagttgattagtgtattaaccgattctgttttgctctgttttctgtcttgtgtatatatacacactcttgtacctgtgttccgagctaatgaaaattcacattttctttctcttcttgttactaaaacgttcttttctcactaatttttttttaaaatatatatatataaatgagtttgacaaataaaacatggacacatagtatttttttttaacaactaatgaatttgttgaatgggcacaacaaaattttagatattgaagttttggtattagtgctacaagtttcaaaatttagtatttattagcaacaaaacaacaaaataaatatttatacgaaaaaatttatatgttgaatacaatttttataatcatgatccaaaatattttaaacactcatattacttttatctttttgaagcagaaagatttctaataaaagtgtcattttacacataattatatgactgcctaaaaacaatacagaattgattggacgtaattggtagtttaataattgtattacagagagattagtgagattggagtctgataacatattattaattaatttttgtgatgataaagaaaaatcaatgatttggaaatgaaaaagcagctggggcaatgtcaatgtgtggagtgaaatagagacaaaaatggggtgttttagtagatatgggcggtcgatgatacgtgaaaaagccaaacaaagagcacaatccaacactttgagtggtcggctagccttgaagcccggaaggaacacacatcatcactctcacgtataaaccttatctccaacacaacataacacactaagtctactgctaacccttgcttggccttagctccatcaatatcatttcctacctacctatatacatatatatatatttaaactcaattactcaatcatcatcttttaggaatcaaattccacatcatactaaatcacttgtctccccactttcccctactatgtccgagaaattggaatccccccatctaatctactcaacccaattcttaatttgttctctcatttttacaatttatttttacagatactcatactaccattatatttactattttttttcattccaaggttgggacgatagctttataaaatatagtgtgcagtgcagctacaatataccataccgtatcttcggtgtgtgtggtgtaactgcactaccactttttacttttatctaatctaaagctaaacatatgcgaaatttacaaaaatactaaaatttgagttaatttttacaaaaataatgtcacacggaaaagttttcaaaaatactgt

SEQ ID NO: 113777 - DNA, 5455 bp, Cannabis sativa
  modified_base (164)..(177): a, c, t, g, unknown or other
tatatcgtttatcgcttataaaatggactcattgtcgttggttaaaagcgaagtcaacacatagcaagtcaagtactcaataatagtgagtaagagagtcgtaaccaaacccaaaggagagaaagagatctaggttcacatcttgataatgctctgctatagannnnnnnnnnnnnntagagatcttgaacagaaggaggcactaaattctgttgtaaccaatgcaaggttttctaatcccttgtgtgtttatttcattgttttagagaatttatatttaggatatttaggatgttaattcatgttaattcaacataattcaacatagtaacatagttgtcatagttgttagtagttgttagtaaatctagatcttggtaaaatattcccaacacgtgcctcattcacttttttgccagacggttattaagacctctacttttaaaggtgaaatcattaaacaacatgtgccctctacttttagaagctaaacctttgggaaacaagtgtccatggcgtacaagtgtccctaattgtccacctgcatcttgcataagcataattgtttctagaggtcccaatggtcagctctcttttgcatgtaatttaccccattagtgggctttttgccaaaacccaaggcatttcatgggcatgtccatacccgccacatcaaacacgccctttgaggctcaaagaaaaatcttcatctcattttatttttgcattttattatttctttagcttctaaatatttagtttccgaaaatttttgtaaacaagtttgatttcattgagttccaaagtcaaatgtcttgagtcatgattttaagtttacctctaagttttcagaaatgaatgggtatcaaacacaggtttaatatagttttttgttaactgacgaatggacaatttgagaggattactcaaataacgaaaaaacatgttgtggggatgtgtgatagaagatgaactgttatgaaataaatttattcctttgactgagttttcatttaatagtagtctgctatttgcattattcaaaactatgataggtggcatttaatgaggaagattaatctaatacttccgtaatccaagctctttgacacaacctaatcatggagaagtctccatgaatcaagaataacttagttttgaagagtacacagaagactacatggtcctaacttggcatcccgaatatagaaagcgaatgacttctcctggacccagaagagcctagttaaggaagcttttccaaaagatactcgcatgggtatcaaaaggtctaatgcagatatcaaccactttggagcattgtagatgtcgacttttctcacatgccaaatcaccaactgcctttttacacagatgaacctgcatgacttgttgagtcttctccacgaggaccattgttcaatttagactgccagctcttcttttgagagttcttcggacaacccctcaagtgattttgaagttagtagtggttctccaaaatcatagactcaacaccaccattattttgagcaaatagatggtgagttttatgatcaatccatatgggaactaaaccggaggtggaaacagttccttcccaagtcttggacttatattttccaagagggcgtgtttgacacatttcacactagacgggaaattcctgcaactagagatctttgtgcaactgaggttgtagttacctttgtcaaatattctgagccatacttaattgtggctagaatgaagcaggcgtgtcgtagagcacctctaaaggaccctcatattgctgagttgatcgcaagaggaagggtttgagatattgaggaggctgaacagcccgaggctggccagtctgaggagccttttgtagggcgacctgaagtcagccaggatgaggaacccttggttggtcaaaatgataagttaggggctgagcaggctaaacctgcagctaggccaaggactgctagggcgcaatataagccttgtgtcataatcttgggtaaaccccttggtactgataataagactggacattcattaaatagaaagggtcaaccgtcatagcttgaggttgaccacgttgaggatgaggctcctgagccttggatccttgagtacgaggatgaggagcattgattgtctcctccattttctctgtctgttggcaagcttgaagagatcaaagcaaggggactcgttgggagggtagagtgtggtaggcctaatagggcttagctggcacaacgtccaccatccatcatgttggcatggtcaggtttccttatcgagaaagaggtgttcttgcctttgcatccctacttcaggggtatagctaacctctttaagttgtgctcaatttagatcactctaaaaggcatctagtacctttcaacactcttcgttttgtatgcggagttaggctggccacaaccttcaccttgcgaggtgagttacaattttgagctaaaattcacccttaagcagggcaggtcgggatacttttactttagctagctgggctattagtggcttggacgtaccaatgacaaggccatgtcaaaggttggaaagaacacctggagccacttcattgcttcggatgtcaaggacgtccaccattactttcaaagggtctcaacttacctttgtctacttcctatcgccacggtgagggatagagcttatcatattttgtttctccctactaaaaagcgcaacatcttcaagttagcctgcgaggagattttcaaaaaatacagcatgtatccttctaaacaggatgctgagagtgttggaaaccctcctaaatgctcttgctgtaaaggaggttagcaaacagaaaaggtctaggcctggatgggaaaaggatgagtctaatgacgacatcccaatgccaaaattgctcgagatgtagctagaagggaacaagtccttcaaaattgcgtgatacggggaggcacagttagcgataccatcgtctagttaaacctaaaacacaggagtatgctagacctatctaggcaacacctgcgtctaaagacaaaggcaatgatgagtggtttttggaaaacactcctgacggtagtagtttttttacttttacttgcatttagtacttataacttgtattctaactttgttattttctcttttacagatatgggatctaggatgagagacatgctgaagaggtcttcagtcagtccttattcaagtcactcccaagccaaggtggccagaataggtgggtcttctaatgtgacacaatccaacctatctcctcctccttcaggtcttccactggccaaccagcctgtggttttggatcttcaattgaaaactactcctcctcctcctcagggatcgttaggcaaggctatcaagaagcatggccaggcaacctacttgagcaaaggagagaagaccaaggaagtcactcaaaactacctaggtcagtgtctgccaagtgtggatgactagctttagaagctagatgtcgaaacgttagattacttgacgacaaacacccttagagatgttacctatgtatgttgttttagtacttgtctcacttttacccttcatacaacttttctaactttgtttcctcttaattttgggccatgttacagagtccataaagcctactttggaggccccatccatcccagatgatactattgctcagagctagtttgaactcgcctactcctcccattattcatgaggatatatgaagactcatgtttatctcatgctttttttgcgcatttgtttttcttctagtatcgcctttaggccctttactttcaaatagatgatatttttattcttagatggccttagggccctttacttttaaacaatgttcgtgtatggcctgagggccttttacttttgaatagatgactggctaggcagtctttaatcctagctttaacttcttttgttagacatgtagctgaccagacttatgtattttatgtctaatttgaagtatgccatttgcactttcatagctttcaatatcttgcttaacaaagctttaaatttttctttagcagttgcaattcaccaaatactatagacctttgcttgtgtattttcttgaagggacctatttgtatgcatgttgaacgaaaaataaagattaactttaaaaagttatcttattagcaagttgtttcacacaattttgaactaaaaaacgttattattcattaattggtctctcatatgtgttgttgtcgtgcaacgtacatttttttattctaaaagcttaaaaatctgaagtttggttttaaaactggtttcttggctacccctgcatggcatactaggtcggggctaccattgaagagtggtggaaactcagctttttttttatactaattcccgtacggtgagctgtacagggaccactactgaagagcagtgtttttacaagttggtcaatggtagtactttctgagatgttctccattctagtacctttctaggagaactaattccatgttctcattgtacctgccaagcttgtacgcaccattacatgtcatctctataacatggtaccgacctttccaattttgccgaaacactcttatcacaggatcattggtatttaggaatactcttcgaaccactaagtatcctacgaagaatttcttttccttgacttgtttatttaagtaccttgcaattttttgttggttggtctcttctttgttcaattttataaagggattttcccagcagggtatggtttacttcttggtcataggttatcctcctatgggatggtggttccaattcaacgggtagtataacttcacagccataggctaatgcaaagggtatttgcctggtgaccgtcttctcagtggtcctatgtgaccaaagttcctctaggagtaagtgaggccaattgccttttagtgtccttgagggtcttatttatagcttctacttgcccatttgtctgagggtgcgcaactacgaagaagcttttaataacattgtgtctgttgcagaagtcaatgatgttgttgacaataaagttgaggactttcttggaagttattgtcgctagtggttcagcttctatccacttagttgaaatagtcaattgcgactatggcatattgtactcctccttttcctttagggacttgatcgattaggtccgtccaccacacatcaaagggccaaggagactgcattagtgtgagctcatttggtggagctctcaggatctatgagaatctttggcacttgtcacattttttgacatagtccattgaatcctcgatcacagtaggctaaaaatacccttacatgagtatcttcttagagaggctttgtgtaacgccctaaataatcaggcacgctacccaaaatacttatgaaactctaatcccctaatcgggattactaatcaaaatag

SEQ ID NO: 113778 - DNA, 2727 bp, Cannabis sativa
tattattagtatgtttattataattgtaaacataaaatagacatagccaatttatactatactataataaatatattttcttatattatttctatgtattgattattttctaatgagttattgaatgaattttttattgaaatacaattcttacatcaaaaaataaataaacaaaacataactttataaattccaaatattatttaattagaataaataaacatgacacaataaataaagaaaaagataaagataaacaattttatatatattatttattttataaaaaaattactaaaaaataaacatgacacacataaagtgatacaataaacttatgtgaatattattattttatttattaaattagtatgtttaattaatagaaaataaaataaacacatatatagatacaatagtataaatacatttatattcaaattatatatttatgttaagtacatttatgtttaaatttaacaagaatgatgaaataaaaaaaaatataaaatagtcaataattattgggaaatttttatttatatataagtaaatgtacaatattacaaaaaaagtgtaaaaaaatataattacataattctatacaattttaacttgttgattactttcaattgattttctaaaaaaaaaaacgcataaaaataaatatgtaaatattaaaattaatatttatagtttaatatattactaaaataatacgtttactaaaatttaatatgaaattaaaaaaagaatatacaaacacatttataaattttatttatattttataaacaatgcatatgtttattaaacatttgattagtattattaatatttataatattacgttattaatctagtatgtttattatgataataaatataatttagggcacaaaatccaacaaattaatagtggaatttttggatttgggggagattggttgatttagggtatgatttttgagtgaaaatcgagattaatgagagaaaaggtgtttgggagtgatgatgttggatggaatgatgaaaacatgaagaaaattaaggttttgggaagaaatttggtattttcgggtgtagtagggtaagtaattagggttgtagtgaagaattagggatttgttatgttttggccgaagtgggtcttatataggacactcgggatccttgtcgcgatcagataaatcatggtcgtgaccactgaaatgagggaatttcatcccttcttgccgacctctctcgtcacgaccataaagcttcctagtcacgatgataattggtcataatgaggatatgatctggtcgcgaccactgtagtataggccacaattttttaagacttttcacactttgcgcggttctaaaattatatgaaaaatacttattcaaatttaaataacaaaataaaatactaaaagtaaataaaaccgcaaatgtcttgaactgaattaaaataactgtaaaaaactctgggtgcctcccaagagcgttgtcgttattgtcatatagccagacgctaagttcctcttcaaagaggcgccaagaggatggtagacttggcttggtcaatctgacctcccaagtagagctttgaccgatgactagtgactttgaaagtctctgattttttacctttgatttccactgctccatatgggaatactttaactactataaaaggaccagaccaccttgatttttacttgcctaaaaataatttcaaccctgagttaaagagaaatacttgttgtccgggttgaaattccttcctaacaaggtccttgtcatggcacttcttggtcctttgtttgtagatcctagtattttcatatgctttgtttctaaatttccatctcattgagttgcaaaagccttttctctcctgcagcggccaagtccatgttcaatgtcttcattgcctaataagcttaatgctctaatttcatcggcaaatgacatgcctttctgaagaccaacctatatggcgacatgcctataggagtcttgaaagctgtcctatatgcccataaatcatcatttagttttttggaccaatttttccttgagcgttgaattgttttctcaagaatcatcgtcacttcccgattagaaatttttgcttgcccattactttgtggatgataaggcaaagcagttctatgcctaaccccatactgtgccagcaaggcttcgaactatttgttgtagaaatgactcccttcatcactaataataactcgtggagtttcgaaccaagtgatggtattcttttgtaaaaaattaagaacagtcataccatcattcgaaggagttgtcactgcttccacccattttaaaacatagtccacaacgagcaagatgtaaagatgatggaaacaaccccagcataaaatttattccccgcacatcaaacagttccacttctacaataccagtcaaaggcatcttatttattcttgaaatgttaccaattctttgacaatgatcacatgccttgacaaattcataagcatctttgaagagagttggccaaaagaaaccattttgtaaaaccttggcaacagttcgattccactaaaatgacccccacactgtagactatgacaatgagtaaggatagaatccatctcctcctcaggcacacaccttctgattattggcgcaatgcttgtaaatgataggctcttcccaataataatgtttcacctcagaaaagaactt

SEQ ID NO: 113779 - DNA, 4948 bp, Cannabis sativa
  modified_base (2362)..(2374): a, c, t, g, unknown or other
tccgcctttcgggtcttaaccatgcatacacttctttccaaatcaaactcttttagaaatcccacctttactagtctttgttcatcaaattcatttcatactcgtctctggaattcaactccctcgacttcaatctcttccaacacaaacatttcacatgggtctcctcaggacctttccaattcgacaagttcaagtgggtgttctggaattcgacattttagtcataattcaagcttttcagtcttccaaaatggttttaagcggattttctcatctgggcattgcctcaactctgttattttgaggaattttgatggcgagagaagtggaactctcaaaaatcagatttttgggactcaatccaggagtgtgtgtaccgaacctgacagggaatcgattgagtacgacgtcgttattgttggggcaggacctgcaggtttgtctgcggctatacggttgaagcaattgtgtcgtgaaaaagatgtcgatttgtctgtctgcgttgtcgagaaaggagctgaagttggtatgtttctatattacaatgttggatttaaacttctctaatttgaataatgattaggtgattttaatttttatcaaacagattttactacttttgactatattgaaagtttaaaccatgatgctataatcctaatggcattgattagagaatgttgataaatttccggttgtgcatctttctagaatttcatgtcatatgaaattaatttccataaatgattaacgtattctcaagaacattatttgtctctttcatctaggaatgctgaaaagcttagggggaagaatagaataaaaggttgctgcttcatggcataaaggctcaactctttcataattgttccatctactgttttaatttattcttttgtttgtttattgattctatctgttgtggttttacgaagtaccacattgcaaatattaggtgagttatctcttatgattgtagctcagtactgctttatgattctcattaggtgcacatatcatttctgggaatgtttttgaacctcgggcattagatgaacttcttcctcagtggaaacaggaagaggtaattgttagcccttcttggttttcttatttttttaaccgagttctctagtcttgtaatgtaatatattaatgttatactgtgaacctttctggaagtgatcctctgttaaagtaagagtacccgaatgtatctcgacattagaaagggaacaaaagtttacttcagcttgtgaatagattagtaatatggataaggaccacgctttcacatttaaatgaaatatttcatccactgtgacactcactgtagtttaataattagatctgttttctgctgatgggatgataagatattttcttcaccaaaatgtgtttgcagtcaccgatctctgtccctgtttcatctgacaaattctggtttcttacaaagaatcgcgcactttcttttccctgtccttttgataataaaggaaattatgtaataaggtattcaagtttttcttttcctattgctttgtctattcctcctatcacaagattcgcaacatgcgtcaaatttattttaaattgttcaattaaatacttgcttacccctctatatttttcttagccattgagtccggaggatctattggagcgtgggttaccaaattttatttagtttgattttttacctatatatgcttctaggtgtttcttacctaagggtattaagttatgttacttagccgttagtatcatgtcaatctgcagttagatgttttgactatctatttatctctcatgtcgggcaccatagttcttatgccggtgttcctttggctttgatcggtacacagtagtttgacatagatagaacctctaccccaattacaaatatgaaacaaagaaattgttaggccatgttcacaacatgaagcttttggactcttgtcaattattctatagctaaaataacatgcaatcaaaatgctaaattatgcgatgctagtattgctagtgtcattgaactaaattatgattgaatattttgatgtagtttaagtcaattagttcgttggatgggagccaaggctgaagaattaggagtagaaatatacccaggttttgctgctagtgaggtactccttttgctactctcttattagttgtttaatatactgctgattatttgtatttatgagttatgaaattagcagatattgtatgatgcgaatgattttgttgttgggattggcactaatgatatgggaattgcaaaagatggttcaaagaaggaaaattttcagcgtggtgttgaactgaaaggcaaactctctctctctctctctcnnnnnnnnnnnnnctctctctctctctctcatgtacaactgccaattacttactattatgtagatttctaaggtgtttactttgttacatgatgttactctgccatttcttaatcttcacaagctactgtttggtaaaactttgaagccccactgtcccattgtattgctgtcatttttgtttttaaatcgaagcttactattgcattgctttctgttgtgaaatattttgggtatacttttagaagcttactattaatgcagcttcctaatggaacttctgttgtttacattactgagacaatacttatgatagtaaagaaaaattaatcttcctagtgccttgcaaagctgtgagtagatgtcattagtataaacacgcttgtttacatgactgtctgtacactttatgaaaatgtcatcatctttatcaagtacttttgcccatgggctattggtaggtgtaaccttctgattacctggtacagtttttggtattatctagagtctagacaaattgatgaacatgtgtgaccaatgcaggacggataacgcttctatctgagggttgtcgagggtcattatcggaggttggttgggaaagaaaaggctgcatagcttcttaaagttccgacttccaatctttttcaatcacctattataatatcatactttctctttatcagaaaattattaaaaagtacaacttgagagagaaggagcagtctcaacatcagacttatgctttgggaattaaagaggtgaactactatcgatatttgttaacttgaattacagagaaatccaacaaaaattaaataaatagaaaatagtttcaagtgtcagcattaaatacattatgtcctcacttactctatattaatggtatgtatgctgaggtagaaccggaactagcttgacacataacctttccaactgagaacagtcaaataaatatgaaaaaatctttaaaactccttaaagttgaagcccagagaaaggatataaatttcatgctttttaaccacactccattttctttgatttccaaccaaattacattaagtgctgctattgtatacgtagaattgtgtctaaaaccattgaaatatatagctattgataccgtaaggtttatacattttttttcctttcataaactgtgctacttttccctgtcaggtctgggaaattgacgagggcaaacataaacctggttttgtgcttcatacaatgggttggcctttggatcgaaagacatatggagggtcgtttatgtaccacatgaatgatagacaggttagaaagtttttatttttttgctttgtctaattcattcttgactattcccaaaaaaataaaaataaagtaaacatcatcgactttataggaataaaagaatagaacatttatttctactatattttatgttttttgtccgtgccacaagtctgactgtttttctttatgtgtgtgttttcttttttgatgtaaactcatgaacaagtcttttttatttatctttcaggtttctattggtctagtagttgctttgaattatcacaacccatttttgaacccttatgaggagttccaggtaatctagattcctatattcatgaagtaaatgaggtgattttttacttactattgctaatattatacgtctcatgggtcttttacataattttatgagaaattattgggaaatgaaaggctaatttttaaattttgcctggaagaagttattggtgaatttcaaatattaattttggactaccacataagttattttcattgtttatttccgggccacagaaacttaagcatcatcctgcaatcaaaccaatgttggaaggtgggacagttctccaatatggagctcgcactttgaatgaaggtggttttcaggtatgttatctttatgcagaactttttaatttagatgcacaacaaggatttaccaccctagatttttctgcaagtggctgcatagtgtggtttacatagcatgcagattttaaacggaatgtaagattatgtcgtagtaactagtaagtagttttaaatggtagaagttcaaaggatataagaatatcattactaattgcctgaagtcagtcatgataacttatggcaatacagctacatgttgcttttttatctctctcttccttcttttttcctttttccgaatatgtactacataatcttttctggctgttttttctgtacaaatacaaatatgatgctagttaaatttcagtctatcccatatccagttttccctggaggagcaattattggatgttcagctggcttcttaaatgttcctaaaattaagggaacacatacagcaatgaaatcaggtaccatcacctaatgcgaaattcttaaggacttaatatatgtgtcaactggtttgaatcttttaagtggctgtaagttctttgtcttgcccatttggatatgatggcctgttgaatattttaagaaagatgctcgtaatctactgtcatagctcacttaggtggcgtttggttgggaggaatagaaacataggaatgggaatgggaataagaatggaa

SEQ ID NO: 113780 - DNA, 2979 bp, Cannabis sativa
aaaaaaaaggtatagtttttttagggtttaaattattggtttagaaatcaaattttttgattttctaagtatagaaaatcaaatttcccaacaataataataaataagaaagcaaagatcgatttgaataaattaaccttaccaaaccactgaaatagattttgggtgtcttttctttccttctttcatttggtagattataattagatatttgttatgtttacattggcttggttgaaatatgctataacccaaccaaactgaaacgaagtattgccatagttcctataggatatggtgatactgtcctgcaacttctagcccttgcattaagtcaagaatgcttgtaagttgtacccaaaaatgacattttttggtttggttttatgttaaaccaatcttattttggaatctatttttttcgtgattcagacttcattatcatgtcctacagtggcattgcatatcaattttgttttttcaacttattagttctttgctgtcttcaactaattgtttgtatatcctgcccttttcattcaatagtcacggactattcgagattttgatgaccacgctacccgccttgttggaaaatttgaggtccgtatggcttgaaatttcattattttgtccatataaatatatgtatatatgtaaatcggtaaatgtatatcaattaccaaattatttggttttctcagactgtagatacatactaccggcgctgtagcagtgctggttatgtgggcaatgtttcaatcccacttctctgtgtcagtgctttggatgatcctgtctgtaccagggaggccattccatgggatgaatgcaggttaaactgctcttagtatgtgaagatacacctgctttattgatttgacaacatgtattgatatctctgtcttttataggacaaataaaaatgtggtattggctacaacaaagcatggaggacatcttgcattttttgaagggataactgcaactcgcttgtggtacttcatattttcatgtttcatatttgggcctaactggaattaaggttgttgagttgggagaataatttttcttcactttggttacaggatatgctagagttcatggaaatgatccaactttgtgagtcttttgctaggcattaattagtatgggggattacttgcgactttagtcagctagcctagcaacctagataggattatgaacttcacatcattttttatccactaggtccaattttactaatggactgggtgcgacgaaacatttggttcagctgtcctttactttcaattttggtgtgcttagatatggaaggaattttctaaatgctatcaaggtttacaagtggatgtcaacccacgtgcatttttaggcagtattttgccttcaaaattacctgactctgaattattcattctaatgtggtttgctatattcctttactttttgcaggtgggtaagggcaactggtgaatttttaagggttctacattctagccaatatatgcatgtacaaaacaaggtgcagttaaatcagtctacattgctgataagcttgtattactgttactatggattcttatcttcctttgtaatagtgctatcattaatcagagacagcaccaatgccgactcttagatgcaactaaatatgcaaactaacacttctctttcccgtgtatatttagatcatgaatagtggccccaagtctccattggactctacaattgatcaggggccctttgtaagtgttgtggaggatggtatggtggctgcagtgggaaatgaacaaacacgcgataatttggtggaagaattttcaaaaactcagaagagtcattgtgaaaatactgacactgtttctgttgcagaccaagatgaaccgggctcccaaccagagtctggttttgtgtcagtcataaaagagatctccgggcaagctactagcatccaggatgcaaagccacctgatacaactccaataaagagatgcttggatttgttgcgtaggcagaacaggttctcaatatggctgcttgcttatattgctatagttacgagctggccattgttaggttctgccgtgcgagtactgtccaggaagaagctcagaaatgtgttacctgcagcgttgttcagaaaataattccatgctcttaaaatccttgttgccgtgctctccttataactaatcattcattctcattcagcaatatcgattactgtatttaagtaatatacttgttcaaataagtcctattcatttattatcttttctttccttaaaattccaatgctagacaagaatatagtagtacaagtgtacacaataatcgtcacattcccaagttactaggaagccctatcatgtccatgtaccaattgatatcatatgattctataatctataaatattatatggtgaatcctttcaattactggatacttgatgtaatgcaaataattatttagaaaaagaatgttggcagatgtagccaaatattatacatatattcttgttttgatctccagtcattttgcccagactttcaaatagcttgtcatattctttctttaaatttgttttatcttttcttttttcttaattaggaaacaagccgctcttcgcggtggttgtttaaatttgctattcttaatcttaataaaaaaaagttcttaaaaaaaatagttgcaggtgtcaatctcagtcgacttagtagtttaatagtactctctttaatatctttcatcattgaggataccaaagttattcaattcgatagaatagggtgcgaaaaaattgttcaaaaaaatgataggtggaatgaataaccttttcttatttatacatatatagtttatgtatactaggggcccgtttggtatgcaggattggactggattggactgaaaaggattggactggactggacaagattagattatgttgaaagtaatcctgtatttggttt

SEQ ID NO: 113781 - DNA, 729 bp, Cannabis sativa
taagtcaagtacctcttaagtatataatagtactgaagacaatagtcatttgagaacaaatagcacaattttactacgtaaaaattttctccagacataaacaagagcttatatttaaacaacatacctgattagaaatttctcattttgtagtagtagtaaatcatcccttatcactcagaatgctcttttttacaagagactttaaagcactcatcttcctaggatcactaagagatgataaggattttgactacatcaaggatgtaaagtttttgaataactcttccatcaaatgttcattctcttccttattttttatttttgtacctataaaaaaaataatgaaagaaacagagcaaaacaaaaacttttaaaggtcgaaagcaaacatatttaacattacatcaagaattcacagcttttgaagaaacaaatatcccccattaaatatttgctctttgacataatctcctccatcgcttccttcttggttttgtgctcctatggtaagaaagccataaacatgtgaaaacatcatacacatatatccttatggatataaacacacccattattgggaaaaaaatgaatcaaaatcaaaaaagaataaccaaaatagcatataataacacttatcatcgctatggagtgtacacaaaaatatgttggacaccacaacacgtgaaaatgtaattactttattattgtaaaagcaattacaccaag

SEQ ID NO: 113782 - DNA, 1097 bp, Cannabis sativa
ttacggttttctataaaaataacacgaaaacaataagaaaactatgtaaaagtaacatcaaaataacaataaaaaatcaacaacaaattaataagtgtacaacatcaaatgaccgtattttttgtaaaaaaaattataaaaatattcaaaattctatgaaaccgtatttttataattttttttttattgtttgtgtgtttgtgaaataatcccttttaatgaaaaaatgaccctaaatttaatgctctcaccaaagattttttctatatatatattatatagatcaaatatgtgatattaatcaacgtatatgtgtaatataagtatatacacgtaaatacaataaattgagttaggatttagattttttacgtgaaatgtacaatgatcgggttagggaccaattagacaacaccaattaccaaccttaaatatataatatttgttagattatgaattagagaaatgctaaaagggcaccagtggtgcttagtaccctcctatatgtattggttcaattaagtatcgagtctcatataatttattataatagtttttaggaagtatcactagccaatcgcaatgtcacatgtcgagaaggtgctagacaccactggtgcctaatagcaatgctctatgaattatgacagctgaccccaaattagtgtaaaatgaagtttcacaataatggtttctgtcgatctatagcttctaacaactaatttttgtaatgtgagcccaaaaaaaagtaaataaatatggagaaaaagaaaaacaccaaaattttccaaatctgcactgaactatttatttttgatgggacaattttggaagtagaaaaatattagtgacaagtgataaagatttacaaataatggaccacaggctttgtctgcccattaaatgttatttttgggttgtaccaatattggcccacaattgagtcccccaatgctttgggcctataaatcactttcttttcaatagtggcaaccttaaaatattacactctatactctttttatattgtccttttttatttttatcctcttttttaaagtctatcatttttacctctttttttaaacattgtacca

SEQ ID NO: 113783 - DNA, 864 bp, Cannabis sativa
tttttttttttttttgagtacaataatgaaaagaaattggagtaggggtaaatcaccaccaaacgaaataaaaaatctagaggaaaacttatgcaaattgcatagatggtgatgtgatgacacaaggagaataaggtaaacgtggcaacaactaattggatgggatatgtaaccctaccatttgcttaagaggaatacaaatctaatggtggaaccccaaaatctgcctactcagccttagcacacactgaaagggaaaagcccaaacatttatcttcttctaatctacccacatcaatggggtcccaaaaccaaaagcacaagggacccttcctgttcctttttcccattattaacattttgactcgttgcaaaagaaaactactattcaaacccaacactcttaacactatctcacattgtgtagacagcaatagttggggatttgtgtagtgatccaacaaattaaaagtaatatttgcagcaaaagaaaaaaaaaataataataataaggagatatatatttttaataatgttctcttgccttgtaaagaattgtttaaaggacgcttctgttggaattacgtattatttaaaagaggtaaaaaggatggatatcaatagattagagttgcatgactttttctttaccttcttttcaattagagaaatgatatgtgcacatatgaaagatgctttcaaacattacatgccaaaatgtaacttttttttttaactaattgtacatatataatttcaattagggtaattaagatttttgcccctgaactttgacatgtactaaatcatgccccctgaacttttgaggttgttaaaaatgtctcttgaactattgagattgtt

SEQ ID NO: 113784 - DNA, 3868 bp, Cannabis sativa
tttttgtacgagaaaagaatatacggtgtttaatagtgattagcttagattaagataagattacattagtatgttaaggggaagatgaagagcatggaagttatccacaaaagatctaacagatttggttgagctgagatcgagttttagaacatccactttagcattttctatttcattcaaaatcacttgttttgctttatttgcagcatcagtgttccttgctgcaatgatcacatgggcacccctaagagccaaaactcttgaggtttccaacccaatcccacttccacctcctgcaattttgttttttctaattttactcagcttttgtaattattctttttagcatacatttctaacaaaatcacaaacatataaatacatgaccacacaaataatcactacattagtttatgagaaagaaagtaataatagctgctgaccagtgacaataacagtgagcttagatgcatcaatcccttcagtgacttcctcggcagtggaggctgatccatagccgcttgggccaggtctcccagtcaccagagaaaatatgctcattgttacttgggtttttttttttttgcttaaaaatgcacttgagaatgagttgattaaatttattgtgtgcaatatatatttatagaaagaagaggagagggtggtacttaggttgtaaatgcagtttttgtttaattttgatcactctcattagtcacacttatatataaccaaaccattctcataaacaagttaaatgctcgtcggtgatgactcaacctagctgtgcttgtgagatgttaaatagcctcaacgacctctcaaccactacttttcactatttcatgagtctttttctcacaccataactcgttttcctttaaaggaaattaaggagaataataagcttgtcaactcaacttaatcagctttaattcttacttaaaaaatttgtttgctttaacattatatgggtgtgtatatatcacatcataatgtatataaatttgactcatgtgaatagtagttggttgttacttcacaatcacaccatagacacaccattagtagctctctaaaagttcaccctatcaatatattaatacgctatcaatactgtactaggcaaaattattatggggtcccctcttttcataaataccatatttgttctttcttacttatgtggattatttttatatgatttattatttttccaaccaaacctgcaaatgttataaatgaacaaaaaaaaaaaatcaaccttcgcatgcacataatgcatatgcgtattcaatacaaataggagttgagttccactttaggcaaataataagtacactatatatagttatatacttaatgaggaattaagagaaagagggtgcggggtcgagacctaacaatttaatgaggaattttaaacaaacaagctctcatcgagtctaatctaatggatttggagtacgttcttgggttcgaaatttacatcatgataattctttgactaaggtacgccatcgtatgtagtgcaactctttatggtcggatacctttggtagtcattcggtgtccaaatctcagttactggggatctgatcataggtctctccatcttcaattttctacttctcctaacggtttggcacctgttttgaagttaaattagtccccttttaacctcgtgaatgcttgggccgtggggagattaattgtttgccggtcttcgcatgattgttcaggtacaagtgttgactcactaataaaactaaatctaatgttttatttttaacatatttatttattaattaattcactataaaaaaattatttgtgaaaaaaattgtgtctaaacatgtaaatcatcatttttatattatcactaaaaaagtttatggctaaaaatattaattagtcataaaaattacaattcgttctcactaaatgtgtttttaactgcaacacttataactaaaacgaaattaataataccttatatttaaatactagtttttctgtttgttgtgactaaattaaagtgatacaaaaattctatatgactaacaatttaatgaggaattttaaacaaacaagctctgatcgagtctaatctaatggatttggagtacgttattgggttcgaaatttacatcatgataattctttgactaaggtacgccatcgtgtgttgtgcaactctttatggtcggatacctttggtagtcattcggtgtccaaatctcagttgttctgctttgtgttttactggtgttttataaaaccacagtatttttgaaaaagttttcgtgtgacagtatttttgtaaaagttaacctaaattccagtatttttttgtaaatttcccttaattgtttgtcggtcttcgcatgattgttcaggtacaagtgttgactcattaataaaactaaatttaatgttttatttttaatatatttatttattaattaattcactataaaaaaaaataatttgcgaaaaaaattgtgtctaaacatgtaaatcattatttttatattatcactaaaaagtttatggctaaaaatattaattagtcacaaaaattacaattcattctcactaaatgtatttttaactgcaagtgcaacacttataactaaaacgaaattaataataccttatatttaaatactagtttttagtgacaactaatgtttgttgtgactaaattaaagtgacacaaaaattctatatgactaaaaaattatcaaaatgtagcatttcttatagtgattatcatatacggttaaatagtttaattaattagtgatctccaattaaataaagttgaaaaaaaatagaaaaaagtgagaatttaaagtagcgtaaaaaaaatttatatgtataaaggagatatatgaggtggtgaagtgacaacttaaaatctctctaattagtattatttattttttctttaattttcttatttttttaattttttattagttttcataaatatgaattaatataaaatatatatttttatttattttctccataatactcttattttttttattttattttttcaaaaaataataacttttttcttttgccttttcttttcatcatgttttatttttattttttattttctgaaattaagattgatgttttttttgtgcttttggctctttttaaataaaaaatatatatatttaaaaatgacatttttttaaaaaaaattgatcactccaaagtctttggctataacatataatttactatggccttttttttaaaaaaaaaaaaaaaaataagatatttaaaattgatatgttttaaaagattaataactctaaaatctattatcatgttttgactttttacctttaatttttttagaatatttaaagaatgactatactacaagtaaaatacggtaaagaaagttgttttgaaattttttttaaatctcaatttgtttgaggatattttgttcattatcttttttatataaagagcaagcgttttttttacgtgagagagcaaacctattaacaagaaaagtgaagactataagatacgttgattacgatgatgataataattttaaaaatattttctataaatttatcaattattatagatatatatttttaattttaaattaatttatatgtatattttgaaaactaatacctaatactcttctcatgaatttgttcattattgcttgcatgaatttgtaacaaccatagatatgacagtctcaaagctcagacacaatgagacttcaaatgacttcaaacgcaaatgcactcgacctcactcacctaatcctacatgcttgaccacgtactacaaccaatgtgctgaattctac

SEQ ID NO: 113785 - DNA, 2421 bp, Cannabis sativa
caaacatgcacttattttttgtaactttattctctaaaaactgtttttaaaaaataaggtcaaacaagcctaattattttcaaaaaacaatattctgtttttataaacaaaaaaaccattgtttaattatgatgcttaacatacacttatatatacctcatcctataagggactcattcattatctcacttaattgggtcatcaaaacatactttgaaagttttatcccattaagaatgatactgcaacaacaagctaactttctaaaaggttaaccataaactttcctataagaagttgtagtgggatttaaaccattggcctaagtaagaaatgatgttaataaaagcattcctatcactatatcagacaacgatgtgataatgaaaattagtactgatttatcgctaagtatatatattttaaatatatattaaaaaatttataatttaaattatttggaaagagaaaatctctttccaacatattaaatgatatgttttgtagtttttaacattaaatgttatttaaaaatcaattactaaactaaagactaaagagtattgctattaaaagtcagtagtatttaatactatcatgaggtgttataataattagcgatattttataataggaaccaatacttaattatgatctgacatcttaggcatacaaaaattacatactatttaatcctaatcatacaatcaaatgtgatttagtcccctaaatgagatcaacaaaatactttgggtggtataaaaaattctattagtaacaacatctaacaaattcatatttataatataatatataaaatttattcaattatttttaaatcttttttattttccaaatcaaatcaaatatataaatatataatattataattaattagtggtgaccacatatttatagtagatagattatgtggtccatatccctctttataaaaagtaacggcatgcatgtctaattttatacacataattatttttattaatctatctcatcaaatatataataatattaatgagatctaaatcaccacaaatatcatacataattatataaatatacatataaaaaaaaacattgaattgaattgtatgggggaaaggtaacaagtaactagtttgaccaaatgggaccataaaatatataataatttatataaatatagaggattggatacctattttaattaatcgtgctcaatatatagtagtagtaatgttttttgtcaacatggtaataaaacacacatatatatacataagatgtggatatattccttaaaaaaataaaaaataaaaaagagatatatggttatatacatcatgtttacacatataaattatatttattttacaatatataattaaagacagatattgattgatagatttgattaattaagaatcttgtagtacttgatattatgtaagtataacgttgaagcaaagtttttgtttaattaggaattattattgtttgaattaatctagggtttgttttttcactaaaaataaatattaacacaaattatggtcctttaattaaacttattaatccaaccacttatatttatataaatgggaagagttttattaacacaattagggacgataaattatagaattggaattaaaaatgaaagataataaattgtgatatttttttatttaatttggtatttacatgtgttttaatataattagttagattaattaatttaagagaaattactctatatattattttttaattttttttttaaaattacggtttaggttgatgtggtggtttcacatttcaacgatagttactatgtaggttgttatacggattttggttgcgatttaaattacttcattagttattatagagaattctgtgtagaattccgtaaaaatacagaagaaactatttaaaagtataaaaataagtaaaaaaatcctaaatttaatctaagaggataaatttgttagagattttattatattagaaaaaaattaatatatattataactttattgaaaagagatctaacgaaatcttaattacaagatttatatatggagaagtgaataagaaattaattaattaatgtttaattagatattcctgatttgtagtgtaattaatgttcattacatattattagttcattacttaattctcttattcctttcttagtcaaagtaactcaatatataaataagatatttatatggtgggtgcatgttttttattgatagaatatctctttgtattttagtacttgaagaaattataatttaatattttttatatagcaattttcattatagttaattagaatatcatgaaattttttgtaaatttttgaataattgattttgtttttctttttgaacaaattgtaacgcccgtatttta

SEQ ID NO: 113786 - DNA, 2954 bp, Cannabis sativa
atgtaagaaagaatgaccacttttgaacttaggtggaatgaaatggaatagaataggaaggaaataatttttattctattcttttgtttcgttacatttgacagtgttggaatgtcattctactggaatgatttttacatcatttctgttttggtagaatgactattccattttgaagtggaaggaaagaccattccaattacaagatgagaaaaaatttgataatttttttatgcgttttaaatttgattctattctcattcctatgctttgttccttccaactaaacgccaccttagtttttggttaagacccccattaattgatttactaattggatactcaagagatgtagctcaaatggtcacgcatgtaacttgtggagtttgcttccacaacgtataggttcgagtccctcttgggtacctatgtagcgattgtccccaaatactgtagggttaggcgaggatcctagtttcaaaaaaaaatgatttactaattgtatctattacagtcaatagaccagctagttcaatatgatgaaccatttttcttaattaaattctgatgtatcatgtatatgaatttcatgatctcattagagtgaatgttataatatctaagtgagttgtgtttactcatagctcctaagagttttctgccttctaaatagaatattaacgtgtcttgatttatttgcagcccaaagtagagtgagtgttaatttttgtttttaatgttttacagcgagtgttgtatgtggacattgatatccaccatggagatggagtggaggaagcattttacacaactgatagggtcatgacagtttcattccacaaatttggagattatttccctggtaccggagacatagatgatattggttatgcaaaggggaaatactactctcttaacgtgccacttgatgatggaatagacgatgagagctaccatttcttgtttaaaccaatcatgggaaaagtgatggaagtttttaaacccggggctgtggttcttcagtgtggtgctgattccttatccggggacaggctaggatgcttcaatctttctatcaaaggtcatgccgagtgtgtcaaatatatgagatcatttaatgtaccactgttgcttcttggtggcggtggatataccattcgaaatgttgctcggtgctggtgctatgaggtgtgattcttgttttaattttctattctgtttttcgaacacagagtacttttttaatagttacttagattcctttgtcggtactatttagtcgtagtttgcaactttcatttcattttgttttaatgttcattatgtgttatgctcatctgcaatacagactggagttgcactaggagtagaagttgaagacaaaatgccacagcatgagtactatgagtactttggtccagactatactcttcacgttgctcctagtaacatggaaaataagaattcacgccaatcactggacgaaatccgagctaagttgctcgactatctttccaagcttcagcatgcacccagtgtccaatttcacgataaacctcccgacactgagcttccagaggttggattctgtatatctttttattataattggaggaaaatatttctgcatgatataactcgtgtttttgaaggaaacaaaaactaaaatcttacttttttctttaatgatttttcaggcagatgaagatcaagatgatccagatgagagatgggatgacgattctgacatggacattgatgatcggtatttaatcttatcaaaccccccttctgttctattgcgtttttatgtttattttgtttctatatgcaatttactgatttagcatttattttcacaggaaacttttacgttgcagagtaaagcgagaagttgataataacgaacttaaggaacaggtatgttctgttcactttcacagcctatttcaccttccatactatttcgaaatctacactttactatagactcgaagaagataaatcagtaataatattatgcttgtaaatagttttccgacaatcttaaataatgcagctactagatgtaactattatttcgaaatctagactatactatagactcagagaagataaatcgatgatattatgcttagaacttagctgggcaataaaccatttgagttagttttccgaccattttaaacaatgtagctactagatttaactaattagctagataatagcattccaagccttcccataattgcttctcttattatttttaaatttaagaagtaatattaagactgttaatcaccccattaggagaatcaaaaaggaaatgcagagaatactaaaggctatgatactgcagaagatgatactacatttccagttaagctctttatacaattatatgtatatatatcactagattgagattttgataaatgtatgtatatataataataaaattcaataatgtttgcagggcttagatgtgggatctttggcaataaatgaaccaagtgtgaaagttgagcaagagaatactaataagccagctgaccagctataaccccaacaatggccaaagctacaaccatctttagatgcattaagctaactctatgtttttgtgtaggattatttcttgtacttatcaaaaagagtttatattagtcaaatggattatatgctaagtaaatagtggaaatgtttttgatttttgattttttgttttattttttctttttctaactcatgaaatgataagataataattatgaagtacaagtttaaatttataatttgaaattattgtttaaaattttaagtgttttttgttgctaataattaagggtgtgtttttaatttttattagttgttttccaaataaaataatgaggtttttttatttttatacttttaaatatatatatatattttgtatttttacaaaattttac

SEQ ID NO: 113787 - DNA, 1194 bp, Cannabis sativa
  modified_base (813)..(838): a, c, t, g, unknown or other
tggaatgtattttccttgtgtacagagtaagtgggttggcccttaatataatgggcataataagagagtaatggactaacaaagtgtgtaaccacctaaagaaaaatatcactaacttattattgtatcctttaatactcccctcaagaggagtgaggagtgtacaaattttgtatattcatcttggtaacaatctttttaaactgagtgagcggtagaagttttgtaaaaatatcagctaggttgttcttggaggttacatggatgagtttcagttggccttgttggatttttctcgcagattatgtgacaatctatttccacatgttttgttcgctcataaaaaactgagtttgtagaaatgtgaatggttgtcgtgttatcacaatagaggacaacaggttgttgaatagagacgccaaggtctttgaggacatcaataatcaggtgagtttctgcctttttgcttctgataaagaaggagatgaaaaatgaaaatggtcctcctatgaaatgtaaaattttgaattttgtccattaagggaaagaacaccatgcaatacagtccatcacaatatgatatctcctcatttctttatcaatacatttaatttggggtgcacctatataactctttagggtgttcattatagactttcctaataatttatgtaatgagaataattgataagaacatcagttaaaataactacaaagtcaaaatagtgagtcaggccggctctaggcataggcggactagacccgcgcttaggacccaaataaaaaaaatactttttaaaaaatatacatatnnnnnnnnnnnnnnnnnnnnnnnnnntttatctttatagtaagggctcaattttattttattttttgcctatggcccatttcaattcaaggccggctctgtagagagtcatttttattgtgattactctaattatgttctttacttaagttaatatttaattattttaataatattttacaatgagaatttgtcaaatataaattaattttgtaaaataataataaaaatgctcttgattaaaatattattaaaaaaatttagaaaaagagtaaggagctccctacatttagagagctaccaatccaatctttaggatctctattatagggagttttttttttttttttttttctttgggaagcagtgagttcgtgacctcc

SEQ ID NO: 113788 - DNA, 2153 bp, Cannabis sativa
agtgcttatataaagattgtatctttgtcatcttgattcataatgaatgattctatcttttcttattctagttttaccatgaagtggatatcgaaagagttatattgaggatagcatatagacgtttgatcaagcccctttaatctttgaacatgttaaaaaaggggaaaacccacgcctcgtgccccttactaaacttaaactctgggtccagttgcataatatgccaattggacttatgtcaaaaagaattataagaggtgttggtaactatattggtacttaataatttcttaggcatttggcgtgattatctaaggattcgagttaagcttcaagttgttatgctactaaaaaagtagaagaagttggaaatacaaggtggcccaatttgctacgtgacctttaagtatgaggatttacctacattctgcttcatatgtggagttcttgggcactctgaggttctacgaaaggttatttcacatgccaaaagatcaaatcattaaaagctatgatcttgagttaaaagctttaccaagaagacgtcactatgccaatggttctaaatggctgagattggggtggctacaaaatctagttcttcaacggaaagatgggagagcagcaacaatggtggccgtcaacggtcatctctgatgacagctaggaatgatggtcaacgtcctttgattcctcgcaatcaaggatctttattacagcctggtaatacaaaaactaataatgtgggattgtatggggaaagtttaataccaggatatggtgtgttagaaattaaagaaaaatcccttgatataggggtggtcaacgaaggggagaagttagtggcgctaaatgaagatatttcaaatgatggactattatttattgatcttaaaagaagaagaatgggctctaacaagcgaaatgggcctaatagtgaggaagaggtaggattgagctttattgtacataataatgttacttatttaaatatggaaatatcccatgttagtgagaatgtattggtgggccaagatatttttccaaaaaaacttgaatggggtgggtgctggttctcaggcccatcacaaattatgaatgtgttaaactagaattgtcggaggcttaggaactaacggactatttaatttctaagagagattgtctctcaaaataaactgagtcttatattcttgtgtaaaataaagtgtcaaaaatcaaaagttgatgggttggcccgtgttcttggctttgagggcgtgtttgttgtgaatccaattgggcttgctagggggctggctcttttgtagaaaaacaaaaatgatggatatgtgttgtgcttctttagctatcacattggcctggtaaaatcctcgtcttctttaggtagctggtgacttacggatttatatggagagcctaactgtaattgtcgttatgagacttggggcctacttcgcaccctggccagcaaatcgacgctaccttggtgtgttattggagatgttaacaatgttgttcgtcaagaatacaaacatattggtcgtccttacccataatggctgctttaggggtttcaagatgtgctatagtagtgcaatttgtttgatttagaattacaaggctatccattcacttgggagagaagtagaggctcgaactcttgggtggagatccatttggatagatctttggtgtcttcctcatggaatgaggttttcccttatgctacccttactaatttagaattttgcacttcggatcactcccttattcttggagctgacggttttcaaccttgttgtcatttttgttttgaaaacacctacttgaaagaaccattatgtttagaaattgtgagggattgttggggcaataatcgggccactaattttgttgataaaattaagaataattagcaatttttctccttaaacttttgataatgctgattttacctcctaaaatatacggcttgttaagaatcccccctgaacttttacatttatagaaatttagtccttctactagattccatcgcattattccgtttaaatgctgacgcgcctttgtaaattagcaactttgtcccctaaactttgacaattatcaaattgtaccccattaaaataaaaataagaaagattcaa

SEQ ID NO: 113789 - DNA, 2868 bp, Cannabis sativa
  modified_base (2798)..(2806): a, c, t, g, unknown or other
tcaaattttttgattttctaagcatagaaaatcaaatttcccatcctaaataaaatatgattcctaaaagagtatggaaaacatattaattagaacaacaccaaagaggaaatggaagtcataattggaggtcaaccttctttttcttcctttccttttgagtcagcctactcatgatttggctgatgattgacacttgtcctacatgaaaggtgggatcattaactttaatccacgcccttgatttccggcatacaaatcctggaactgatctctgctcggtgaattaaattccttataccacacacgcatcttattggtccaaccattgttgttcacgtgggtctagccaataaaataatttcacctaataactatgcatcctatattattacgagaaatgcttaacggcgtgccatctctaatattgttagtccaattcaattgagaaagataaatgctaaaaggtattattggtgctagacactctcctacgtgtcaatattgctattggtctaattaagtatcgggtcccatatagtttaatataatagttttagagaatatcgctagccaatcgtaagacaacatgtcttaaaagtaccgaacaccactaatatcctataacaatgctcattgaaaaatatggtacttatttaatataaagtgatacttattttattttaataaatattaaaaataattactaattaattatatgataactttattgtaatattaggtactatgagtatttcatagcaatacttaatttaatattatgtcctatttattttactttaatatactcggagaagagtcatcaaaggtttgtataaataattgaatagtaagtcatttgaaagttttctacaataatataatatatatatttttttaaaaaaataatgtattatattgttattgatataatgaaataaatttaagttttgataattatatagaatattgctttattattaagtattggtcatcctaatcaaaaaatattaatactaatagtgctcaacactatataaatatattatattactattagtgtaatttaatattagattttacatattttaattatataattcttatagaaaattgataaacactcgtaaagtaaggtaataaagtaaggtagtattagataccactggtgcttaataataatatttattttcataaaaaaatgttaaaaatatattagtattatctatcactacaaagtaacaacttacgaattagtagttttcaataataattattatatatattaaatatgtaaaactcaatacttaaataatactttattagaataatagtaaaacatccataatatttttttttttattattattattattattattatatagcctatcttcaaaactttaaaatatattaaatgtttagtctattacagaaaccccaacctaatataaaagaagaatttttttttatatatataataaactaataatgcagagtttttcagtttgacaggtagtatttttgtatcacaagttaaaactttggctttggtaataactatcaataaattgtgttttttaatgagttggaaagtgctgtttgaggatgttatagttttattgtctaaattttcgtggacaattttgttccatgtagctcgcgataagaattctgcagcacatagtttgataaagtatgctttttggttagatgatgagctatcttagtttgagtaagtgtcgatgccgattgtaaattactgtattattaatcatgtatgattttgatcaccaagttagagagttggctatttatatatacatgtatatggagatttcctatcaaaataattgtaataatatcactactcagttatggatcttgtatactttctatgtataaatatttatcatataatatattatgaaaatatccatttgggtagtgagatttgtaggattgagatgtgggtctggtccaaaggtgttggccattatagcctaaacccgataaaggcgtgccaaggacatccctcggttgggtagtatggcattggcaatgttgttttcacgtgccattgctcccatttgtttggcaaaactataaaaatataaatatatatgtacatataattatatgtatatagatagaatatatgtatttatgtcagtaattaattcatgctgacagttataatcgttttggaaaaagtcatcagaagaaaccaatgagaaattgattaggataccttaatcgaacatgcaatatttctcaaatattatagcttgtttacttgattaagctaggcatacgaaataacacttgaggttcctttagtatgttgtgttgtattgtcaaatattgtgggagtcgtaacttgtattttatatcgaatgatattgagtttgtgcaatattattttatacagtactatatttaatgttgatttatataaatagaatgtgtaaaattatatactttcatcttaaactcaaatccaactcagacctagacctggactcgaataccaatttcgtcctcggacccagactctcacctctgaccttagacccaaaccccgacctctgacctcggactccgaccctagatctcacatcgaacactgacccctgatcgacctcggaccccggaccctagaccccgaaccctggcattgacctctacatcggccccagactcgaacccgaactcggaccctggcccaaacttgaaccccagtcctagacccgaaccccaaacttgactgtaacgccctgaccctcagggacgccacnnnnnnnnntttataaacttattatcactaatctataattttggaaaaagtgtggtttaatttaaaccttt

SEQ ID NO: 113790 - DNA, 7094 bp, Cannabis sativa
  modified_base (7038)..(7067): a, c, t, g, unknown or other
aaaaaaaaaaaaaaagaaaaggagcagttaccgagacagtatttccttcagtattttctttctgaagcaaagacggatttgaactgttttgattttcatccaaagatctatatccctttgcagcatcaagactacatgtgcagctctccaatatccgaacaacacatcccatcaaaaaatcaagaaaaggcttgattcgcaactcatcgaaaactccaacaacatcttcaatcacatgaagaaaaccatttcttttcttccatgacaatgctgtaatattatcaactgtgaaatacttaagaaaatttgaagcttgaaacctatctttagagcttccggaagaagtccaaaaccagtcagacgtatcatcacttcccactgtcccaatttgcaaaggcttcattaacaatgcatagaaaaggggaagctcatcaacatcaagttgcgctaagaaaccaagaaccgcctttcgataatttacacttgcatgctgaacaaaacagaatttgtcacacagcttagtagatgaagaataagatgaaagaacaataccaaataaagggcaaacaagaacccacaaacttcctgaggacggatattatcttatgtattacaaacgaacagataacagatgcataatgcattaaaaactttgaaagattcatttcatgggaggggccatggatactcctttataattaaaaaaaaaaaagcacgttgtagagctgaaaaacaaatatacctttcgtgaggcattcttcttcaacttcctgacttttggcatcagaagacggatcactataggtacaaggtaaggtctgtggtactcttcaatatgtttagattctctggataaactccatgtggttagctcctctctgaaactattaaagctaagtatatttttcaggtgttgatcatatgatagcagaaaatcatctttccaaatcaacaggcattcaagaaccgctgactgtatctcaggatcatttgcatccaaaagcctggtaaaaaacaacaatgaattccagttatgtatcctaaaactatatgaaatgtgataaactaaattataacaaattttacagttaaaataaatatacattgatacacaaacctattttccagcacatctttaagaaattgattccgataaaaggacttaaggttccgcatcaatttcagcaaatttaaccattcttttagaataaccttccaatctttgcctttacaaacaagtgaactgaatgatcccacactacaatcacagataacaaaagcaagttacacctctatagaactaagaataaacaaaatagcacatgaagaatcaagatcaccttatatgctcactgctatcatagcccaaaaacttcaaaagcaaaggaacaacatctcgtgaacgagaatcaacaagtgttggaattctttgtaaagattggagcaacaaggttattactgttgccaatggtgtaccatcagagggaggagcgacaaacaacttaaagcgctcagcaagaactagcaaacaagaaaggaaaaaaggttagcagtcaaacttgtaaagtaaatagttaatggtagctctaatctacaagagatttgcaactgcattgaaaaagatgtctgaaactaattcaaaatattaacacaatatataagttaacaatgctagtattaaaggagttattggatatatggttgttacaagtttacatttcttagaaagtaaagaaaagggcacttgcaagcgttgtgaagcactgcagcacataagcgtatgaaaaagcacaaaagaatgaagaataaaaaacaactgaccacttgcattgctggagaattctgcctttgctttatcgagttgatcatttgatgcctggaatgtggagagaatctgcttaaaataaccaaggaatccttcccatactagaccaacataattgcttaatgccaccgcaaggcattccgacgctggattccaaacataactaaaccggttatgaaagacaccaatcattccatttacaagaagaggaatataaacttcagatatccttccagcagagagagccatgtgtactttagagatgtacaaggtcactgtcctgaatgtagagactgaaagaggagttgtctcaattaagagaaggagctgcagaagctgatatatcaaagtaacttagcatcaaatagtgtcaatcaaactataatctaaacatcaaagtagcaaaaaagtgaacaaccatacattaaagctctggctgtctgtatgggaattctctgaagattcagttttcagtttcttatgagctggctgatcctctgctgaaacatcacaaatcagaagttcatagtggcagagtaatctaagagctgcaacacggtgccccttttccaggtgatgcaaattttcagcaaatagacgtattgcatcaacagccttgtctgctttaagttctggatgatatgtacgagagttgcagttttcttctattattgacctataattagagatagttaattattttcgatcaatataattaagagcaggagataaaataaatcaataattacaaatcaacttacccatatgcagaatccaaaaaatctgcaacagcagataatatttgagtgcacgatttgtgccttctcgcaagatgcaaaaatctgcttgtttcctcacatttgtcattcctaccacggtgcaattttgaataggaatgaatagcagagccgataatgctttgcacaacatgtttaggaacaccagcagcgttgtctgaaagaaaatatcatatcagttgttagacaaccacgagtctcaaatgatttacctaataagaagtgtgattggatatgtaggtaaaagcgagggataagatgaaattgattggacagccctagcattctgattgcacttaagaaagtacaaatcacagaggcccaagatttaagagtgactgttgccataagaaatactggctattattcccttctaaatctaccctaactagctgaaaagcctgaaattaaatttactgccaacaaaatttatcagagagaaaatatatatgtacatattcatatatatcatgtatgttactgatacttttaattggtctttgctgcactaagcttgatccagctcgcaacaatgttaaattaactcatacaagagaggacaaggcaggttactaaacaaacaaaaacaaaataataatagaaggagaagaattaccagattcaatcactacacattgatcaagtgcatcaatgaaatcagctagcagcgatgaatctttttcgggatctaacaagtacggaaaacaattgacagtaccccacaacaaatctaagttgttttcctgaagtcgagtagatgatgaaccatgagatacaacatcctgtatgtctgtccggagaaaatcttgaatcttcaaaagccctcctttagaagtttcatctaagctttgtctctcaaataaagagagaaatagacatactacttcctttggtgaggtttctattaaatcgttcagcgcactgaaactcaaacaaaaagaatcagaaactgtcccgggcaagaaactataaacatatccctgaaataattaacatgtgaaattacctcagaatattaaccttgaagaaattcaatatggaatgatccttcaatagtagtttgtgaataaatgccagcaaactgaaaccaacgcctaaaaatgtcagacctcggaaattcacaacatacaagtatacaacactagaatcgtaacatgaagaatggaaacccaaacctggcgctctttaactcaaataccggtgcccattgcaatgaacagtcggatacgattgacatgtcatcatagttgtgcagcacatcaagagtgcaaagcatcaactcaagaacctgatcgaaaatttcaggtacactatcctcagtagtgattccggtatgtaagatcagttcctgtaaaagaagtgcaacggcatcgatcataggttggtgatctatgcagcattacaaattctaagttagtacaacaatttcatggaaattaaaaataaagaaaataggacaataaatagaactcactagaaacacttcttccgtcatttatttgaactgtagagactagcagcgataacaagtgacttaatcgagtaagagacttattcttaacagaatcagctatttccatgtgtaagcatttccacattatattcaattctttgggctcaattatttcacacaatctttgtaatgagagaattaaaacttcaacaacagtattcggaactttcttttcttttttgccttgaacaacaatatctgaacctgtaaatgcaagaagttggtgccaaaataatggattaaaaaatatttgaaatgtcgagaaacatcaagccaacataaagtataagtagataacaacagttctagcatagagataaggcttgccttcggtgtatttatcgccagcacagagtactggattgctcatcaataaccgcaatactctttctgctttagaatggagtttcgatgaggttcctttcataacatagcaaagtaaagcactgactccatatttccgggtagctatatcaggcttctttgcaacttcatgtatgaccttccaaacacctgttgtcctcaaaatattaatcataaattaacctaagaaaaaacaaattttgaggaaaccataatctatagacttgtacaaaaactctaatgcctttaccatcaacatcatctagcctaataaacaaatatataaaaagcaaacaaaaccaacaccactgaggtggtcaccgaaagattttccctcaaatcattctaacagttttaaaagaatcgggaaattattccattcgattactcttaggaatcgggaaaattcctaagagtaataatgatttatacaagcttcttcagcccataaactttcaaggcaatttcatacaaaggtgaaataactaagagatcgtaagtcgataacataaactaatcttaagtactaacttttataaaattctagcataagagcacatcataaaccaaataattttttctgtaattttgttaaagaaaagagagattcgggacaagaaatcacataaagtaaagaaacaaaataaataaataaatacttgcttcccgtaacagcaacatttgtcagataagctgaaccacctgccctaaatttcacacactaatctgagatatatatacttcaattttctaagagactcagctacatgatatggaaccgaaaacagcaaacagtatagagtccaacttaaaattgtgtcgatggcaagtaacatattcgtatgaagatcattattctttccctaacttagttacaaaatcaacaaacagctatatgtaatcattactagaaagatgaggtaaatacctagtttaagctgatcaaaaggtgcattcctgaacaagaaggatattgcttctgccataaagtcttggacaaaatcttttggatagaacctcaatttccgggtaacccttcaaaaacattataaggaataaaaacataagcaccaaagatacagaagaaaattgtaacaatgatattaaatctgcgacaacatgcatctaaaatcatatatcaaattaacaactatgaacttcccaattaacttaaatacgattatctgtatagaaaccaaaattaaaagtatataattgaaataaaaattaaaacatctatataaatattacttacttgagtaccaggtcaaggttgtttatgagatatttctgtaaatacatcataatatatgaccaggatgtaaaaatctgctcaataatttctggctctgtatctgcaccgctttcaaggagagcatatagggactcagcaatatttggcaagaaactggcaaatccataaacacaaaagattagtgattgaagcagagataatgaatgtaatgtaaacaacaatacaagaatcatcgaaacaaaatcgagagaaactcacggcaaaaactcctctagaagatccctagataaagcagcaattagcctgtaaaacaatccaaataagcatttaataagctaaataagttttttgtgatttaaaagtaagaagattataacatacctgagaataggttcaaccgaaagtctggcttttatatgtaaaactgataaaagctttaacataatagtttctttgtgtaataacactagaggtagtgtttgcacaaatggcacaatctcctcatagaaagagatgaaatcttcagcagtattcagttcctacaattacattacaaaaaaaacaaactatcaattctcataatacattaacacaaaaactcaaattcataaaagtaacacataccctccattcaaccagacagtcacgaaaaaatgaagagccttcagatggctcagatttaattatatcaagacatcgatacacatcaatgtcgatgtcttctattctttgagaaaaagtcttgaactgcaatccaggaaggtaaactcagtaatcaaaaaatcaaagtggctaccgaaataaatagtgaaaagagaaacttacgatgaagcggcgacggccaacggagttattgagagacttgacagccatagaatgagagggagtcgccattgatgaagatttttgagaaaactggttagaaaaggttagggttttgtatattcagacaggaggaagaaagaagggtttaagaaaaaaaaatgaatttttaattataattataaatataatatataaaatgaatgagggaatgagttttaattataaatactttcttttttttttaaataaatatcttagattttattatatctagctataaccttataataaaataaaggccttttataacggcagacagtaaaatagagaagtggagaggtgggagcttgccacgctattagtcccacatctcacaaacccacaatcccaactattacttattactatttatttattatttattatgttagattaaaacatttagggctcgtttggaacnnnnnnnnnnnnnnnnnnnnnnnnnnnnnnattatattgaattgtattttatgcaat

SEQ ID NO: 113791 - DNA, 8068 bp, Cannabis sativa
gctagttgcaataagggtttctgtgtagaattccgtaaaaataaaaaaaaaaaaactgttttagagtgtaaaaatgaaaaaaccctattctttttatgtatggtataattattgttatgaaacaaaaggtcaaatatatttaactcccttgactattggtgattttgttacagctattgattacagttaattgtgtggcttcaagagtgtgatttgaacaactagaaaatcaaatattggatatggctgatgtcaaaagaaagagctatgtgatttgccataccagaaatcagatctgctgcatcagattaatcagcatttattttttattgataaatactttaagaatgtctttgttgcagctgtagagtgataatgttgaatattgaagaaagaaaatagaggaagaaagaaaaatagagtgtgtttgaaagcaaagaaagactggaagctcattgtctttattgctcaatcaagtgtatttatacactaattacaactgaatgaaaacaaactcaacaagctaaaccaatagcttaactaactttaactaattctaaccaactcacatatctgttaggtggttatcatcccccctcaaacgaaaaagagaagaaataattttgagtttgtgttttagatagtgaaatcgatctttaggtagagattttgtgagtatatctgcaacttggtctacagattgcacatatcgaacaaacacttcattattgagaatctaatcacgaacaaagtgtttatcaattttaatatgtttgcagcgagcatagaatactggattagctgctaaagtagcagctccttgattgtccacccaaataatgggaacatcagctagaacagcctgtaattcagtgaagtttgaatgcaaccacttaagctcagcagctgtgtttgctaaggcaaaaaattcactctctggaggatcgtgtaccacttgttgcttcttagctgaccaagagatgagattgggactaagaaaaacaacatatccaccagtagacctgcgatcatcaggttaagttgcccagtcagcatcagaataagccttaatagacaatcgagatgctggagaaatgaacagaccatgagacagagtgccttttaagtatcgaaggagtcttttacaggcttcccaatgtacattggttgaagcatggatgaactgagagaacttattgatgatgaagtaccttttatgtcatagagtattagactctaatacaaataatctacattaaaaatggtgttcaacttatatagaaatgtattgtatatggtccaaataaagtgcttaagttattatatatgtatgtatatataaaatcgagaaattgagttgaagtaaagattaaaaagtagttcgaaatttgcaaaaatatttttctactttacgtagagtacaaataatagaagcgctattaaactttcaaggattttctatatattttgaagaaagtactttaataatggtttgtttcttacttttcgaaacatatttaacttcttactcttgacttcttctcatatgctcttaaagcgtttacaaagaaaaagaaaaaattatagcattgtataaaaattaaaaaatatgatctgacactagaatctatacaaatacatttttcatcattttcaattacatgtctagcaaatacgactttagctctaatttttttaattttatattatgttaataattttggcacaaaaattaacaacctaaaaaattaagtgcaaattagttacctaatataaagatatcagaaagtgtcgccgataactccaaagtatttgagttgtcacttacatgcatgatatttttttttttttttttgagtcaacatgcatgatattttagttttgcaacatagttaaacattagtctttttattctcttttttttagtcccgcattgattggatgagtaattttgagtgttcaacatgctataaattaagcaatttttgtttagttagaatatttataatattttgataaagatacataattttttataatagtagattatattaatagtggaatatatttatttccatatgttatataaaaaaaataaaataaaaaactaaatatttgaaatgtattggaatatactggagaatagattgtgagtgtagtggggtcaacttagtgaggtggagggattaattacttaaatatttgaaatgtatcgaaggggtcttttagaggcttcccaatgtacattggttggagcatggatgaattgagagagcttattgatgatgaaggcaacatctagtctagttaatgtcaagtattgaagtgctccaagagtgcttcgatatagtgttttatcttcaaagggtgttccttcagttagagctagctcatgagaactactagtggggcttgagcaagtcttagcaccatccaagtgcactttgacaaggagatctgtgatatctttactttgagacaaagacacgcctttagaatctctatgtatttccactccaagaaaataatgaacaactctcatatctttgagtgaaaatgtagcattgagatcaccaataaactgttgtaaaatagttgaattaggtcctgtaactaaaatattatctacataaactagtagaatgatttgagtagaacctgatccataaacaaaaagagatgtatcagctcaagaagccttgaatccccagctaaagagtgttattttaagcttgtcattccaagctctaggtgcctactttaaaccataaatgactttgttcaatttgcagacatgatgaggatgttgagggtctacaaagcttttttgttgagtcatgtatacagtcgcataaagatcaccatgaagaaaggcattagagacatccaattaccttacttcccaattaaaagttacagctaaagtgagaactaatctaactgtaactggtttcactacaggactgaaggtgtcctcaaaattaatgcatgactgttgaagataccctctggcgaccaatcgagatttgtacttatcaaggattccattagcatttaacttcactctaaacacccacttattgtctattagaaccatgtgaggcttataaggaactaatgtccaagtaccttgagaattaagagcataaaactcttttgccagtgaaccattccacactggatctttgagagcagatttcatagattttggttctcgaggtagcaaagattaagacagtctatgcttagttgccatataaactttaggcttgtaaatgcctttcaaagatctggtgatcatagaatgtgttcgaggaagtggaatagcaactgtagagccagatggaaccactggaacatcatgctgcaaagatgtgtttgcagtgttttcaacagtatttgatagaggaagacctgcagcagataataggggtgtacatcggtcgatttagtcgggttatagcgtatttttaccagcccaatataaatgtcgggttgcaaatatctatttgtaatccgtctaatgaaaaaataaaaaaagtgtaacccacctaatgatttttgtcggtttggtcgggttaacccgtttaaaccgatctttattttttatttttttcattattattagtcttttgtgttcaaataattgatttgaaaaaataaatgtatagtataggccttcaagattaaaatatttatagtttaaattaatgttaaaaaataaatataaattgaataaacattaaagtattaaacaacattttttttaaaaatagaataaaaaaaaaatatacttatatgtaaattttaaatttcaacttcaatattcaaatacaatcaaaattatcaattttaaattttaaatttcaaattaaatactataaaatacaaattttaaatgtaaaatagtttaacaattaaacgtaatttatatattatattatagataattttagtaaaaaatatgtaaatttgtttattcagtttgttcgggttatttgggcgggttagaaaaatattcaacccgcccaatatattcattgggcagtttgaattttctgtaaagttattcgggttgtattttttgtcagtttattcagtttggtttaggtcgtttattcgggttgggtaatttgtaaaattttttgaacagccgtagcagataagtgagatgttgcaatatctggatccaagttatcacctagtgtaactggtgtagctgcagcaaagtgattctggagcatctgcaacatcagaagttgctctttcatttttcggtgtaacatgtgttgctgaagcagctgaagtaattggtgcttctggaacatcaacaatagcagaatcagctctcttagttgcagcaataggtgtgttatgagcagattcatttgcactagaaattatagcaggagcaactgatgttggaccaaatggctcaacaacaaactcaggtgaggcatgctgaaaactagtaaagaaatgcatagtaggacaagttgtggttttagatattaccttggatgaagaagctgaaaccttagaagcagggaatgatagctcatcaaaaacaacattcctggctatgaaaattcttccaactgcattttcacacaaatagcctttgtgttttggagaatatgcaaggaacaaatactcttcagatctatattcaagcttatgatgatgatagggccttaaatgtggataacaagcacaaccaaatggtttaagaacatgataatctagaatttcattaaacaaaactcaaatggactaagattgccaagcacaggtgtaagcattctattaattgagtgagtagcacactgaaaggcaaaccaccaataagagagatcaagaccagcttgagctaagagagttaaccagtttcaattatttgtctatgttttcttttaactctaccattttattcatgagtatgagggcaaggttgtttaaacaaaataccttggtcagctagaaatccttcagaaggtctatagtctcctcctccatcagcttgaacagctttgattggtaaattaaactatttttctacgagacttttgagcttgataaatgtttcaaaggcttgagattttaaagtgggtggaaagatccaagaaaacctactataatcatctacaaagacaatgtaatatttgtagttttcttttgatagaatatggaaaggaccccataaatcagtgtcacaagtgcaagtggttgattagcttgagattgagacaatggaaatggcagcctatgacttttgcctaattaacaagcttttgcaaaatttagaattttaagggaacatgatatattagctttagttaaaattttgcttagagtgtgaggggcaggggaccaagttttgtatgccaagcatttatgtcgttaacagttggtgaaagcaaaacaatagaattaaagacatcagaataggcaatagagggctttttattattttgttcagtacaagtaaaggttgaagaatcaacctgagtacaacattgattacagaacttagaatgacacaacctaaacttggaatgactacctgaagttgcaagatgcacctgtaaagctttgttgcaaagactcaagctatcatctcctaagagatagagaccatctttgattttccctttaagcaggactgcccctgttttcttgtccttaacaaaacaacacattttatgaaattctaagaaaatatgcttatcattagtaagtttggagacactaaccaagtatttagttatggtaggaatttgtaagactgaatttagatttaaagaataagaatttgagggaagagtagttgtactaatgttagaaataactaatttcttaccattagacacaacaacagcttcatgactagaataggggatgacagattcaagatttttaattgagtgtgctatatgattagttgcacctgtatccacataccacccaacatcatcaccaaagtctagcactgtttgagccacaaaagcttgaggatcataattgagagatttctctgtaagattagcttgaggctgaggagtagacgcctttggagtaacccagtttctatcaaacgtatagagacaagttgcacgagtgtgcccaaatctcatgcaaacttgacaaagaggtctgttgttgacaggtcgaggtccatttccacgattggaaatcttggtgcattttcagatccttgacctcttcctaaaccattgaaaggtttgtatgttccatttcttgatcccaaggtaagattagctgccatttttgttgaaagatccaagacaatagagtgtctttctaatcttgactcatgagacatcaagagagcctaaacttcttcagtgaaagagtttcactttgagaagtgataatggacacaacagaatcaaactcgggaccaagtccattaagcaggtgtaaaattagatcaaaatcagtaacaggatgtctagcaatggccaaagagtcacacacagatttgatcttgtcaacataatcagaaatggacaagttacttttctatacacaagctctgtttagattactacactaagaaaaattgactagcaactcatgaaggaacaccatacacaatgggataccaaagtgagtaggatgtaccagaaaatgtgaaaaacgtaatagtcttgtctcccattgaaaatgtgaaatctagaagacaaaaaaaaaaggatggaagctggctgaaaaaaaaaaaataacaacaaatgcaacaaatgtggggagctaaggcacaacaagataacatgcaggagaagacatcaaaaataaaaagaaccaaaataactaaaaaacaacagtggaacaacgaaggaaaactgaacatatattggagcatatgatactaaagaaaagaacttacatacaaattttattatttttttattactattaaaaattgatgttactgttctgtttacatactttatatgacttttagactatttagaaaacatgataaagaaatgtaagaaaacaacagtaaaataatcttaaaacactcattaacaaaaatataaatatacatatttaatcctaaataatcaaacatataaaaaaacaaataagacactaaacattgaacaataagaaaacccaaacacagatatctacaaataaaaataaaggaaataaaaactctaaaagaacacaaaaataaccaaattaccttatgaattttgggcatctccaaatattcatcctcatggtcaaagttcgagttagaatcttccaatagaggtcgaggatgtttgaatttcttcttcttcgttgattcaccaactgattttcgtttggtagcaaaaagtgaagtagggctaagagaattgtttttgaaattcctctttcccaaggctgatcgaggtcatattttctaaggtattttgtgggttttttgacaatcgggaaagaagaatttgaatgggtaacagtcattgaagagaaaggagaaatgtatttataggacaaaacaacaacaaatgatgggaaaaatgtagagggaaaatagagtttgaaaaaaaaaactgaacaaaagtggagaataactaactaggaaaccgttcctaaccacaggggcccgccctgcgaggccagagtgggctccgcggtcaggttagcccctataatttaaacatgtgtgaatttttaaatacaaaatataagaaaagaaaaaagaaaaaatgaagaagaagatgaacaagacttagattggtaaattagaatgaaaaaataaagaaaaaaaaaaactaatataacaatctatatctatatattaatataaaagaaaacacataagaggtgtaggtgactttctataagtttttctttatattttttataatattttgagagtaccatgttaatatattaagaaaatatattattgaactaagcttactttttacgttgtttaaaaagtatagtgagacattacataggggtgttcatccgatccaatccgtacttttttggtcaaacaacatctaatccgcactaagtgcggatttcatattttggatccaat

SEQ ID NO: 113792 - DNA, 1986 bp, Cannabis sativa
actgtagcgtgccttagcattagggcgttacattggattccaactctttcacaaacattccattgccgggttgccatagagaagcaattgtgttttgcattgagtcaaaatcaatgatccttgtagttaagaaccttccaacgagacaccaacgatcattaataggttggccaatatcctctgcaatatcatacagcagttccccttcttcctcctcctccagttgtatgttgtcatactgctcattcaaattggcattttgttgactactggaagccatggtcaattgtaggctagaaatcacacgaacaagaaaagcatacacaacactgaatcacaacagcatactcatgttaaaagacaagacattttattgtttcgcattacaaaattttttggaatgggtatagcattagataagtataatattgttctctttatctttttattaattataagtaataaactaaaactaaaagggtttgtctctaatctttgttcctttgctaatatatcacttcggctttatttttggctctctagcactacttctttattattattattattattattttcatgtttaatttatattgttgttctccaagttgtcgtttcaacataattatcgtttttaaatttatattgtcgttttagcttattatgcgtacaactacactgcactaagaaaggaaaaagtaaaaaagaagtcagaaaacaaaagaaaagttagacaaacggagctgcttctgattctgatgatgctgtcattgctgtgtatattgaaacaaatttagcgataaaagtaaactagcttgccaatctagtagacagttcaacaaaaaaaaaaaatcattgtaaaatgagcatcttaatttgatggtaactgaagaaaaaaaaaagtggtgtaatttgaatgatattcaattataacacattatgattaagcattatcccaatggtagctcattaccatgctaaaatgaaaaagatttggttaaacggtaaaaccatctcagaatgtgtgtagaatgacacaacaaagggatttgttttagcccaattaaagggaattcaattcaattcaaaaaaaaaaaaaaaaaaaaaatcaaagcaaaagctgggttaatagcaaccctgcttttgaacacagaaagtagtaattggataagggcataaataccattcttggttcttttttttttaccaagtgagaggtgttttcatctcctcccttctttttgggctggaattttatctacataaatagatagatagaacctaccactccaccgccctatcctttgctagttgcctcgacaaaaccaaactaatacatcaatttggcaccatggttttaaatacacaccaatcaccgatcaacaatattactattcctttatatattctaatcttcatatattgggtttcatctccatctatgatctattatctattacatgaaatggttaataatagagaaagatacctccacaaattgattgatttctccataccttcgcactaggcaactacaagacaataacaatatttgtttttagtaaagaccaatggaacacccaacaactcaccccacatcttttatatacgagctcaaaatattaatccttccatttccatatgcaatttgatatttttgttataattatctgaacttgctatagcggccttatcttgaaatagaacaatgataattttctaaaatttgaaactctgcactgtgaccttaggcacatactagtacataatatagatatggattgcactattacaactttatatatgaattatataagcttgtaatgtttgaagcccaaaataaatcataatagaaagtattatatgtttctaatttagagtagtggctagtactttttttaggttcgtatgttataacttttaagtagtgttaaatattaacaatactcattagggtgttcacaaagtatccgatccaatccaatc

SEQ ID NO: 113793 - DNA, 2121 bp, Cannabis sativa
ttaaattatctcacactataatatgtatataaatataaaaatttaattataaacatattattttatttttttttaaaaaaatttagtgtagtctgtagtgttctactaaaaatagtgggacattatagactcccacatatataagataacatttagtgttctattgaagtaagtttgtgtttaaactccactatttttatttaggattttagtataatgttattatttttgtcgagaatagtgttaatattataatttgacctttgtagataagatttttgttcttcttttgtttctttgtaacatatattatcctaggaccactcaattactagaatcatctttaatcatcatgttaatatataaattatttattaatgatgtcaatctatttatcctcgtcctatattaacataaacacattacaatttacaaaaatagtgtataattttttttttttgaaagaaagcatgttattcaaaaaaatagtgtataatttaaagtacatatatcaattatcattaccctttttattttatatcatatctaattaatcaaaacatattaatgcttgttcctatagtatgagtaatgatacatatgcatatataaataaaacttattttaaataaagataattaattaaagttaagtgtatcaaatttgtttgcctgtgaattatgtgtgaggtatcatgacatatattattcatgtttttctttagttcaacttttagaattgtatggtattgtcattggtttaaaaagtaggtaaatacatgtgataagaagattcgtcctttgatctttacctttatcattattattttcttttcgctattttcgaaagtcatgacgcaccaatattgttatatgtggattctttttcatttctatagactataggtaaggatcgaggaggaatcttcagttaattatagactatactttagaggcgatccaaagataaaaagtgttagggttaactttctattataattttttaattaatttttgtatttaaaaatatatgttagaatattttttttaattttttttttttcatggtggtatttgttatatttacaatatcatttgtgtaaattttaattttttttttgaatagtttacgtaacgaaaatacgtttgaagttttttgaaatcgagtggtaaactggaatatcagaaactctatttattgcgtcattgttaattattcaaaatttttaaaaatttacaggaatgatactgtaactataaccaatattattatgaaaaaaattaaaaaaaaatatttcgacatgtaatttcaaacgcgaaaattaactaagaagttataataaaagattgtaattagcacgttcttatatatttttattttttttcttttcataatatatacaaaaaaattaaaattaattatgtaaaagaaaagagtaaattacgacacaaatatttaagtttaactcccggttgtaaataaatattcaaatttaatttttggaggtaataatacttaagttatatttctggaactttgtaggtacctagttgttaaatattaaataaattgccacgtggcaatccctgattggtcaaagtcataaatttttaatttttttacaaaataatttatatgtatcaataagaaaatgatacgtggataatgatttgaaatttaacgttcaggtatctacaaagtttcagaaatataatttaagtattattgccgccaaaaattatacttaagtatttatttacaactgaaaactaaatttaaatttctctaaagaaaataaatatcggttcattttaaatatatataattatatatatatataaatatatatatattgtattgtttgaatattttattcctacttgaatgaaatcctggtccgccttcgaattatgcatgaatattactattttcttttctttaacctttcttgtctagtaacgtagggctagagctacagttggtagtgagaggtaggggtgagtatcatcaaatccaatccaattgtaccgaaacgatccaatccaatccaattacaaaaagttggatatccaattacaattggattggattggatgttaaaagttggattctaattggatt

SEQ ID NO: 113794 - DNA, 5352 bp, Cannabis sativa
agtactcaatatttgtaaaactgtaatttttctctaattttgtcagtaccgactctgatattgtcttaaacagggcacatataaggcctaaatttttgattatcggatctagatagaaatatatagtatcagttacttccaaattttcttttaataaattcaaaatagagtttgtactgacaaaattggaagaaaattacagttttacaaacattgggtacttatgccactaaaaataaacatcgggtttatgccgcttacaaacataaaactttgagtacttatgccgctatctacccatatatatatatgttgaagaatcacagtcaaaatgatctgacaattgatcaatattgtgtcattattaattatgctttcgggtgaccaataaagctaagaaaataataattcaataatatttgtagaatgaaattcttaatgggaccttctagcagctagctctatcttttctatgtcaaagtcaaccaacttgatagattttcaatttttatttgtcactaaactcacacacaactccaatttgcatgtgaatatgtgtcgtctacaatgcacttaaagaaatatattttattaattatatttatacattcatatttttaataagaggattgttagaatgtattaatatttttttaaatgtcatattattattggtgtaattaagtattaagttttatataacttagaaaaattatttgtacgaaatattgctaactaatcgtaagatactacctatagaaagtactagacatcactcatgcttaataataatactcttttaataattaaaagaaagaatatgatatcattattagactaaaattttgatcatacttgtttttatatggtaatgatatattaaaatataattaaaggatttttccattttaacacttcaaagcatattttttttttttgtatttttacggaaatccatatagcaacccacgtaacaatcaatgggtaatttaaatcacaactaaaatccacataacaactcacataaaaattaccaggcaacccaaaccgtaataaaaaaatgttaaaaaataatatatagagtaattcctctataattaatcaatattttttttttaaatgaaagatgtgactttattaaatcaattcttgagcaattacatcagaaatattactcggaataaaggtatccgagtaactacaatcagtatataaccatgagactcaggctaagccatgagctacacaattagcagatcgtttaacaaaacataaactaatattgttcaaacaaaaaaaaaagcctcctgcattcttgtatgcaactgccaaacagagagttcataaccaccgagcttcgaatagcttgaacaatgatgatgatgtccgtttcaacaacaacattcaagatattcgaactctttatccaactgagaacctccttcactcctagtgcctcggcaagccctggatcaacacagtcggtccatgaactggttcgagcttgaaggacttgacctcttgcatcacgaagcacccaaccatacccaagtctatttttatctgcaaacgttgccacatccacattgatcttataaaaatctactattggagcacaccattgctcataactaaactgagaatggggatggtgaaaaagtattttcttgagcaaacaaccattgttcaagatcacctttagcaaatgagacaacatttttgacaaatttattaaccccattccatattttattgttcctatcttgccaaattgcccaacaaagcatagaacccaattgtttatcctccttgttccatctatgaaatttccttcgaaaccagttaccaaaggaagaacctccaatttcccacccccccaatacagacctgcaatgtacaattgatccagcctctcgattacatctggggcaaaaggaagtaccttaacatgtctctgtataagttgaacacgagttggtagacagttagataaggctctccatagcatttcctttacctttggtgggatcttcaaatttcgtaactctctccaaaaactagaattgctaggcaaaacattagaggtctccaaatcttgaattagattataggaagatttaactgagtacctgcctaaagattccttgccccaataccagttatcacacaaatttgaagaggagataggaatgtttaagatcaagtctctgtcacgattgttaaacaaattagatattacctcaagatcccaatttttgtcatccacaaccataagatagttcaccttttgctcagataaacttgggtgagaggatgtaatataaggattgtcagatgtcagggagccaagggtctctagtaatagaaatattttcaccagatcccactaacaaccggccatctttagcttagaaaatgctcctccaaatataacttggattgcttcccaactcagattcaataaaagagccttgaggatagtacctagcttggaacaatttaccaaccagagaatctttgagagtgtgaagtctccatgcttgtttaccaagaagagagatatcaaaatcatgcaaatgtcgaaagcccataccaccttactcttttggagcacacatacgatcccaattcatccaatgtatgccagtaccaccttttgaagaagacttccaccaaaatttgcacatcatcttctcaagctcatcacaaataccctttgggattaagaagatgctcatagcataatttggaagagactgggcaactgatttaagaagaacttctttccccgctcgagataaaaattttccatcccaactctcgactcttttcctcatcttctctttaagaaaacccaacaccacatttttattgtgcttcatgatattgggaagacctaaataaaaggcatcgtctccagcctccaccatacccaaaatagagcaaattctaccctaaacatctacagaagtattttgctaaaaaaatatggaagacttttgaagattaactttttgaccagaggcccgctcgaaactcaaaaaagggccaaaattctctcagcttccacctccagggcccgacaatacagatagctatcatccgcaaagaacatatgagatactagaggagcaccacaagcaacttgacaccatttaatccaacctttatttccatatcttcgaatgagggttgaaagacctactgcacacaggataaataggtaaggggacaaaggatcgccttgacgaattccacgagatggagttatagggcccaataagtgctcacccaaagtaatctagtaccgaatggactccactaaggccataaccagtttcacccatctagtatcaaaacccattttaagtaaaagagcttccaagaaggaccattcaacacggtcgtaagccttgctcatgtcaagcttcaatgccatttgactaaaatttcctctattttttcttttgagatagtgcataatctcaaaaaacgccataatgttatctgtaataagccttcctagaacaaaagcgctgagactcagaaataattccatccaacaaaccatttagcttattagccatcacctttgaagtaaccttataagcaacattacataaggctattgggcgtagatcacccacatattcagggttctttttcttaggaacaagcactaagttagtgttgtttagctcatctgaaagagtagcagaactaaaaaaattccttactaagctcacgacattagaccccacaatggaccaacatctttagaaaaatcctagagtcataccatttggactaggagatttatgtggatgcatctggaaaagagcatttctcacttcctcagtagaaataggagccaatagatcaaaattcatgtcttgagaaatagaggggataatatcatcagtaatatcatgcctaagaactccagaagcagtaaataactcagtatagaatcgaaccatatggtccgacaatcctgagtcccaatcaagccaaaccccatggtcatcctttaacttatggatcgtgttgcgacatttacaagccctagcagaagcatgaaaatacttgttattcttatttacagaacacattttttttatttttaaaattaaaaaataaaagtggttatagaacacatttttgtttttcagaaataaattttttttaaaaaaattcttttatttttgtgattaaaaaaatttaaaaataaagtattaccaaatgccaccttagctaatgagaactttccagttggtaaggtattcaaagctagatactattcttatagattttcaaacaacctctttgggatcaaatcaaagtttcatatagaggagttcgtgggaagctcaattcttagttgaggcatgtatgaggcggtcaattggtacaggggaacaagtaaatatattggttgaacatggctccctaatcaagtgcatccctttgtcacttcttctcacccatcccttcaaaataattttgtaaaaagtttgttgaaaatagatataagagattgggatatggagttaatttcggatctcttttctgctagagaaaaagacttgattatcaccattcaattgagtgactctattgtatgtgatgattgatattggaaagaggaaacttcaggtttatatacggtcaaaagtacttagaggcttctgcagcagttgaatgggttaaggacttcgaatgtaaactctgatttgtggagaaagttttggcaattaaaaatcccatcaaaaagtgtgctattactcattgttttccttcatgtgtatagctaaaatccaaacatgttaatattttcaccaattgtcctatgtgtgagtagctaccataatcaatttttcacctattggtgggttgttctttggctagatcatgctgaaatagatctacactggtcattagaagctgttttgaggtgagctttcaaattggtggtttcaattgatgaaaagattaagtgtggagcatattgaagaggcttgtacggtgtcctgggccatttgaaatgtaacaagaaaatttgatatggaatgacaaagttacagctgctgcgactgttgtgacctcgacgggagtggttcttgatcaatagaaatatgctaaaaaatgtaagttttcattgctgttagatcatgttaattctaatggtggtcatgagcattggagaaagctttttttgaacttgatcatgattaatgtaaatggtgtattatttataacaatattttttatttaaggaaatatatttctatttaaagaaataaatttctatttaaggaaataaataaataattgattttctgataaatgaat

SEQ ID NO: 113795 - DNA, 2621 bp, Cannabis sativa
ctgtgatgttaaggtggggttggatgctatgtgtactgctattgttgtaagggatcatcttggcaaggtgatttgggtcatacttctaaattggattttgcaaacgcgttgtgtggtgaagcgacaacttgctgcacacgctagaagttgcgaagacttatggctttaattttattattgttgagaatgattcgagagtagttatcaacgctcttaactggactgagtccaggtgggagcttgagaactatgtctcattttgtattagatcctctcccttttttattacttgtattttctctaatattagtatgaattgtaattttgatgcccataatgtggctaagtggacgtttacccaccagaagtttggatgtattcctattccctcgatccctaaacaccttgtaatgatcgcgaggtctagttatcgctttatctaatatatggacgcttttcttcataaaaaaaacaagggaatttttattaatgacatgattattacatgatgaagagactgttgaaacaatctcattattacatgatgaagagactgttgaaatagtctcattattacaatcagaattacaagcatgagagcaacatgaactagaatccttagttgctaggtgacactcaagctgaactggagcaggtggggcaattgatttggtcagcacatagagcccatttttaaccctccctttgagcaagactctccctgttatcttgtcctttacaaaacagcaagtagagtgaaattctaagaaaacttaattatctttagtaagttgagacgcactaacaagattttttgttaattttagaactttgatgacagaatttgattgaacatgagtagaagtggagggtaaagaaagattaccaatgtgagtaatgtggagtttcttgtcatcgcctattgcaagagactcattcccatggtaaggcatttcgaaatcaagatgctccattcatgttgctacatgtttgttagcacaagtatcatcataccagtctagatcattagcaaagtatgtgatcatttgggagttgtatggagatggatcttcctcatcaatatctgtcaagaaagcatgtgattttccaattttgggggtaacaaatgatttatcaaatcgatagtggcacactactgctgtgtggccactcttgaaacagacttggcacaaaagttttgaagcgagtgcttcacggccagagtacctaccagaagatcgagggatttgtcattgaccatagccacggccattatagccagaggatcttgaagacgagtacgagccaggactagatcttgaagagcttgtggagatgttggccatcaactttgaggaggtattactgacagtataatgtcgttctaaacgactttcatgggttaaaagcaatgattgaatggattcaaaggagagatcatcgataagactcgtcacatgaacaataacagggtcatattctggtccaaggtcgttgagaagatgcatgatcaaatcgctctcatacataggatgtcttgctgtggataaagaatcatcaagaatcttaactttgtcatagtagtcggtgatagaaagattacctttctaaatcgtggagagttgagatttgatttgcaagattctggcctttgattgagatccaaatcgttgttctaatgctttccatgccatgtaagacgtgttgtagtgaaccaaagattgcataacagtttcagacattgatgaacgaagccagctgagtaagagttagtcctttcttttccaagtgacaaattctagattgatgtcgtcgttgacgagttgagccggtggagctactctggtgagtaagatatcattcagactgtgtccaattactgttggaatcacttgagatttctaggccaagaagtttgattgatcaagtttgacaacaagcaaaaaattgagagagatttgaaagggattccgtgattgttgttgaacaattggaggtggttgaggaacaagttgaggtggttgctcgcgagttggagcagtggtgcgcggtagattttcaatgcttggaggatccatagataactttcgtcactggctttctaataccaagtaagaacttatcaatataaactgtaatagagtatgttgaatgcaacaatctcatcaatctataaaattacagactaaaacagagaagacctttatttataaagaagagattacatggagaacaaagtagaaagttagttaactcagctagagaatgaaaacaaactaactaatattttaacagtcaataactgtattagaaaagataatataatatataaaatttatgaggtattttttttttgccaattaattttgagatgcaatcccccatgcatcttaatgacacactaaacaaatagcttgcagggtgagtataagagcatctccaatagtaaaactttagagaatgctggtgagatgaacatattatgtggtgaaatattgagatattataccattagagagaaaagaatgtcattctagaaatttgcatggatgtcagttatgttgtagcattgatgctattcattattttttgataaaaaattgaagttaaaaagttattgt

SEQ ID NO: 113796 - DNA, 2161 bp, Cannabis sativa
cagaatgaaaatgccaagatgctgttaacaatgaccaaattacacaatcatatccctccctaatatgaagtgaattaaagtagaatgaactcaagaaaagtgacacacaaagaaataaagaaaggatattctttgtaatgatagagtcagacattgcctggaatcttgtttgctgtaagcacaaacaatgtcagcttcttataccatattcaccacagcagtataagtaattataataacaaaacctcacttatacaaacaactcaccatctgctgaagaagattttgtacctgaagaaaacaaagaagaaaaaaagttcaggcaaaagttgtgctttaaccactttcataataaactattgtatcacagagaaaggtagacaaactataaacatctatgaacaagaaaactgcagtttgcagcctatacttagtgtttagtcagtacgataacaataacacaaaaacaatgtaaatctgtgaaatgcagaaaccagaaatggtatacaaacccaaagacattgaaattcatttaattttattcacttcattgattcatttgctggtctctacattcataccgagagtaccatcctaaaatattcaaaaaaatccacaaactttgtcatctctaatctatacaaaatgcagctactgcaagtaaggatctaataactggaaacttagatctaatacataatatccatacaacaacatattgttcagataaatagttagccagaaactcacaaatgctgtcatgtcagcagtgctctgctttgattcatccgcatcatgtccatcctgccaaaagtgccacaagtaacataatcattagcatgtgattaatactgtcagctcaaggtacatgaagggttgctcatggagtcactcatttgcagttttatcaattcaagtacgtttaattgactcatacatactattggtcttaataaggaaaaaccaaaaaaaaaaacgcaattatagctgcaatcacaaggaaaaggaatagcttcttctgaccaatactttcctgactagttatcaaaaatttccaagtagtattatagtaacacagaactttggaggaaaggagctaagactgaaaagctcataagataagaagcctagcaccgttcatcgtattgctattggtacaatttaagtatgggttccacaagatttaataataataatttttatagaatgtcgttaagcattcattcctcgcacactggtttgaaccctttaactcattattcatgctctgctataataaatctcatgctctaaaattattcatgaaaacaaaagcctcaaattttagtttgaacccattaactcattcatcccgagctctaaaaagatggattaaatactaaaatgagaggacgagcaatgcatatttacaaatataatttttttaaaaaataagaataagaaacaagcaatcatacaaaagaaaatgaaatacccaaatgtgatcaaacaaattaaacgcagttacagatccaaattgggtaattttcctacgccgattcaaattatcaatcatgtatatttcttacaaacatatataaatcaattagaacaaaattcaaggagaaaagagaaaagcaattaccatgttggagtgtgttcttctctgttggttagggcttggaaactggtttgtggcgatatgcagtggtggtgtaaagagaagaggctcagcaaatttcaaatgtcgtaccaatagaaaagctgttcaggtatgaaattacgatattgtcccggtcagtggtagcttttttttttttactatggaagttaattattattctaggtgttaaatatggaaggaatataagataacattgcgataagttcgtgcgtgccgtgatctatatttaattgtattgtttaaaaagtaaatgtgttgtgttgtgatattaaaaaatatgagtcatgtctcgtactaatatttttaaagggtagatctggtactatctcgatattttcgtattgtgttcgaatttgtattgttttttgcttgtgacaacccgtatttctttaaacagaccagcgtgttttcatatcaagacttaaatttttgctttacttttttatattttttttttataattactaaattatgtatatattttaaaattttaattat

SEQ ID NO: 113797 - DNA, 1275 bp, Cannabis sativa
tgttaaagcgtgtagcccaatatagttgtgcgcttctactaggatctacataatacaaaccacaaataattgatcatgtatctttaattgaggaggatgaataatctgatttcctttcaaactaattaaatgaatgaaacaaaatatagattgagggctgctcataaatttgagtatattgcttgatagtgaatatgtgtaacacaatttggatagggaacaaattaagagaacaggggaagcagaggaggttagtatcgccacatgtgatagatagacaaagggaaaccaaccgaagatgaaggtatccaagcttctgttaggcataaactcataaactagtaacttctcttcttcttcaatgcagcaacctaagagctttacaagatttctgtgttgaagtttagagatcaaaatcatctcatttttaagctcttctatgccttgtcccgagctactagacagtcttttgactgctatgtcccttccatcttgtaatcttccctgcaaattgatcaacctcactttcttttacttggtattcagacttaattagttaatttgtttaaaacaaggtgcactaactatttcatatgttaaaaacataaagtaatcaccttgtacacagaaccaaaccctccttgtccgagtttgtttctgatgttgaaatggtttgtagcaactaagacgctatccaattcaaaaatacacaactcggatggatcttgttgtttggcaccttgaagattgtgtgttggagactcaattatatcagccaaaccaagtttctttaggatctccttgatgggccatgccatttcagctttaaaatttggagttatattaagagatcaaataaattttgacagaactacaagaaacaaaattgaaatttacactgaagatttatcattttacttacttctggggctagttctccatctatgaaatatgaaaacagcagcaagaagaagggtaccaacaaaactaactgtgaggatgatgacaatcttcctggttttctctcctttggctgcataacaaaatgtatatggatcatatgtgttggaataaagaagaaaaagatggtacttaattaaattcattaaaatcaacacaatcctcaccaagttcagcttgtgcaaggcgaacaaaaagatctgccccgccataggaaaagctctcaatgtcaataagatcttctgaccaaaccaaacaccctattccatttacataagcataagctacgcaagaacaattattcaggcaccatgt

SEQ ID NO: 113798 - DNA, 4473 bp, Cannabis sativa
tatttatgctgacgtggcaatcggtatttgtgcaaataattttcttaaaggtatttttataaataaaattaattttaggtataatattgaaaagacccctatatattatataagttacataataataataataaaaccttgaggaagtaatgataatatgtaattaaagataaggaaaatcttgaaacaagacaaaggctgtactgtcaagactgctaattttgttccatttgtctgctgaatgaacgtgaaagaatagacaatgtaggcacttgaagacacccactctttactgctttaacttctaacttctaacttcacacccaatcacgtgtccctttttcacactacaatatcaattatatttacatttacataaatatataatttaaggttttcaagtacttgacacacatatatatatatatatatataacttaaaaagtagcagtagttgtagttatatccatcatccatggaagaagaaactgcagcctcatcatcatcatctcattctcgacctttagccgttgagagtttctccgatagttggttatctaacgtaatagtcccttctatagtaaagagccttgaatttgatgagagtttcgatttcaattctccaataaatattattgccccatccccaaaatttgttcatgccgatgaaatcttttctaatggccttatcaaatccaatactacgaatacttctcccagagattcagctactgtcgtttcttcgagaagtagtgagtataatattaatattaacattgatgatgatgatgttcaaatgggttgctcttattattactgctgctgcttcttccgaagaaggagaagtaataagtctaagtcatcatcatcgtcgtcgacagagcaaataatgtggttgagaaaggtgtatgaatatctgagaccaacgacacgtcgtttagtagtagtgggctccaaggttgatgatgtagatagaagaatactggaagttaggaggtggagcaattttattcatcaaacatctccacctccaacctctgacacctcaattcatgaagctattcttcattgcaaaagatcaataggtatatactagttactcctataattataacaccgtcttgtactcgttaattcagatcatattaataatattacatggtatatttttcaggaaaatgatcaaatcaatgtatcaaaaactgaggaggtcgtctcgattaattcatatgatgataaacaaaagatagaaaaataaaagatttgctctgtgtaatgtgtatgtatgtatgtacgatttcatttgtcggctcctccttggcttggctgtactcttatacatacatatatttaactttaattaattaattattttttaaaatatattgtatagctgttataaatccggcactaaactgtgggattattttattttctaaaataattacgcgcgtatataatataataatatattataaatatatatgctatgcatgtgtctatagtgtctcttcttcttgtaattaactgattacgtatataagataaaacggtattaaacgtgtgttaattatgtgatatagactattgaattaaaatattgcgtatatataatatgtacacagtctctgtctgagtctgttaaaatattgaattaaaaagtatatataatgtgtatatttgtgatttaattatgggagcacgctttgcttaaattatcaaaattgtacgtcttcaataaattttgtcatgagatatattattatgctagcttggaaagatatggaatcatatcatgttttgtgcttttctaaattaatagaggtagtaactgagtgtgttttctttaaatactgtcaagaaatatggggcataaagcataatgagtgaaattttttatattcttatatataatttaatatttttacatttaattcgattcatgagggacaatattctttaataaatatggatttagtaacctatattttgaaatcatctttatttgtattctgaattcaaatttgattaataacataggtatttccaactaaaagttatagaatatactttctctttctaagatgtgaatttgattccattatcagtattctatactactttaggaaaaatcagcttattaatttgtcatatgttcattcaatttcaaacaattcaaaatattctacatagacttataataaagaccatcccattctctttgacatctggtaccattgttccgcttcttgtggcctagttttaaaaataggtgacaaaaagttggagcataattttttttcttttttaatgacaataagaatagtttattaatagaaagaaattagtagtgatggaagacaaacagatgttattgagataataataaactgataagagattcttctatatctccaatcaatttgtcagaccaagaaggaaaaatcccaaatgaaactttggtaacatttatttgaggccaggttgagatgtttgggtagagaaatcagtgtcaaccgaggggaccaattaatatccatgctgatcattctcacataccacattattattgtcattaacatgtctccgctaccagccactccattctttgttctttagtagagcaacatggccattataattgctgttttttgaaacacaaaatgatgactactatatatgccctatagctaattcatttcaaaatcaaaacagcaatattgtcaagttacatatattgatctgttcattctaataacgtcacgagggacacagtatgacccaaatgatgtaacatatcagattgaatcatttaatttgtttctaaacaagatcgtgtttagtttataaccatttttaattattttacatcttgcaaactaactaaattatatggattaattaattaattggctagctgttctattctatctaattaaagaagattattggtagctagataggaatctagctagccaagatcagctagttagcgaaatatatatatagttggttccaatataatcatggcccaatatcttatgagagatatcaattaatggaccagctaagcattaattatcaaactaaactattgggatttttatttatttattttttctaacaactaatgggataattttatttactaattaactaaatttcttcaaatgattttcaaatcgattattaaatttccggtagttcatcacgtgtttttttgaaaagcatgcatgatttttctttttatcccatgttaatagcaaaactaatatcgagtatataaatatatgtatgtgtgtactatattaatatacattatataagttataaggaattaaattagttttattcttttggattaaatattctagttactaattatccatcaactgaagatagttatgtattcaaattaaataagaacacaaagaaatagaaacttagagcataaaaatatacgtggcttttacagccagaccagcccaaacaaacaaaaaaacatgagtggggaccaacgacattgcagggcaagaatgttctcatttggttgctaaatttgtttttaattgtatgaacagaacagccagaaatttgaaaacttgattgaatgaaagagaagttacttgggagtttttgataatatttaggatgagatttctgtgatcaaaattcaaactaattagaaggcaataataatatatatagtaccgatcgactagtaatctaaggcatcaatgggttcctctttctctctaacctgagcaactgactcaaatggagacacatatatacgtacatatgcaaaaccaagacaaaagtataatacaaaaggcaactcatttcactttatatctttattattagttgtacttcttctccatcttcaaaaagttattatcagccaattataataaatatactaacactaagtcattatcattaattttttattagtatgtaataattacaatctcttttcaaatttagtcaacttttacgtctaaaattacatcttgaaataattcccgatgacttttgcttgatctatcggcaaactattcacatctagggcattcgtcataggtgtgaggacccccacagagctcacaagtaacttgagcctgttttgcttgaacaaccatcagctttgtcagggcctctacttggactgttaatttggtgatgccgtctatctcatgcataccagctacctagctccttcttcgtttggcctctttcaattggtcattgttgattattcatagccatttcttctagcaaatcataggccttgttttgcactttttcccataaatgccccaccagctgcgacatctataatcgttctggtgttaccaatcaacctgttgtacaagttatgaaccaacatccacttttcaatcccatgatatggacatttcctgattagatccttgaacctctcccaagcctcatggagagattcattgt

SEQ ID NO: 113799 - DNA, 1269 bp, Cannabis sativa
  modified_base (70)..(82): a, c, t, g, unknown or other
attttagaaaatacagggtccattctgtcatttaacaaaacacaaggtctaatctgtaacttttgcaaannnnnnnnnnnnnaatagtatttaccctaaaaaaaacaaaaaactttgaacgtgaaaatataaaatttttataaaaattagtgttttatgtaattatctaattagaaagacataattttagcaacattctaattctactctgtagaatccttatataattattttttatttgtattgagcttctaatctttattttatagttttcacaatagaatctgagatggttgtcgtctcttagtagaatatttttctttttaaaaagggtgatacttatttaatttggtactcgagttttatcgaaacataaattttataccttatatttctaataataattatttaatatcttataatttaaaataatgcatacatattatggtgattaatatgaatgttattccgaaaattaccccatagtgtggcacgaaacaagatgagacgatatataattatgcaagaggccgaccacccaaagggccttgggctgaataactgaagaagcaaaatatcgatcatagcatctaccgaaagggtcgcggtcgcttggagagaatatataatcaaatattctcgatcagcttagaggatgctcccatggtggcatgcccgaccaacaatgtcgccaagatggaaaccaaattcgccttaattgctcaatctttgaagacttagtcattttggatgcctaaaaatagtgggattgagaaaatagtggggttgagagaatcaagaggattgagaaaatcgtggtattgactcaattaacctttattatttattctataattaattcacttgtggccctataaaaagtgggtcattctcactattcagggggaattcaaattctttcagagagcgattacgctccacaatattatctgtaatttctaaataagaatattaagaaactcacttgatgaggttcttgatatttcttagtgaaatacatgataaggggagtaggtcattaccaatatcaggggtcgaacatttataaatttcgtatattgtttattgctttcgattattattatctatcaaatatttaaagtgttattttattgagtccgcgttgttggccagaaacaagatcattgttaaaaaaataaacctccacttacactgatattaagaccaaatacaaccagatacaaaggacagaaaaggaaatacatacaaaatccctaagttggcctt

SEQ ID NO: 113800 - DNA, 5830 bp, Cannabis sativa
  modified_base (5771)..(5799): a, c, t, g, unknown or other
aaaaaaaaaaaaaaaaaactggggtgagaaattattcaaagataacatatgctattaacatattttgaatacaattgaaatttcttggccaccaaatgacactactacttgccgaccaagcaagtttggccaaagtataagcaacaccattacaaggtctaggacaatggacaattctaacagcatagatcttattacaaagcttagcaatatcatataatacaagacccgaaaaagtaatgatagaaacattgtttttaatttcaagcatacatttagacaatcagactcaacaacgatgttgtcatacccaaaggagagacattgagtcaaagcatttcggatagccaaaactttagcaacgtcaggatcataaaaaccttccacataccaaatagtcaaagctttagccacacccaaaacatcacgaatcaccatactcagatcactgtaatgattagacgaattaagagcaacatttgtattaactttcaaaaaactaagagggggaggaacccatttgggcattggcagaatagtccctctccgttgtgacgggaaagtagtcaacacctgttgtttgttgtgaaagtttccaagatagtccttagcccaattaatgttgagttcaggagtcaactcaatattgttgtgaacttttctgttacgtcgaaactaaattcgccacaaaataaccaaaaccaattcaatcaactctttgggaagggaaccaacaaatctatgaataaagtcaagaaaatccacacaattgatccacaagtcacccaacaaaaacttacaaatcttcctacagtgaagcaaagaaagacagccccaaagggcatgatgagtagttttttcttccaccccacataagggacataaatcatcatataagagaccatgacgagccaagttaactttagtaggaatgcaattatgggatatttgccacactaaaagtcttaccatagagggaaggttaagggaccaaatcttctttcactacccaaaaaagccattaaacagtgaggcattattcaaagccaagttatgacgagccagccaatagccactcttgacagtaaaccatctagagttcacaaaattccaaataagtttgtctaaaatatcgttcgcggaccaaggaatagaggatagcctcaacttcattagccagaaaactagaccgagtaagctctttattccaaacacctgaagtgtcacgaagcaaagagacctttacaaacccatcaagtcggtgaggagttgacacaatatctggcggaactaaaggaatctagttgtcagagtaaattttgatgtccatacctttcccaacacgccaaaccatcactgtatcaaagagttcctttccccacaaaatattttttcgaagaaaataccctcactcggacttagtaatttcagcaaatgacctctttctgaagtacaaacatttagaacacgaccagccaaagagtttgggacattataaatgcaagaagcttgtttgccaaaaaaactcagttaaacaaatgaaggtctcgaaagcccataccaccatcttctgcatgcaaagtttctcccaggtataccaatgcctctttctttaacatcattatctctccactaaaagcaaacacacatacaatgaatatttttaacaaatactttcgaaagcttaaaaagattcatcgtataagtagggatagaatatctaaccaaaagtaacaatataattactacttaataattacatattagattagaataactatactctattttaaaatataatatatgttataaactttattatatctctttcatatcatttaaacaatatatttctataataatatacataatacatattaataagacaagaataaaatttattcaaaaaaataaacataagaataaaataatacttttgaagaaagaatatagcactctttaattggatctccaaaatacatcatgtaaaatggactataattttaccactttttttttttactttttcctttttcttttagaaaataactcctttcatgagaaatttacataaatataagaaaaataaagctaatgtagataaataaggtaagaaaacttaataggaaaaagtacaagagacaggcttcacttagggttatgttttgctagtacctacatagctcatacacctgtatttgacagccttcttaatatccatgctaatacaagagacagatttgcaactatgctcaaaaatataattatttctattaatcgaaatgttatagacaatagccaagcaaacaacattgagcaatttttcttgcaagtttttgaggggtttagaaaaccaatcataccagtccttggagttcttcggcagtctaatctccctaaccatttgctaacttcagccacaaccttcaaagtgttcgggcaatccatgaagatgtgagcatgagtctttgtcatctatacacactgaacaaagatcatctggaatcagcatgatcttgctaatgtggtctcttgtcaagagctgattattgatcgcttgccaaccaatgaatctatcttgctaatgtggtctcttgtcaagagctgattattgatcgcttgccaaccaatgaatctatgtttcaggatgcacatcttatgccaaattcggttagcataattaactttttgcatggggttagctgatatgtaaaacaaattggttttgaacttaccattcttaatagaattgaccatatctaacatgtcaatagtgtttctcagccgcaatagtttcttgaaataccagctcgcatcaagtttaaactcaacctgccaaaaatcttttccctttaagtaaataacatttatccacttaacccacaagttatcttgtttgctcgagatggcccaaacaaatttttccatcaaggttgtattccattttctcccctcacgaaagccaatgcctccatacttcttcagaaggcaaaatttttcccaagaggacaagtgcaacttgctacggttacctttagacccccagagaaagtccctccaacacttgtcaatagctgcagtgattttttgaggaagaataaacaagctcatccagaagttcctaattcctaatagaactaagtgaatcgattgtgcccttccaacaaaggacaagtttctactagccctgttgtgtagctttttgtgaatcttatcaataataactccacaattagaggcacgccacttagtcaacccaagttggacgcccaaatagttaagggggaagcttccctcttctatttgcatcatcctcaagattctttctttatgtatctcactcacaccaccaaaataagccagagacttattgttgttagctgtaaggcccgtagtttcactaaaagttttaaaagcttcatgaatatgcctgaccgatctttcatttcccttacaaaaaataatcaagtcatccgcaaagcaaagattcacaagttttaaggacttacatagagggtgaaacccaaatcctttcaagctggatctcagaatcagcagtctagtcacgtattccatggtcaacacaaagagaagcagggacattggatccccttggcgaagacctttctcccctttaaaggatccatgggtgtgaccattcatcattagggaataggaagcaccatgggggcaacgtgaaatccaatcaatgaacttggcagggaaacaaaggccctttaaaaggtcaaaaataaatctccaatcaacaacaagatcaatcttgaagatgctttgagctgagacattcttcctggtgtaccctataagaagatcttgaaagatcaagatattatgggccagctgcctattcttgataaaggctccatagttatcatgaatcaggttaggaagcacttctaagaaccgagcacagatcatcttagagatacacttgtagagggtattgcagtaggcgatcgacctataatcactcgcattcttagggttatcaatcttggggataagggagatcgtagtctcattgagttctgttggcaggtttcctaattgaaagtaaccaaaaatggcttgagaaacatcctcaccaatttcattccacaaccctttgaagaaacctgagccaaaaccatccggacccaagcttttggtggagtggatatcgaataacactttcttgacattagacttactgaaaggccgaatcaagcagatttgttgaggaatgtcaagcttggtctcaaaccccaggctttcctcatatatccttcttgtagctgagcttttctttcccataaatttacggaaattttgaagaaagtgatcaactactttgggatagtcctcaacaatagtgtcccccttccagtatgaaacaatcctattttctgcttttctcttcttcttgatggcatgggagtagcttgagttctcatcaccaaacctcaaccaattgatttttgagttctgatgtaaatagctatcatactattttcaagtagctagataactttgatgcacttctttctcattttgcataagaatagggcaagaaagattgccagcaagatgctcttgagctcttatgaacttctcttttgcctccatatacaaagttttagagattagagcctctagagtccttccatcctttaagcacaacctctttgaacccctttttaagcatccataaattacaaaatctgaacggtctgttaccatagttaccaacctcaataggtttaataaggcaataactatggtccgagatcgtcccccatctacagttggctttagtatttggaaattggtctatctaagcttcattagcaaagaccctatctagctttgagtatattctcactccctcatcatgtttattagaccaagtgaataatgccccaaaacttttcaactcatcaacctgacccatggcgagccagtcttgagcatcttgaattttagagtgtttgacttgtcttccaccacttttatccttataaaagaacatagcattgaagtcaccaataatgatctatggctctttcaaattgccaaggcctgccagtttgccccaaagatctttcctttcattaagagatctgccataaaccgccgtaacaaaaaactcgtctttgaatccaaccattttgatcttgcaatggacaagttgactatcttccataatcaccttcatttgaactagcttgtcgatccatatcaacattatgctataggacatattctgactagaaaagaaattccaattacacaagttcttcctcacatcatctattttatcatggctgattttggtctcaaagagagcaccaaaaccaactttattattcttgcaatgtcaatcaaatcaagctgcttctcttttttattcagccctctaacattccaccccaatacattgtaactatccatcattaaagagaattctgaatagtactaacaacctcttcctctaccttatttaacacctcatatctgttacttatgctggctttagtactcgaattttgcacactttttgagccttttttctaggagtaatccattgatttttgtcattgttcctgtctgaagtaaccccgctgctggtctctattttttcctcttcaatcatcttttgtatcactttaacctcattcaatgtccctgtagagtttgcatcaatattgtgctattgatcatcaccattctactgattttcctactgcaaaatgttggaaatttattttacnnnnnnnnnnnnnnnnnnnnnnnnnnnnnttattaacatcctaaataagaactttctaaa

SEQ ID NO: 113801 - DNA, 1534 bp, Cannabis sativa
taagttgaaggattttttagaaaaaaaatggatgtacttgttatcgattgattagcttgaggtctcatacttagttcatatatatatatttaaaagctgtagtttactaaaagttgcaatgtacacaaacattatacacatttagatgcattcattttacaaagctggtacggacatgtatatatttatatgaaatgattaaactcttatttatttttatatttgaaagattttcttaaataataatccatatgtattgtaataataaaatttaacatgtttaaaataaaatttaaataatttatttttatcttgtttttgccatattaaatttttataaattttgaaagatatcctgaagtgaggaaaatgttaattttgacaatatttatcgatatataatatgtgtatacataaaggagccctttacgggtgtctcctgttattaattaccagtacacctacctattattattagtctagctagtgagacctactgagagagtaattaatactttaattgattagaatattgtaaactaagattcacactaatttaggagtaaattactaaatattaatctatgatctatcaatttcttttagaaaaaatatatttacctggaatctaacatataatatgtacataatcatataatgaatgtctggtttatatattgatatggtaataaattagctcaaaattatattcccataaatatggcaataatttttttaaataatgaataggaattaattcatgacaaaacacataattaactgatgccatccctgcgatagctataattaataattatctaagaatggacaacacataataactaattaaatgatcttaatttgtataatacttttttaatagctcttctgtaattatatataattatgtggagacctagctatagctagttcttgctaattaagtagtatgataattaagtaattaatatctcgaaaaaagtaaatatacatgaaagaccgtgcaaattgagatcccatgctaattaacttatcatgaaaatgttgttattaaaggctaatctcgagagaaattaattcagttaatttggcaaagttaattaaacaagttttatcacttcaaatgttgttacaattagtacatacaatattgtgcaataatttattattatatttagcagaataatgaataataagtatttttaaatcagtaaaaagatatatagattgcttgaaattaaataattgtttaattggaattacaaacattatgtaaaggaaaaactgctcaattagaataagatatagttattagttaatgttctatcaaccaaaaaaaaaaaaaaactagcaaagatatctatttccattaataataattaagtaatgctctcgctaatcaattcatgtataatatatatacatgtatgcagtacttaatattcaaattctataaaatagtatgtataccataaagtataaattatatttttttttttattcaagcgtttatatattacatcatgtcttacct

SEQ ID NO: 113802 - DNA, 6922 bp, Cannabis sativa
  modified_base (4175)..(4183): a, c, t, g, unknown or other
acccgaaacccgccaacccgaaacccggtaaacccgcccgatgttcagccctactcaaaatcatgtcacagaaacaagactaattgcagtaacataattgaatcgcaatagcaaaacataatccagaccaaaccgcacctatgcctagaaaagacagcaggcttcaaaatttacctattacaaattatttatttgatctgttgacaattggactatgattaaaatcagatcattagatttgtcaacaaattaatcatagcaatttagattaaataaataatagttttctgtatgtaataacattcataggaagagtgggaatagtaaaagataagttaactaaggtcttctgcctgactctttattgtttgttatttaatgtactgtataacatttacttaaataactgaccgaagaaatttaagaacaaaaaacctaattttttaaattaatttaaaacttcataatatttatacttagagaagttctatttttttttaacttggcatttaagtgaaattagtattattatcatcaaaagaaaagaattggttctattgttacaaatatgtaaagagaataaagaagttcattgtgaaacaaaaggtaaaggagaaatacataatggctacacaatactaatttttttcccaaaggctgattacattcttccaaatctttgaatattcacttattactttctacattcaaagttgccaccacacttatccttaagagaagttgctttcattactaaccaataatattataaaccagaaacataaaaattttggggagtacaccaataaatagcaatcaaacaccaatatgttttcatgaaactaatactggataactaattcctccatgtaagtgatacaagcaacaacaaaatgtgacagattaagcatctttcgggggtggtcttttggagttattaattcgacgaaccttcaccatgacattttccaagtcctaaacaataaacaaagatgagcacaataagaattcattgtcaccaaacaactattcaagcaattagtaacaatgaaaattagcaagtaataataatgaattaacaaaggattttggctgacatgcttcttcgtagatcctagaaatagaattataattaagaaatcattgagttgttctccatagattagccaatgcaagttagcccagcgattcgctaacccctaagagacaagatggccctttcctcctttaaagcatttcacaactcatacaataggggcttagccaaaaacgtatacaaggaatggcactgaaagatatgatggaagtatatctttaactcaaccaataataaactgttaaatatctaaactcaaaatcatcaaagaggcccaagccatggataggtgacaaggattgggaagtattttgttctcattttcccttgaaaactttatcacaaaatcataataagaaatcaactttaaaacagtacaacacacaaaggaagtgaattcaaaattcaagcatcttaacttcactttaccaatagtttaaacatttataccaagtcagataaagtatgtactgttaggacagcacataaataaatataagaggagcatttcaacatttcattaaaaaatccacccaattttaccattggctcctgttcagacgtttctgatgtccaaagatcctccaaattgtagtactctctagcattctcatcaagagcatgtattattacttttcctacacaatgaataaaacaaccatcaataattataaagatagagtctggaactttcaccatatcaacagttgattacaaaaaccatagaaattctaaatttctaatatccaccaatcaccaaagaaatatttttggtatctcatgaagaccctgttggaaaaatcacaatataaatcaaaaactctgactgcaatggtgtgtacaaggccgtagctagttcaattggagttgttagcggtattctattgagtccaagaagggatcattatccatgagatacacaggtatttccatttgaacacttagcatcggcactagtattagttggatcaaatatggcacgagatgaggattcttgtaaaaatatacttcagtaaatctaattatttctctggtggagtagtttcatggcagtctagcaaagtattgcactttctatagcagaggcaaagttcaatgcagcaacggaagcttgtaaagaattgtcatggatgaagcatttcttgagagagcacgatttcattaaatagatatatgtctttcaattatcaatgttctattgaccttgctaagaacttaacattaaattcaaggctagaatacatcagatttgtgtatcattggataagggatactcttaacaagtttcttcaacttgagaaaattcacacagatgtaatcatgtcaaaagctttatcaagagaaaaactagaaattcgttgcttgatttccttgatgaggacccctccacctattcgaggaaggggagatttattgggttttcctttgggtggaagaggcagaaagtcccatttggttggttttgtctagcctatagatgaaaacattttagtaaatgcaaatgtttagggtttctttttagtggaagagctacttgctaatcagaaaagcaaaagagagagaaatttattatgcaaaattccactttgaacagttttcatcttgtgctccaactgagctgaaattttgtagataggtacacaaagtaaaggttattaaactcaaggatagagaacgactttggcttattggtttatgagttctaagttaggtccataaaatcaactttatattctggtgtgatttctccattatcttgaaataattgttagtttccaagatgtgtttcttgatgatgttgttgcttgtttgcctctagctttatctagagagaacttttgtatgaatgaaagctttgggtgattgtttggttattttcttttaactagtctccccctaatcaacaatatttggggaccaagaaactatagcgatttctttaaatattccttgaccatttcttgttgtttttgttctttatcttcctacaccaataagggtagaaattaattgcttgtgttcttgtggtgtatgaattttattttgaactcccatcagactccacatatgttgagagtttgatttatattgtgattctcccatcagactccacatatgttgtacagattactaattaccactaaaacatgatcataaaaaagttaatcacaatatattaataatagcataccagagtcaatcacaatccactttcctccttcttgcccttcaacactgggaagcactaaccgccgagctcctttttgcttctgcttaacctgttcatttcataaatttacaaacaacaaaaaaataatgtcaatctaagctcaaagggggaacaaaaatggaggctttggttaatgaatacttaaaaaaaacaacaacaaacaaacctgcctggtaaattagggcttgagcaatgttcctaacatgccaagtggacctcccagttgcaatgaccataaaatcagcccaatcatgctgcttatttgcaggtataaccttcacattatctgccctaacatcagataaaatcttctccacttcttgaagctcaagaagtcccatgtgtttagatatggaagataaagagtgattgaaagttgaaaaccctagcttccatggttgaaggagttgaggagagtaagaccgtagagtagcagcccacattgggatcacgtctctaaactattttgaatacataataaccaagaatcaaatacagtatataactatatatatacatataaactacacaaacagagaaaggaaaaaaaaaaagagcgagagatgaatcagtgcatacctcaaaacgaactgagagaaattcgaaaccctaatttggaaattgaacagagaagtttttgaattttggatgaaaagttatgcatatatgattatgaatgaggaaaatcatgagattaaactttgtggcatttttcaaaatatatataatctgtggcttcaagttccactccaagatggtatttttcaaaatctttgtaaaattagtggcatatttaagatttttgtagttaaggtctctgtgagtagaattagagagagagagagagannnnnnnnnagagagagagagagagatggagttagaggaggagagaaagagagggaaattgaggaggaaaccctgttcagctgccatatccaatctcgatgatggtactctcatgcacatcttcagctttctctctcctattccaggtgggtattattctttttcaactcccaaattagggtttttcaatttgctgattttgacctaaatttggggaatgaaagaaatgaaaatgaagaagttttgatagtaattatacataaataaaagaatagagattagattagatgatgtgtggttgcagatcggtataacacagccctggtttgcgacagatggcggtacttggcatgtcatcctcgactatggcttcgagttgatcgttctcttaaagaatccgaagctggcgttttcccaaacattgactcagctgtagctgctgcaaggttggttttttatatacatgtaaagaaaaaaaaaacaaaaataagcaaagtccccattgattttgcagactatcattagttcggtgtaaatttagtttatggttgcttgagctactgtgaaggtctttcatggatgcttagtgtaattccatgaatttatgatgggaatgttgcacagtgcacagacccatattatgtagaggaacagaaagagaaaccctttgataatatcttaaatttgtttgaaaatttgttttgcaaatgtaactttttcattggagtcattctataccatatatgtgtgtttctcttcaggcctggtgacactattctaattgcagctggtggtatgcatctggcttcaaatattcaaattaaaaaaccactttgcctggtaaatttcaatccataaaacttggttgagtcttttttattttacttgtttaaataagtagagtcataaatcatttggaagatttatgaaaagtatgtaaatattggtattgttatttgttactacttttgttgattcgaattctttacagattggtggaggtgagcttcctgatgaaactaccctcatatgttctcgaggttcagacaggtttgattaatttagattatgttttattccttttgattgatatatgttcattgagtctcagccgtatgtatcgatggggatgtgatttttgtctaaggtgaaattgaagatgcaaaacattagccatatttactggcatattatgatatgcgtctttaagtgagaaaattagtgaaagaattgattagttctatcactgctattctctatagtctatagtctcagtatggtaggataatatgatcttttgttgggttctcttaactctagagttcaatccgatccggctcttacagtagtctttactttcctgatttttctgttctttgttactccttttctgtctaccttaaattcactgtaagaaatcatggtgcatatgttcgaatctatttgggcagcgcattggaattattgtccacctgcaaactggcaaacctaactgttagggcagaactcggctgctgcttgcttcatagaagtgggaggcttacaattgagaggtgtgtgcttcaatgcgaatcaaaccccttagattttttatcctgtcccattgtaagcacagccactgcagacaacttctcttcctcagttaagtacaataaagacagtgtttcagtttctcgaactcgaattgaaggcggtgccaaggctgtttcaacgagtggcgacctggtattgcagcgagttagagtaatttatgctcgaactaatctccttttctggtttgatatggaacctgtagttgtagtctaaaattgtccctatgtaacattatctaataatttactcatttaaaaaattgtacccttatttatgtcaaaagtatattaggccctctgtaacacttatgtcagatttcaagtgtagataaatattttgtttttgttgtttgttttaatgtcttggaatgcttcttcagttctttctggtcataatcatagaacgaattacctcattttaattgatgtttaacaagcgatataatgtttgacaagattgatgtcataaaaggcgttcttgaattgtcgaatttcatgctgactaccaaaagattttccaaaaatatttattgattatccaagtttaaaacaatgaaaccacctgaagaatataattttataatatctatttgttgcacttataattatttatttatgggcgtgataagcatttatttgaattttattcagttctaataaaaactaatattggacttgagaaaaagtaatttttctagtgatttctatgtaaatgattatgtgaatttaaatttctccgttagtttctaagagagtttatacgtgaaatttccatgaaaaagctcaaaaagaatgactgactaatgctaattttatcatttccaacacatgtaacccgatgatgggagaccaaaaaataaacattcacattggtcctgagcattttggaacacaaaaaaaaaaaaaagagcttcattttgttccagaaaaactcattcactcgttcaagaaaattttcagatgaaacttcaagtaacctcatggcagttactcaaactactgaattctattcaacccatccttcgacagcactgcatggaaaaaaaaaagatgagccaccaatgtaacaattttttcctgtccactttctatctatgcaaaatatgtatgtcttgttattaaaaataataataattataatgaaaaaaaaaaaaaa

SEQ ID NO: 113803 - DNA, 1515 bp, Cannabis sativa
attctctcttctctaaatctaataaatctggtagagaattaagattgctatcagaaacatcaaggtattttaaagaagagaagctcttaggattagtaagatttctaggaaataaatcacccgaatagaatctatatgataaatcgagatgaacgagctttttgagattgaaaatccaattaggtatagaagaatattgaaaatcattgcctgatatatcaagaaactcaagagatgtaaagttaacatcagatatggaatgaatatgggtaagtccacacaaggacatgtgtaattccaacaaagaagggattttgtttaaagagagtagccaatgatcagatgttgcactaaggtttgctgtcatctctagatatactagtgaagaaagaccagagacccaatgaagactatcagcatataatttgtcacggctagagtccgaatcataatcagtttgaagaataagatggtttaaacttgacaaatttccaagttggtgggggatttttccctcaaatccagctcgagtaaagtttaaatatttcaaactcatcaaagaaccaatgaaatggggaatttgagtgccaccaaaattattgtagctcaagtctaagtgagttagatatgtgagattcagtaaggaagggtttaccttgctacttagtccaccaccatatttattctccaaatcaacataatccttgtaagtattagcaagctgaagttgtttgacatggcctgtgatgctgtcgcaaataattccagtccagttgcagcagtcatcatcatcatctccattggcagcccatgaagttagcctgttgaagggatcgacaaggtcttgcttgaaactcaaaagagcttgcttctcactttcgacacagagtacatgatcatcatcattatggtgtttagttttggtagttgcttctacatgcaacataaaaatgagaataagaaggggaagagttatagtgagtttattaagtgaatacaaagccatgttcatataacaaaatgggaatggaatgtaattgcatacttttttctttttcagttttatagattatatataagagacgtaagtactgtttccaagtcttcctagtcagtcaaccattattattattattattgcatatataaaaatgataatatttgatgcttgacttaaacaagtcacttcatagagtcatttatgatttcaaaattaattaaaattgaagaaaaatcagagtttgaaaaatcaacgtaccctttaattatttggttaaacatcattgtaaataaaaattgacatgtacattcattcaagaaaaatcagagtttgaaaaatcaacgtaccctttaactttttatgtaattaaatccccttcttctttggcatataggcaccattgtgatatattaaagggtgtaaagtctttttttggcaagttagttgacaaaataatttttccatttatggtaagattggtgtgcattcatattcgatttcttaccttataaatt

SEQ ID NO: 113804 - DNA, 1765 bp, Cannabis sativa
ctgacacaagagaccactggtccaaaccagctactggacagttaaaaattaatgtggatggggcggtttttgaagacaaaaatgtgattggtactggatttgtagcacacgactgtgatggtcaaatagttgaggcgtttttaactatttcttctgtcagttgccgacccgagattgtaaaaattctaagtgtcaaagaggcacttagttggataaagaggaataacaagtcaaatgttattttagagacggactgcattttagttgttcaagctattcttagttcggtatcgatgtcttctatatttggtctatttgttcaagattgtcaatctattttatcttctttaagtagtgtttctattggtcatgttaaacggtctgctaacaaaggcgcacactgtatggcactcggtgcttgttattggtcaagtcgtcgttttactgagagcgatgttccccttgctcttcagtccattgttttagcggatatttctgtctaataaaatttattttcattcaaaaaaataaataaattattttattattaaaataaaataccaaattataataaatatatctaattattggaatcgaattttaagaagaaaaaaaatcaagtattttttgaaatgaaaatcatgtaactttgttttgttttgttttttttttatattttttttaaatgagatattaaatttatattattattaataaatttagctttatataaactatatcattttttgattttttttttttgtgaaattttttaaaaaatagataaataattttgagagattttaaattacccatatcatcgttatatatatttgtggagggattttttttgtgaaaatattttaaaaaaaatgagaatataaataaataagtttggagagattttattaatatcattataaagtaagaataatgattaagaaatttaaaaagtaactaataaaatttaatattttaatagcatttaaaaataatatttttttatttagagaagactaaaaaatccacaaaaaaaattaaactaacatacaaaaatattaaaatattaaaatttatttaaacaaatattttaaatataaaggtaagagttggtaatgataactaattaaaaataaaaccatatataccaattaataatcgttctaaaaagaattaattttagactcatgtttaacttttatactcttcatttttttaatatactattaaaagtctattttagtatatataaaatgaataaagaataatataataattggccaatgatataatttcacaaataaagataaaaaaggataaaaaaaaatagacaaatctataatcaaacgatatagagtaataaaagactaaattaaaactaaaatagagataaaaaagattaaaaatttaaaaattctaaccgaaacaaaaattgacaaattcttttaaaaaaacttatcatttaatttgtgaaagagatggaagagatattgtcaaacagtatataatgataaaatattaaaccataataaagatttatgaacataattgataaagatgaataaaactaatcacaatttaaatataaactgaaaaataaattaattgataaaaaaatttataaaagactacatatacatatagatattttcttaattattttaatataaataaaaaacttttaccttctcataatataaaaaattagaagaaccttctctcttcaatacattgaaggtgtaacagtaatttagttcctattcaa

SEQ ID NO: 113805 - DNA, 2264 bp, Cannabis sativa
caaaaatagaggcaacaaagttattattggaagagaaaggcaacttttttagttttgctaaatgacatattgtacatgggaaaagcatagtagaatgtttaaagtgtaacattttattgatgaaagttgtagttgacatagaggggtgtccaagtctagcatgccaaaaatggacactattacatgatgtatcacaaatagcagaaggcaaatcaagtttttgtagtaggaaatagtaatgtctaatccttttagaaatctcaatcctcttcttctgtgaaccctaaatgatgcagcaagaattagtgaaaaaaaatactacttgttaatgtttggagaaaggttgggacactaaatagtttaaattgaaagttaggaaccaaaaggacattatgtaaatataatgtgtctgcaaatttaatgttaccagatttatgaatctttatgttcatgccattaggtaatttaattgatgtagcaatagaaatgtcaagtaatttgtagaaaagagaaatgtcacaacatatatggtgtgtagcacaactatctactatccataaagagtgtggagatgattcgatcttaccaaaaatattggatgcaaaaggttgagatgcatctgaagtcgaaggtgttggctgaagtttttgacttaacatggaaatgagggtctaaatatcctcctgtttggtcaggttagccaagagggagaatggatcagtggaactcgatgcttgatttgtagatggttagttattagttttcctcttatctccataacctagtgggaacctaataaagaaaaaacttttttctttgaggtgaccaggtttgtggcagttgaaacaataaggcctcatgtgtttattacgtccttggtttgcagtagcagctgatgtagagggattttgagcaagagctaagatctgagatgaatcttggacagaagcaatgagggaaggtgtttgggggcttttgagttttcactgcctttcttcatgaatcatcattgagaagactttagaagagaaggaaaaggatcgataaagaaaaatttgagctctatcagggaagaaatattcatttaggcctgttaggaattgaagaacttgttcttggttcaagaatgcaagattattaatagaggcgggacaagtgcaatggattattggatggagctcttaaatctcatcccacatacattttagtttagtgaaataagaacttatagtgtcatcaccttggtatagaattatgagtgcttccctaagttcgaatattcaaggactatttccttgatcgtatatcttgagttgagttccttccaaatttcagtaatattgtccaagaacatgatgctgttcttaatttttggtgaaacagagtggagaatccatgacattacgatctggttgcaacgaagccagtgattgtgtagaggatcatcgattggtggttgtggtaaggtacctttatgaaagaatgttttattacatgcaccaacaaacagctcaaagtcacgatgccatggctggaagtttttatcagaaagtggtggtgtgactagagttaatccaggatgatcactagagtttaagaaataagggctggagctatcttcgtgagcatgtcgagtattggcgacgacttgttgtgtgttattatctccggtaagggcagaagcaggaggaatgatcgaagagtatctggtacagaagaagaattgttcagcaatggagtttggccagaatttcttgaaccagtagctctcattctcgccatggatgaaaaacaaaatagatgatttcagagagaattataaacgtcttataccatattagaaagtaaaactacatttttattatgtaataattgagtatatatacaagtgctctagtcaaagtctattactaacaaaataataaaaagggtcctctctataactaattcctaatcaacatgactaactatgtaagataatggattctaatacagattgaagtttaaaattctaaattcaataattattagaataatacgtccataaattggtttaagaaaaagtccataaatgaaatttggcatgcatgtttcaagtcttattttatcttgtagaaataatatcttctcctcatgataaaatgcttaagattttataattcttttaagaaaacaagttaagagttactaaatatgtttttttttttgaataaaagttcaacttcattaacttaagagcaatcgctcaaaagtacaactttaag

SEQ ID NO: 113806 - DNA, 3638 bp, Cannabis sativa
gttgtaaaagtgtaataaaataaacttaaagtgtataaaagttgcttttaccgtgttgtagtatatatgtaataaagttagccttttgtatttttagtgtaaaaatttctattaataatcatacatattctttttcttcaaaagagaaatatcactataaaattaataatatatattcttttggtgatccttttgataaattatggtattcaaactttgtgaagaaagctaattattttgttgatatttcacccagaaccaaatgaaagagcatatatgaaaagggacaaggttaatttaactgaatccgtcatctcataattagtaatgacttaaattatagtttatcaattttaagattgtgacacaaatgaagtttaaattaaaaattgatttgtaattcataaaatttacaaaagttgttagaccatctccaataaaataagtcaatggtattatttattccaaattttacaataatttaccatcattagaggtaaaatttgtgttccaactgagtagtagattactgcaaggttttcatatagagtaaattatgctggtcactctacatcacccgttttctctaaattattgtcattatgaatttttggtatgctcttcttaacttctttacataaaatttgaatgacttcatctacagttctaaagacaaaatccacgtttggaagatgcaggccttcataaaactctttcatattttagccaatttcttgtaactctcggtggctgatcttgggtgccctcttgctaccgataccagtgagtggttcaatgaaaatctacttaggcatatatggtacaacaataaatgaaactgtatgttaagccccctagccctatcaaaccttccaatcaaagaccaaaactctaaagttaaatctaaacttggagtggttgtaacttgtgacctgaactgaagtgtagcaacttaggagtagtgtagtttggagcacagcttaaggtaaacaagagaagaaagcaagagtagttgtaacttgtaaaggttatttactagatgaccttttcccagctcagaaagccaaaatctccaccatggcatagccctcccattaattttgacacagatatttctccacttactgtgttgaaactccacattttccaagtcatgacacaaataaatgttggttttcccttttacaaatttgtatcaaaaaatatatatttaaatgaacaaaaagagttattatctaggaaataaaaatagaaaaggaagtcttgatatcgcccggtaaaaaattaaaaagaatccactcgcaagggaagttacgactaacgttaggattgattcctcagtatgagggtctctgacaagcagaaaagagctgacaactgatcaaagccatcactagagaaatggatagttggaagccaaccacttctgggaagtgccagcccaagcctcgcttaagatagctgaaaaaacatgaaaagatatgatcagtccaataaatcgtgtcagatgtgaggtgatgcatggtggcagggacattgtaggtggaaacttagttctcgagcatattttacgaactaaaaacatcacaattaaactgaaatagagaagacacacacgtacacagagaaaaataaaattttaaaaaaaaggttatgattgcagaaacaccaaaccttgtgatagatggcatagttgctacaatcactgcacacacgtatattatgggaatcaatgtcttgggtttgttttttcgcagccacattagagaacccaatgcagcaagagatatgctgaacacctgaatacaaaaagtgaatacaattaggaacatactgatactaatgccatggaaatttaactctgaaacccagggaaaagcatgcagatctatagagatgaatactgaattcacatgacaggtcttaacaaaaaagcaaataactttaccagatttgcattcgcttcaagaccttgtaggatgaaatcccaagtgaattccaatcctctggcacctacccaaagaggtgccaatctatgcaaaacagaatcagcaaaagcccatcctgcaaacagcgaattatcattagaaaatgttaaaagctttccctcaagtaaaagaaactacaaacaaactaagacaacaacttgaatttcgatttggaactgtttttttttatttgtccctttacattaaaatatattaattggtttctgtactaaattcacaaaggtctgccttaccaagtccaactgcttgaaatttatggttttgagatatatttctgtgagtcaactgagtcaatgcgaagtaaaggccagcaacatctacaaaaccaattaaagcttttaaggcttcctgcaagtaaaatggcagaattaggtgatgtaactccaacccaaatttcatgaacaagaggagttattttaggagtccaaatttgtgtccaagattttaattgattcaaccaatgaagaaagaaaacaaaatcgaactttgaagggcttccagtccaccttttagggtttcctggtctcacatgttatcccttcaatcaattacttggtgggaagtcaagcactttcatttcaacatgatccacagtccatttttaaccttaaatggaatcaatcttaccgaacgtttttcaacaaccgtgatatccgaattctaatattgtataacatatagtttcaagccaatatcacaaatgctaaaatcattttaaggaaataaatcataaaattaaagtccctttctattgaagttatgaagatcgagcaacaaagactataaatatatatgtgagtgaactataatgcaaataaaaagtatacatcgtagactactaaattacctggtaaggatcgaagtggtcagtctccgataccttaagaaaagttgcaagacaaacaagctgccaacacaatttaggtatacaaattagatgcagtaaaagaagattaaaataagtcgcagggatgcgtattaatagaatatgattaaccaagaaaacaaaccttgactaaagctgtaacgagataaacaatggcagatttaatagaggtaccaagtgtatcatactcggatctgcagatcagtactcataaattagaaaactccatcacacacaaaaattaaagattcgaaattcgaatgttgatttaagggtttactttctttaagtgtttgagaaacagtaaaggtaagattttgaaattgtggtagatagatctactgtgtacacaaaaacaaagatgtaaaagaagaagaaacgtacagaggcgtggcggagtagtagacggcgtgaggtccgaaggtaagaatggcacagttgaagaagtgaaacaacgtcattctcaaatggggttcttgctaaacgaaagattcaaagagggaaattgggaagaaagtgagaatatctatatatatctatatataaactagagatataaggcctcattcttctctcattaattctttcatttttctaaatttttctattagattgggcaatataatccctctttgcagctaatttaggtgcttttttaatcaattttttgctttttaaaattgaaaaagtgaaaatatttttcaaaaacatgttttataaaactttttttacttttcaatttt

SEQ ID NO: 113807 - DNA, 5618 bp, Cannabis sativa
gaggaggtgccagtaccggtggcgaacgtgggcatcgtaaattcatgagtgatgttaatcactttgtaaaaaaaaaaaaaatataaaaaaaattataaattaatatcttactaaacaaaattcaatctcttttctaattattaaatagccccagcaatgatgaagggaacactttctgcagcgcgtacatgttgcgcgtgtgagaggattttatttttccttaataactctctcgtgtgtcaggcacatgagagcaaatataccataatttttttacatgtaaaaatatatataattttgaagtgctctcctctcatcgccaccatcaatatcattcatccattgcaaatcttttctgcttcactcacttcagctccttttatttcttttttcctccataagatcctgcaaaaaatccttatttagggttttcctgcatagtttttgagagctgaaaaaagagaaagctttgagagaaaaactcgaacttggtgggttatgacgacgtcgtttggagctacgaatactcccgtgttcaacgatcccaagggtcagattgggagctttcagagacttaagtccgctaactctttcgctttgagctttcatactagacccgttcatgtcttttcggcttcgaaccgtacgctcatcagagccgtttctacggttcgttttgatctctttctctctttctcttcttctgtgtgggttttttttttttttttttcaaacatattgctctgttattatggcaagaggccaagcaaagaaacttatgttgcttgctttcgttttgttaggtttgaaagagctcgtgtttgtgtatcaaaaatcccatttttttcatttgtttttttttatgaaagtataaattctatcattttattgtttgggtggtcatgtattgttgatttgtcaatctagtttcttttgctattatgtgtatctaaatctatggcacggagagagactgtagttagtattaatggatttctggagctgaaatgtgtagaagagaaaaaagggtcaaatttgagaatttttatgtaatgaatctatattaatgagaaaagtttgtgattattgatgattttttgtccatgcagccggcaaagccagagactgtaaccgagcctaagcgtagtaaagttgaaatattcaaagaacaaagtaatttcataagatatcctcttaacgaggagatattaacagatgccccaaatatcaatgaggctgctacacaattgatcaagttccatggaagctatcaacagtataatagagatgaacgtggtcaaaagtcgtactcatttatgcttcgtacgaagaacccttgtgggaaagtcccaaaccaactttacttgaccatggatgatcttgctgatcagtttggaattgggacactaagattaactacgaggcagacatttcagctacacggggttctaaagaaggaccttaagacagtaatgagtagcattattaaaaacatgggctcaactcttggtgcctgtggcgatctcaatagaaatgtacttgctccagctgccccacttgttagaaaagattatctctttgcacaacaaacagcggataacattgcagccctgttaactcctcagtctggtttttactatgatgtgtgggtggatggtgagcaattcatgacggtagaacctcctgaagtaaccaaggtccgcaatgataattctcatggaacaaatttccctgattcacccgagcctatctacggaacacagttcttacccaggaaatttaaaattgcagttactgtgccaacagataactctgtggatcttctcacaaatgacattggtgttgttgttgttactgacgataatggggagcctcagggtttcaatttatatgtaagatcatcatgtcttgaccaatgtttttttgattgctctagcttataatgttagtatcttataatttctctcacaggttggtggtggtatgggaagaactcacagggtggaaaccacttttccccaactggcattaccattgggatatgtcccgaaagaggatattttgtatgcagtgaaagctattgttgttacacagagagaaaatggcagaagggatgatcgtagatacagtaggcttaagtatttagtaagctcttgggggattgagaagtttagaagtgctgttgagaaattttatggtaggaaatttgagcctaaccgtgaattgcctgagtgggaatttaaaagctacttaggatggcatgagcaggtttgttcaactcatctcgacttgaagtttatgatttctcatctgggattctatgtttgaaatactactactccctagtcccgacattgagatttatcatggctcttcatagagtacagctgttaatctgtcatagttattattctcacacttcctctttagctgttaatctgtcatagttattattctcacactttctctctagctgactctgttacctcaccatttgtctaatgatatgtttacagggagatggcaatttattttgtggactccatgttgatagtggtcgtgtagcagggaagatgaagaaagcactgagggaggtcattgaaaaatatggtttgagcgtgcggctaacaccaaatcagaacatcatcttgtgtgatattcgaaattcatggaggcgtcccatcactacaatacttgcccaagctggtctgctggtaaattcatcttttttcacttttgcactttattttcccctctttgtcaactaagtagagtattgcatttgattagacgtggtatctatgaatctatacaaagtgttgtaacttaaacaatagatcaatagccaacacttctgttgttgtgttatatgctttatttaggagaaaaagaaatattttgtgccactgctgattttggattgatgtcgcgttatattcattacttactttttgctgtgtccagcatcctagatacgtagatccccttaatgtaactgctatggcatgcccggcaatgcctctttgcccactggcaataactgaagcagagcgaggaatccccgacatcctaaagcgggttcgagcagtttttgagacggtattgccacaatccttcattaatttaagaaataaaaagagaaaaaaagtgtgaatcaatatttcaatgttagtgtgcaaataacatactgccattatatttcaggttggtctaaggtacagtgaatctgtggtcataaggataactggttgtcctaatggttgcgccagaccatacatggccgaacttggactggttggggatggtcccaatagctaccaggtattttgaggacactttctcaaagatgttgtcttttaaggcagaagtattatgaaaccactggacatataataatatcattcttattatgtcttttaacttaagtatagatttggcttggaggaacacccaaccaaacctcccttgcaagaaccttcatgaacaaggttaagattcatgaccttgaaaaagttttggagccattgttttatcactggaaacgcaaacgccaatctaaagagtcatttggagcctttgcaaatcgcttggtgagtggtaacataattatctgcaagctctttgtttctacttatatttctgatctttaaggaaaaattgtctttgtaacttatacctagaatgtggaagtgttcttgtcattggtaagtattagcatgcttagtgatgtgggcttgcttgtttgttttcttcagggatttgaaaaacttcaagaaatggttgacaaatgggaaggtccagtagctgcttcatcacgacataacctgaagctttttgcagacaaggagacatacgaagccatggataaactggcaaaactgcaggataagagcgcgcatcagctagctatagaagtcattcgcgattttgttgcttcccagccaaatgggaaaagtgaatgattggtttgaagttatgttcctgcttagcaaaacacagccaaggcagactaggaaataatacctcttatgtgttctgttttagagtttctttctggtttaggtattattttttttgagattgcattttcaagtctctgtcggcctggatttgtaaaataaggctggtcttttttttttttttttggtatccctatgcaagagtaggtgaatgcgtttcctcatcgtctatgatttttgtaacaagatcagtttttgtccgcatttccatcactaaaaagtgttctaaaaggctaatgtgctaatatgcaaaagctattcaagatattttaccaatgattccactggaagtcttatcaagggtttgcatgaactcaaattttggaggttgtccaacctagaaagtatgcctagacttatggggtatgaccatatttatttgcacttttgttttgaagatcttattgtcgaagagggtagttgttttactttggaagtatagattttttagtgttattttctttaccgttacaaaatcgaaccaaatatctcttactctactgttttcaagatcttgatgaagattttatcgcattctattggtaagagggtagttgctcttcgcttcccttgcatttgtgggtttttgttgtcctttctttctttcccagaaatggcaagatagcacctttaccaacctaaaaaatgcgtctgatcgtgtgacctattgacatataataacaccatgatttcaagggtctccatcgtaatccgtttgacccatatgcaggtattacacagtattggataaggtctttttggtactaagcttgtttatgtgcgtatattgcacaaaagccagatgggcattttctagctttactatgagaattgctaagagacactattagtgcctagtaccctcctcgatattatatcgctgttggtgtgttatcttaaattttgtctacttgacgtggcatgttcacaaagtctctttagaaggcataacaaaactgtcaaggaccaagtgagagaagttaagcaagccgtcaagaagctgcacaattatgtttggtcggccacgtgagtacataggccggccaggaggagcttgtggtttgagcataagctagtcgactaaaggtgattgtcagaccaagaaagggcctgttcaatcaaggaagcctaatctttgcaagaaaagttgtacaaaagctggccaacacatactaaggttagccaacacttgctaaggttggcagacacttgatgtgcagcccgcaggctggcaagcacttgatgtgcaacctacacgctggcaggcacttgatctccagcctgcagaccctgataagcacatggccgactagaccatagcaagcacatgaccaaccagaccctagtaagcacatggctggccagaccatgtaggcaaatggccggccagactctccaggcacttgactggccagaccccagcctgcaccaggcaagcctttggtgcacaaccttcatctgtggatagcaagttaagctgggatttggatttcaacaacccacaaaataggggagaaatattagctattcccctattcttaagggataattactttatttactatttattattttattatgtaaataatactttatagt

SEQ ID NO: 113808 - DNA, 6773 bp, Cannabis sativa
  modified_base (2037)..(2051): a, c, t, g, unknown or other
  modified_base (6734)..(6747): a, c, t, g, unknown or other
ttgcaacgacttagggatcacaaggtgtatgcaaagttcaaaaagtgtgaattctggttgtcagaggtgtcttttctaggacatattgtgggaagaaatgggattatggttgatccaagcaagatcgagtctgtgaagaattggtcgaggccaaaatcagtgacagaaattcgaagttttctcggtttagcagggtattattgacgtttcgtcgaaggattttctaaaatctgtatgcctttgcatggtacactgaggtggattaatcgagcaaagctgagtaaattcaaagggagctgttacacagcttgtattgttgctttggcttacaagatatggcaggccaaaaacaaacttttctggtgcaaggagtgcactgatccgaaggtgctagtccgagaaactaaatggctagtaaaaaataggattacttgtgtaatgcctaaatgtatcgataaaaaagatttagattggtttagagagttataagtgttttgttacaaaattgatgtataaaattatatatgctccatgaaaagccatagattgtaaacataagaagtttattgtgcaatgaaattcctcttcatcaaaaaaaaaaaaaaaaactcttcaaagtgcttaagatttaggccccctctattaaaccgatgcaaattgagtaccaatttgtgaaagccaagaaacgtttatgatttgtactcctaatccagcagaacttacgagtaatacaatttttccatctattttaaaaattagtaataaaaattcagagataatatacactgtagtatataccaaacttattaaataataataatagtactatagcatactaaaagcttatatattagaacaaataaatactccatatgccctttatatacttagtgaattaatcacttgatccgaatattaatatttatccaaatccatcagcatatatataatatttaattttagttgatctctttagtaaacaaaagagtttaattacaatatcatctcaattaatgaacaatattattaattattggaaaagaagaaaaagaaaattatcaatcatcttcgtcctcatgatccatcaacatccaagaaccatcatcttgttgaaccattcctttgtttttctcacaccgccaagaaattggcacaaggtactcttcttttaacccatccatactcttgttcaacaaagaaatatctctgttaatttccaacttaaaaccgtttttgctcccttgcgtgcctgcaactccatgcaaatggccctccaaattgtgccagctcgaaatgcttccagggctcttaaggtacttagactttcgagtgtctatcactagctcttttcccacatcggaatacccaataaagggatagttcgggacaatatctgccgcgtttctgattttcaaggctcgtagatcgttaaacgatgaaaaaagcttcttaaaatcgttgtcacccactcgagggctggcgaagacaaagacagtgaccggacatgttgctgtgttggtgttccacttgtgatcgtgattagaaattactgtcggtttgttgtatccgttggccaatatatctactgcgtttagagtggcaattgcagcgcccaagctatggccggtgatcgttatgctggtttcttcgttcttatatagatcgattagtcttcttatctcactaagaacctgataataaggttcacattgacaaataattttggtgtttataagaaccaagcacataggaatttaagtatgtaaatattctatatgtggaaactatattattgttaacacttaacatcctatgtttatagaaaaatatcacttgtccccacaatcatgtctcattccttcccaacaaattatattttcccatctcttccatttaaaatgccacttgtacatttaaaattctatgtctcctttaatctgtttgttttcctttaattttcatatatgtatatatatacatggaatacttttcaatggtattattgattaatgggtactaaataaatttaattataannnnnnnnnnnnnnnatattaaaccattaaattttggtccgataacgaataataaaaaagaaatttaaatttctatgcttaatttagttacttaattaaaaaaatatctctttttatactatatcaaaaatatgtttatatgaaaaatatttaagtcaaatcaatcatttttaatcacttttttgccaaatacctttttttactattatttttttaggtgatgaatcaattcaagttcatatattgtaaagatgaaaaaattttataattaaataaaaaaattaatcataaaaactcaaatttttctaatattatcctttcataagtaatatctattaaaagtactgtagccacatggaataaagaattcattttcacgttacattaaaagaaatttcactttttttttttaatattctttccttaattattttttttttctgaaaatgaaataagttttaagaaaccaatctaagcctagaactcccagaagataattatatggaaagtaatagttatatgtacacacatgccaatgattatagataaaataattacctgttctctcgcactaatttgattgaacttggaacgaggatcatcagaagtataaatggagtaccatccttggtgaaccttaggatcaccatcatgaaccccaagaatctttgaagccgaaaccaaattaaattcaaaatcattaatccactccaatgtctgaaccgtacctctccaagaaatcacaatatcccttctcccaagtgcagcctttccttcatctgtggccacagccacgtaccccatccaatttgactccttgctccaagcctctctagacagagaccttatcagaaacgcatcaggcacatccacatgagaagtcgcataaaagaacttggtcactctgtacttattgaaaggagtccctttcaccagcccaaccttgtcaaaaaagttcttcctcccgaaccggctgcttcctgcgaatttcgatgccttttcagtgtcgaaagcatcgtacgaagcttgagccatttctccatagtgaattatgtattgccgaagatcgatgttgagagggtccaataggtctttccagttgttttggccgctcagttgtctccatatgctagctatgttatccattttattgtagttattactggtgttctttgtattcttctttttcttcccaaagcacttcgggagaacgagtcctctcagacttgttcttattgacgttgcttcagtgttctctgaatccattttggaaatgaatttgtagttgcgtttagatttcttgatgatattacctaataccttcgcattatcatgataaccataaagaaattgcgtttctgattaagagaataaagacaaaatttataacgggcgcttttcatgaagataaatcaacactacctaacatatatacccaccaatatagaaaatagtaatgggtgcagcccactaaaatgcgtgatgcaaccctctttcagcatttataaaaaaattaatttttagtttaatttttttttgataatagtgtacattataattataattatttaatacattatccaaaattttaagaaatttagaataatttacaatataaatttttcaatgttcaaattgtctctttctcagcctgtaaaataaaaaagtggcatatacaatagattctttgaaccttattttaagcgtgttaaaattttccaaaatctcaaaattttgtcaaatgtcttaaataagtaaaacataaatgaccataaaaaaatcaaactaatttttttagatattgaaacagtttaccgagatttttaaaaaccgattatttagagcttaaggaaaatataaaacgataaataatggacaagtagttttttacgtggtttgacagttattaatctttagtccacaactctgttgtattagccttaccggtgagtgtttaagtatcaaaagaatttgcaatatgaatattaactctgtattcattttatttctcttagtgaagaagaaagctcatagaaattttttgcagaagttcatgtaagtaaaaactattcaccctttgtatataaaaaatagggttatttataggcatatgtatgggtgagggcatcccctccacccacctagagttttgtactcaacacgtttcaaaggctagtatttacaacaaggtgatatgaccgttggttggtaaggagcctcctcatcgtgtggtgttaggccgctgcaatccaacttatggggccaaggacacgtgttgcccaaaggtttcaccttgcaaagttagtttctagacaagtcgttggagaaagaggagctacagagcacttacgtgcactaccacagtttgacacaagggacaagatttgatttggtgtcagaaggtatgcagctgttgccttcagctactgatacgacacacatggttaggttccaaaaacatctggctatggctttcccaaatcagactaacctactataatcttgaagcactcatcacttctgattcttcttcatagcagttttattaattagaatcttagagtccttgccttcactaacaagaagagccttgaggtagcttctggtatataacatcatccgtgatgccgagaggcagagggaatatactaaccatgcataatctaacatggcacccctccacaatttcccacatacatttcatccaagaatacagataacatttaccccaagctctcgggactcatgagtgttaggagcttgcaaatttctcccgaatgtttgtcttatttttctgattcgttgacatagtattggaatgtggaagaagtcttcgcattgccccaagcatccgaagggttataacattttgtggtattgctgtcaatttgctgatgtgtggtacttgcttagtgtagtcatagggctcacactctgagtttaagcgcgtttctcgtgggaagcgagtgacgactataattgaaaagacactaggtttctggcacgtcggggatgtagccatgatatgatgactaataaatactttattctatttctttaggtgcattaaatgcaaaccttaccgttggatggcgtaacctttgattaattcaatctagaccgtgcatttaaaaattatttgaacagttcccacccatataaatgagagcatgggcaattagaatcatttttccttccccaccttacgcaacaatcccttccctagagaaccctgtcaaacgaactctttgacctagaaaccctcacctctttccacctttctgacctaagaacatcaccctctattctcgaccacagtgtggtgttacttaacattcatcactcaccgaaacaattagcttaatgtttgagcaaggcgcaacttggttactaagcaatctatagaactttagccgacaacgaaaaaccactatttcatcttttaatccgtctacaagtaagtttttcttttactcaaagcaatatttctagacttcattgtgaaatatagtttccaggtatatctttcatccttctttgatttttctatcagtttaaaaagataactttatttcttggtcgtattctggcttattttttacagcatctatccttagaattatgcttaccaacgagttgtgacaatagatcaaccttctacgaagccttctcaaacgaggaacttaaggtagaggaatcggtgacttataagctgctgtgtaaggcttcatagccacgttctaaagcattcatgaagttgatggcaggggtcaacctcaaaccccaagtgacttaaggaacaaaaggctctggaatcaccatttttgttaacaaaagcgagtaaggacgaggagcttctcaccgtcgcctagtacaatcgtcaccccaaacccctcactgaggaagaggaaatccaagttaggtttgtggtagcatatttggatgcaagcgcttccggaacgagtacttctagaagaggtaaatcaccctttcacgtaatttttacccccaacctatcttgaatgtcgctaataaaccaagggggttttgagaattttttcctaagctttgatcctcgtagatatccaatgaaggattattcgatagaatagatcatatagttaggcaccaaaataactcagattcctccccaaatgtaactaaagtgggtccctttcttaccattgttttcctgggcttcaaggaatatgataactttattggccgggaataagtaactttatttgcaaggggggaaccttatagttacacatttcacggttgcaatcacttgacatatctattaatttaaggtgtgttatttaagttgttatttcctccctttttgactgatttagttacggtggtgttttgaattttccagaatgcttgagtccgagatattgagcaatttgatgagcactatccagaaggttaatgttgtaggtgactgtaagaggaaacagataaagtcccgtgccaaaaaggtcaaccatatagtggaccctccggcacccccaattgactccttggggtggaagcagagcagcaactaagacgttagctttgaccaatgtttgcctgaagatagggaacccatgattccctcagacgaagaagactctagagaagtgttagtgttctcaaaattggccacagcattgaaacgcgccaacactgttggatatattttaccannnnnnnnnnnnnntaccatgtatgtttcattaacatcct

SEQ ID NO: 113809 - DNA, 2477 bp, Cannabis sativa
  modified_base (2452)..(2452): a, c, t, g, unknown or other
ataaatatcaaccattagatatttgattcattggtcaagaataaaatactcatacatggataatactcattaagagcatacattatatatatttaaatataatataaaaaggaaattcacataaacatttacataaatcaatacctctccgagaccaaaaagactaaatatatttttttattattattattattattataaatatctaagttcatgcatttattctatttaagtatttaatatgtaattatgttgaaataaatatatctttaagttttcagttaaattaatgtttgaaaagtatttaagtggaagctctagtactgataccgcatctctataaattattgttttgcccatagtagtttagtatagttgattgacttacttggttagtgaaaccaaccccaaatccgagcaagatacggcctaatatgagcatagcaatattggcagcaccaccattaattgcagctccaacaaggaaggtgcaaccacccaataaaatggtgttccggcggcccaaggtggcggtgaggcggcttgcaactagggatgcagctaagccagctatgtaaagtgaagatgtgaatgctgtcaatgcttgactgtcgtacacacagtatatgtttggtttggtggcttttccttctccttccttattccttagtacagatgggaaaaatttcctcagaaatggtaacattgtcgtcactccacctgaaattaatttaatcatgtcatatatactatatcttttaacatcttttaatttatacatacaactgattttacatatgtttggttttttccttactctcttatatttaacgggagttttatttaaggtagatttttttttagattacttcaaaaatacacaaaagtaactaaataattacaaaaataccattgtacaaaattttaaatatttttataatttttaatattttatttacagaaaatataattttttaatattttcatgttatttttatattctactcttattatttttttgttgttagttttttattatttgtatattatttttatgttatttaaatgttacatttacctatgtaaattaattatataattataatttattttatgaaattgtttacagtagtcatatttagcaaaattttagaagaacataaataattaacattataaaaaaacaaagtttacaacaagagtactcttgctcttgtctttctctcttccatggcaaagaataaaagaatgaacaagaagtcagttactcgagctgatcatcaagatctcctttcaatgcatgatacgatgagagtaaatatgagaagattgctaattgtgttgcggatgattcaaaggggcttaatttaatatagttgatgctcttcaagcagggaaaattatcgaagatcattgtgtgaataataagggagatgattgtatggaagattcgttttgtgaataataagggagaggattgtatggaagatgcaaataaactcatatctttgagctagacggaggagatgaaacaagatggatactgggcatctgctcaacaccaatggaagaaattcacaaaggataagatttcttattctgaacctaaattgagctattcgaatccgatagtgaaagatggaaggaaaatctctcaagtggattgtgaagaggttaaggttcaggctaccaattagaattcagcaatcatctgtatggttcttagagctaatcctcctacagcagtggttgaaggctttattaagcgaatttggggacatctagggattgctcagattgtgaggatgacaaagggacttacgatggtgaaatttaatgatgaagtaactagagaccatgttttggaaaatggtatgattcaatttgacaaaaaatcagtcattattcgaccttggtctacatatatgaatgcagttcgattggttagatcaaacctgttatggattcatctccatattttggccttcaatattggggcaataaatgcctaagtgctttggtgagtaccattggcaagccaattatgatggacaaattcactcgtgatcgaatccgagttcaatttgcaagggttttggttgaaatggaaataaagattactctgtcgcgggttattcaatatttcaatgagtttgggcaacttgtagaacagggggttgactatgagtggttcctaattaagttcaaatcttgttctagttatggtcttgttatggctgattgtagaaaggatagaagattcaatagataaagagaaggagaccatagtggaaagtgttcctgagatacaaacagtttctactttggtggcaataggaacctctaatttagttaaaccataaggaaatatggatacaacagttggtgacaagaaaattatagaacatggtgttcataagagcagccagggtgtgacagtcagtagtcccgngatccgtaaggggaaacaccgggta

SEQ ID NO: 113810 - DNA, 3657 bp, Cannabis sativa
taaattggattattattattgtaacaaacgtagccaatgtccttaactacctttgtaatcaaattattcatttgttacagaaatctttatgcactcacaaatcacaatataattgcactgttctctgatgtttagactagactttattttgtggcacacttcatatatgtgtaattgctgatttttacattctttcccttaaaatacattttaaaatgactgataaatcttattatgaccgttttgtattgatttttttgcagattccattgaactttttgtaccaatttctcttaacacattactaatgagtgaatgtacttgtggaaatgagattgaaagttctagtaattctgaaagtttaagtaatttatgcaggtatgaatttagatgaattaaagctagaaagataaatcaatgaacactacgtttacaagttttctctgcattggaaatacattctaactgagtagtgtttgggtcctcaagaaccgagtaaagtaacatccactataaaattatttcaattacatttaccagttctaatttacaaatcaaacaacataatatgaaatgattttacacaagatttacttaactcttgaatacaattaagaacacggatctaaactcacttagatccaagaagacaagctccacttgcttccactaagctcaaatcccttcagcagatcagtctgaactctcttcacacattgtagatccacactctttcgacctttgaagatttaatgaattacgatctgcaagacacaatcaaagaaacacagaaaaatattttgtcttaatagaacaagaatcactaaatgattttatcaaaaatagagagttagaaaaagcaatatcagcttaatatgtagtatattttggtaaatcgactcagctaattaactccacagctcaaactaactagcacttacagcataatacaaaacatgacacttacaaagttgataagggttttactctaataaataactcttcaagttcattaatatttggaacttatttgtttactaccatccgtcttaaagattggtgttagttcgtttttggctctaattgaaaagtcattttttttttcttttagccttttgatcttcctatttttttcctcgtagaccgttcttctaattctttccatcatgttaacgaatatgctatagcaattcccgagtccagattgaaataataacttgctatagtagactcaagtttaaccgcattttatattttcaaatttattcaccaacctttgagaggcgtttgcatgctcagtttcgaacttactgttctattgctatatgtaatatgcctaataaaaatagttaaaactttacaaaacttcactcaaatgaaacttaaaaacttgtaaattttcaagcaaaaaggaatagtgtttgaaatgaattgaataatgtggggattgtgaataaagttagtgacttaaataatgtgataactttttttccaaaaaaaaaaaaaaagatatacgataaatgcgaataaagtgttaaagaactactggttggcatgagtactgttttttgataactgttggcatgagtattgtcgataagttaaaataaggccttcttttttgacatgggtatagatcccaagcccaactttaaaaccatggacttaatagctcaggtattatcaattgcacatattatattatagaataatttgctaagtttaaatttcagtaataaataaatacttaattttaatttttggtactaataatacttaagttatatttctaaaattctgtaagtacctaactattaaatattaagccattaaattcacgtgtcattttttttttattgatatatttaaattttttttttaaataataaaaaattaataacttagatcaatcaagaaatgtcacctaaaaatttacttaaccaactacctactaaattttttttatcaattgcacatatattattatcattgggaaagaggggaaaggacaaggacataacaaacaagcttccttttcaaagcatatgggaggaagtaatgcatactgcaaagtcctactttttaatgtcattcattagcttagaaccacatgcttttttcatgaagtatgcttattcatgaagtttaatcaaaagtgtagattatcatgcatttactaaaaccgtctttctgtttcttttcataaaaataactgatatcccaaacgaaaatgtaaaagtttggtgttcttatgagacccccactacctgtgtgtaaaagaaaaaaaaggtatgaattcatctttttcttgcttttagtgtaaagtgaagcttttgtttccgcactttctcctttaaagacacttttcatttgagcaacaactttttaaagtgtatttttatcatttctaagacattttgttccaagtatttatgttcttgtgaatattttgacatttcaatgtgtaaggataagagtaatagaaaagttgattttttagtttgattgatccttcttatggaattttagtgccgcacacgtgtcccaccttcatacatataatatataaaatattgtttaaagaaaaaagagaataagtgatgtaccttagtctttgaattattaatcattgtaatactaatcctaagtaccatggaagaattatagaagtttaactagctcctttcagtgtagagtcatggttttttgcagccataaatttcagagaaatgctaaaatgttaagcccaacatactacagagtgttattgctacaaatgatatcacgtactacaaatttgaatttaaattgagatgtatgaattaatttgtcattaaattacacaaattatgatatgatatttcttatgatgttggacgtacacattctataaggtctccaatggagttccaaaattttgatatattgtcataatttgatatttttgtaaaataaaaaaaaaaatctctaatagtatactacaaatgtattaaatttggcaaacaataaaaaattgtgttaaatttaatacaaattaaatataacattttattaaatttaatatacaataaatatttatttatattagtgtcattaaatattaataagtgactatatatatttttttaattataaaatgttattgtgtataggtgtacaatttcataaactatggtaaatataacatttgttcatgttttctgcaaattaacactttctttagatagtgcacagtgcatttgagataatcatgtagaaatgctcaaaacttttattacaactaatgttaaaaccacagccctaaaatgttgtagtgacattttgaacgagttgccaaacaagatgactagcctaaaagaaatgtttttctaccactacatcacacccttaattaaaaccaaatagtagtgtattttttttttgaagataaatgaaaaatttattaatttgtaaagggaaatttgaaattccatgcttaaaatgccctataatttttccctaactacatagttattaaaattggtactatatgacaactttcctaattttcctaaactacccctcccattttaaagccctccctctcatcctctctcttcctctcgcacagccgccagccccatacccactcctcacaaccaccattttttcaaccga

SEQ ID NO: 113811 - DNA, 6205 bp, Cannabis sativa
gaagagttgatccgaatggctgctctctaggttctatttatagaacataaaaaccctagagacagtcacaaagttgaatctacagctgtacaaaactttcctaaaaataagtcctgatttgcagcatcagaaacaattttgtcgcagcaaatcagaccagaaaagaaaacttgccaaaaacgtgtctgatcatgtatttggtcttgatacatgtcatatacagtgtgtttgatctgatcttatcaagacacaatcaaactcattaagaaaaataataatagtcaaagtttccataaaaacacaaactttccataggagaatttcttctcttataagaagtttccaaacaaagaaaattccatctgaaaaatgattatttcctatgatagaaaagagcaataaaaacatataattaagatgagaaaatcggtttatgaatacaaaggaatctcaccataaataaaaaatattttgacatctagcttgccaaaaaaagactttacatatgtaatgtatattaatttaacatacaagtatgagaaataataattagtaatatactttgcttttaaaattcttgagtatttcatatattttagatattaataaatcgaaaggagttacttttatgtaataaaattgtatgaaatacaatttattttacctaataagtaattagttatgtgataacacaagtagaaaataaattgaaaaaccaacttacaaatatcaaataatataatggtcatttaatatcactaaaaactgctatttcaatatataattaatctacaaaaaaaaaataattaaactcaattaagtatactttcaatattttagtaaaatgaaataatacgatgcaaaaactagcatcaatacaaataaatattcttagaaagcttagaaagttattgaaaaaaaaaataaataaataaaaacttaattgaaaaccaaatttaagtaacaacataaatgtaatgacttataataaaaagttaattcattcaacatcctctctttacaaaaaatatccatttaaactatataacattatctactaaattcaaaatacaagtaaaagaaattggttttctaacaacacagtaacatatatctagcaaaaagaaactaattataaacatctaatcatttatctcttctcatttgcctttgtcctttgtctttgccttatccttttgcttatcatttgtcgtttccttctttttcaacacttcattatttattatgtaaccacctccttgtttcctggtagcatgaataaacaaactcacaacaacatcatctatatcttgctaccatatcgtctatctcagatgaaatctcatcaattttttaggatgagcaagtcaacaaatttaatgacaaacactccacagtcacataaaacaaaaaatagatcataatatgaattcaaaaactcacctagttaaaattctaacctaggaaaaccagttagtatagcaaaatcagttttttgaataatcaaaagaaaaaattgaaacttaaaactcaataattaaaaataattaaaaaatcagttataaaaactagttacttaaaaaaactaattataaaaatcaataaaataataagacataccacaaattattttaataaatctatataaaattaaatcatagaaacttattatattaaattaccaattaaaaattatataattttttttttataataagaagacataacacataaaaacttgttgcgtacctaaaaacaaaataatacaaagaaatttaaaataaaaaatatacaataacaatataatatggagcagtcccattaaagaaaccctcaaaatctatgaaacttgtttcaaacatgtgaactctgtgaaaccagtttctcgatcctataaaaatcataataaaattaaaatgctaaataataaaattgactgaaactagtttcatcgagcaaccaaataaaatacacacaaaaaaatacaaaaaaaaatactaaccacaaatttaattaaaactagtttcaaacctaggaacaaaataataataaaaaaagaaacttaaaataaaaaaatatacaataacatcataaaatggggcagccccatgaaaaaactcttaaaacctatgaaatcaattttgaacctgtgaaaccggtatcaaacttgtgaaaccagttctaaacctgtaaaccccgtgaaacaagttcaaatttataaaacctattaaacctgtttcgaccctataaaaaatcataaaaaaataatatcaaaacttgtgaaaccataacaaaacttgtggaactcatacaaattataacaatcttttaaaaatctaattgaaaatcagttacataaaaataaattgaaaaaattagttacattaaacaactaattaaaaatttaaaataaaaaaaaaattagtttcataaaataaacaaattaagaactaacacatgataatcaattacttgaaacaatataaagcttttttttttcataaagtttcaaaattttacataaagaaaccaatgacaaaaattaaccaaataaaaactagttacttaaaaattaagtcaaaagctgaaatttagaatccaattacataaaacaacataactaataattaagtgtagaaataaatttaaatttagaaaagagagtaaaataaatgccaacaatcatatttgctagtgaattctacgatgctttaccagttcaccagttttaggtatgatctttttcatattttttggtcaaatacatttcactctataatcaatgtatgttgaatcaggaaattaatttttctgcatttacatgattaataaatgtattctcatcaagtcttgtctattgacatgttgttacaagtacgttgagtttattttgccataggtttattggtaaagtgttggtgtttgagtgcgtccgtagtatggcttcaagtagccaacaagcaaataggctagcaaatcaatatgaacaaatacatattgatgaagaggaagaagggatactaatcgagggagaggctgaaggagaagaactggtgtttgatgacagatggtgccttgtaggaaagttcctgacgagaagatctatagattttgatgctatgaggcatttgatggcctctctttggcagctagggaagggagtttacatcaaagaattggacaccgatttgtatttgttctaattctaccatgaacttgatatccaaagtgttatggatggtagtccgtggacatttaataagtttccactggtattccatagattgaaaagtgaggagaatctgagaatggttcatctacataaactggacatgtgggttcaaatacatgatcttagaacatgattcatgatggagaaggttgtgcatagtgcacgaggatatgtgggatcttttgtgaagtctgattcaaaacacttctatgggatttggcgtgattactagcgggttcggtctactattgacattgaaaaaccattgaagcgtcgtatgaaattgtgtaaggagaatgaggattgaattagggcaacattcatgtgtgagcatctacccacattttgtttcatctgtggaattattggccatttagaatgattctgtccgaaacattttgatcaagacttggatcaaatcgttaaaccttatggtatagggatgaaagcacaaatgaggaaaaagaattatctcatcggagcacaatggctcaaattgggaaatgaagaaacattgcctagaactagtggtgtttctcgccggtccgatgctaaaaattcgacagttgatgcaacaaaaatcatggaaattgattccatgatatctggtagtaatggtggcaccataaagattggagataagacacagggtagtaatgaagatgatagggtatctggtatggatgtgaggaatactgatagtaataatacgatagacaaagtcaactttagtgagaaggacatgacacttattttggaaaataagaaaaggcagatggatatgtaaatattgagaacgaggatgtggtaccgacgactggattaaagttagaattgatagagctcttgtttctcaacattggttggatatgtttcctactgtaaaattgttaaatttggaggtctctacttctgatcactgtcctctactcttggtccctgtaaatacgagtgctctcgctggtagaagagttttcaggttcgaaaactcgtggttgagggaacctttatgcttaaaggtggtcgaggatacatgggctcaagctgtaggtagcccaattatggataaggttaaaaattgtggtgaggtgttgctcgaatggggaaaggattatacgggcaattttaaaaaaagaatccaagagtgtaaagttgaaattcaccattggaagaaagggagagataccgtggctgttagtaactacaaagcagcccatataaatcttaacaacatttcgctgcaacgcaaaatattttggaagcaaaggagcaaacaattgtggcttcgtgaaggggatcaaaattcaaaatttttccatgccaaggctacttcgagaaggcgtaacaatttaattcagaagctcaagaataatgtgggagtttgggtcggttgggaggatgaactacctaccgtggtggccgattattttaaccaacttttcaactatgaagccgtggagtatagagttgtggtggaatgcatttaactgaaaataacagaggaacaaaatgaacaaatgcttggggatgttacattagagaagataaaaaagaaagcattgtttcaaatgcatcctgaaaaatctcttggacctgacggaatgaccccggggttttgctaaaaattttggcacattgtgggtgatgacattgttactttggtacagtctttcttcactattggattctttctaaatgctctaaatgatacaaaaattgttttaatccctaagaaaaaaatgtcggaaaaaatgagtgatcttcgacctatttccctgtgtaatgttctttttaagattatctctaaagttcttgctaacaggttgaaagtggctttgcctgatgtaatctctaacactcaaagtgctttcttacctggccaattgatatcggataatatcatggcttcttttgagattatgcattatttgaagaggaaaagggtggggatggaaggatttatggctcttaaactcgacatgagtaaggcatatgatcgagttggttgggaattttcagaagcaaagttacattgaatgggtttcagccatcatattgtctctctaatcatgtattgtgtgacaactgttacttacaatgtgacttatggggggagagttatggggcctattcacccaggtagaggtataagatagggggatccactttccccttacttattcctggtttgtgcggaggggttgtcttcacttttgaaacattatgagcaaaatcactggttgattggttgtcaagttgctagaggtgctcctcgtgtttcacatatgctatttgctgatgatagctatgtgtactgcaaggctaatgataatgaagctataagagtcttacaacttctccgtgtgtgtcaaagagcctcaatgtcagtaggttaatcaagccaactcgtccatatttttcagtaaaaatacgaatgatggcactcgggctatgatgtgtaatatgctgggaatgaatgaagctatggagaatagtttgtacctgggattgccatgtatcatgggcagaagcaagaatgcaattcttggcttccttaaagaaaaaatgcatctaaagcgggaaaagaggtcttataaaagtcagttgcccaagcattgccttgctatgctatgagtgtgttcttaattactaaagagatttgctctaaccttgaaggaacgatgtctaaattctggtggaaatctcagtcaaattctcagtcaaatccaagtctattatgcctaaagtaattttcacatctcgtttctatgccttaaagttggaagtatttagaattcagatgaaaatcttattgttgctctcagaaaggagacgaaaaattcaaaaaattaaaacttgatcaagctatatgagcaatgctattagaaaatattgtagagtcaacttatcatcataatctctcatttggggtgagaatataacacacacatgatctaccttcatgaagttaac

SEQ ID NO: 113812 - DNA, 3651 bp, Cannabis sativa
taataaactgaattattctattgatgagatcgataataatcaagtatttattggagctttgaaatataggtccatggtccccaagtcacctctatacaagtaagtgtaagatttaatttgataaaaaaaaattgagtgagaattaatttgtacgagaaataattctcaagggcaaaatagtaatttgtggaaattattattttaaataattataacaattatgaattgtgtatatgaatagtatttaactatttagttttttttaataaaactatattaattagttaaatataatattattcttaaataatattaaagtagaaatatattattttagtgaaaataatatttattttaatcctagagaaataagagattaatgagaattaattaattataatttattggcaaaataaataataaatcttatttgtggtaaaattgagaaattaattttagatcttaaaatatggcacacttgtagggcctagcctacacgtatagggtgacatataaaggtccatgacaattttggatgattattttattattaaaattaattaattatcttttaattatttaattaaatatattattggataatctatttaattataaaataatatttaaataaaagaatataattagtttctgttaatcagttatatgatattcatatttgaatttgaattaaattaaatattatttgtttataaccttatatattaggactgaacattttgagcggatttgattcgaacccggttaacccgcccggacttgacctagtcaacccacaaaatttttttaaaaaaattgttcaagcgggttgagtccaacccagtactctatcaggcgagttcacatgttaggtttttatgatcatcgagtttcgggttggacccgaacccgctcgccaaaccggtgaacaatatatatatatatatttctgaatgttttaatacatttatttacatatatatatatggactttggattttatggactatatggactatggactttggatttttatgcactatagactttgaaatattttagtttgtacttttattatcatgattcctgagcatgaagtttgatgaataagttatttgtttgttagattgacttttgtactttggtttaaaatttaaattaatacttcttttcttcttttaatctaaagaataaggctttatattatatatacttaatttagtaaataaataaagtaaaagaaataaccatttgaccatataaaatttgattttttttaaaagagttgattgggtcaacttgttgactcgttcaacccgtaacccgccaacccgcccaacctgaccttatctcgggtctgggtttaggttcatttttttggactcgaaacccgtgaacttgaaactcgcggatccgaaactcaatcaacttgtccgatgttcagccatattatatgtgatatatatcagaataacaaccaatgaattaataaaagtgaaaacaagtgaattaagtgtgacttttcaaagaacaattagggttgaaaaatacaattttctctctctctctctctctctctcacaccacacactatagtgtggtgtgtaaattttgtgttctttcctatctcatcatagtatctcataaattaagaatatactgtgattacaaaattatactcgtctaattaaatctaataacctactctattcttgagtgttcaggctgacttggaagattgtggtatgaactcttcaacaagttcttgaattggaagtttgataaattaatacgaaaagatagcgaggatcccttgataagctacaaaatgtattgtttctcttttcatgtagtttagatttaatctatatatattatgttgagatccttgagattatagttcattttggattaaattattttttaataaaattcgcttccgcttttctatctatgatatagactataaaaactaatacattttgtgcaacattaattgatgcaccaaaactatcaattaagccttcatgtttttcaatctgtgtaacgataatattgaatattccactctccttatatgtcacacgacctataaagtgggctgaactgggaacaataagctctagagccatctgtaataaaaagaaacaaaaatattaattttttacaacaaattgaaaaacaatcactttgtcatcaagaaccagccaataaccacataaaatcaaatgtgacaacaaaaaatacaatactaatcttttgctgtatcattatcttttattttaagattttcaaaatctcttctaagtatttgtagtctagttgtgcgtaccttagttgtcctttgaaactcctcttgcagcgtgtctcatgctttttttgtcgtggaaaaagattgtatgtcatgacttgttgtaagtagtataatttgtgagaatttttttgttggttatcctctaatgttttcttttgatttttcgaaagagatgtaatatcttcaagaatagtgactcattcttcaacaattttctataaattttgtgatctatttattttgatggaccaaaaattatagttttcaataatttaacttacattgagtaggttttgatatcaatgttagagtcggaactcatgatgatgaactacgccccactcatgatggtttgttaattggtatagataaaaattataatttgtatctggtttatagtgtaaactagaatatgggtctagatgttatgggaataagtagtgtataaatgacaacgttgatagttaagcttagaagagaataattgtatgtagaaagtagtaaagtttattgatagtttgcagttcttggctttgtaatgttggttacaatttaaaagcagtgtataaatggcaatgttgatgagttataaattaattggtaaatgacgatgttaatgaattataagattggtttattagatgatgataattaggcttagaagataattagccttagttgttgtgactagaattgtttgctctttctagtttagtaaatttatctactattattagagacttaggcttagttagttaagttagttatggtttgttataactgttatactttcgattggtttgttatctcacaacggactttactttactttactctgctatatatagcagaccctttaccattgtaattcactacttccaattaatgaaattcaatttctctctgctattcaaagctaataactatgcataactaaaatattctagactaacgttttaaagaattatttaaatattctataatcatttaaaaagtttagagtaaggtttgtagattttctacaaatgagtgaaatattttagattgagagtattgtagaaaagtgcaacaatgtggacttgaattagttgctgaaagttaaataatttttcttggtgaacttttcttgttgtggtcttaagagaaagctgatgtgctaattaagtttagttcatgcatacaattcataagaagtagatttttattgacaaattattgagtgattaagaaaaaaaaagaaaaacattttctacctaataagatttatctgtgcacactcacccgatcaaaaaacacaggtggtgattaacacaaatacacccacaaaaaaaaaaaaa

SEQ ID NO: 113813 - DNA, 3979 bp, Cannabis sativa
aaaaaaaaaaaaaaaaaaaattcgcctactaacaaaaaaaggttaagaaagtctaaagtaatagtaaatatacatcaataaatggatttaaatatatatatgtcattctatataagaggaattctagtttcatgcttcagttgcatattattgaactttcattgagttcttaccatatcataatgatcacttggtttagcagcccaaaggcgtagcgtaatcgtgttcctagttccatagccaggaataggattgtcataagctacagcttcaacctaagagaaacataaaccactgggatcatttaataaatatatttgtgattattaaatgatgttctctataacaaagacgaataaaaaccaaaggattaatatgtgaaagagtttataagcttacggtttctgcagggatccaaacccgactttttcttccgtccacaagttcctcttcgacagttccatagaactattcaaaacagataaataaaattagcaaaaagagcttaaatagtgattaatattaactattgatagagagtagttattgcaaaccttcactggatatgttacatgaactcgctctatctcccatggatttccaaaatttaaccagtagtcaggttgttcatgttggaaaccatccagaattagctggcgaaataaaccatattggtagcgaagtccataactatagacagataagattcaacaaattctttgatattgttatgaaaaagaaatggtgataagagaggatctaatttatttttgaaaattaattccgcttgtcaaagttagggaaaaaagaaatagcactaaaatatatttttactaaccaatcagaattgctcccagggtttataccatttcagtatcaccagcttagtaccctattatttagttaacttttaataccacgtgaatgataaatcaattcaaacaaaaaaaaaaaccgtataaattaacatacatttatatgttttatcgaaaaataaaatacaatgtattgaagttctctcttttaaaggaagctatttaacacaccaacagataaaaggaggggcaagaaaataagagccagagctggtattttattttaattttcctattcagtaacctgatgaaatagaaaagcaacacataagtcatacccccatgcaggatagtccaaagttgctagagaatccaattggcaagctgaaagacgagcaagtccaccatttccaagggcagcatctccctccttgtataatgcagaaataacacatgaatatgaaatcaaaatcaccatggaccttaaagcaaaatagatcaaaatacaatagaacttgatcttatctagtgaagataaatgaagtgcttacaacaaaatttccaacctaagctactgcaggtatcttaagttttaatagttagcataatgtgtatgttgaatgtccttaattgtcatacatccatacatttgttttttcattaattagcttgtgatgaatgattccaatggcacatattattttataaaagatggcccagatattcttgaagcacgatggcaagtgcacatacagaagattgaccacacaacttttcacagtagagataaagaaacaagtgaaaaaccagttatcaaacaaacctgctctgcaaggacttctaattcaaagccaagttcgttcagagcctcagcatattcatcccggataccaaggttaataacactatttgacaaggacctacctgagatttcaaatagcagtagatgttttggcaggaaatccatcaaaaacaaagatagttttttatacacaagttcaatccactattaataatgatctctagaacaccgagataatacaggttgggagaaagaagtcatgtgcaagatgaaaatcatctatccactttccactataagatgacaattttgaagatatgtgttgaacaatgtcagcattacagtttataaacattgcatgccttacaactttcaagcaagtaatatatattacatgatgtttcactgtatttgagattataaaggaaaatataagcatcaaaattgatctgcctcagttgaaaggatgtaatacagaccaccctgaagaaaatcaatgactctttttaataattgtcaccaaaatgactatcctgtagttaaaagtcacgcgggtatgtaacttccatgaaattagcagaaaattcatatgaagaaaaataaataatccatattacaataaattaaacgaaaatggacataaaaacaatgttgagagatttatgacttaaaccaggaggccactaccttcaccaaaaagtacatatatagaagaagagaaaaaacacataaatacccataagatactcgagtgagaggaagtatacgcgcttaggatcctccctcttgaagtggagttgagtatcatgccaacgctcgattaaccgatctctcacactatgcgacaaaccctgaaagcatcacacatttaagtaaattaatgatgatggcataacccttacaaattaacaagattcgtcttatcttcatccaaaaccttcctctgcaatctacaaatttaaagtccagctgaacatatctcattccagtacccctcaacaccatggaaaccaatcaatttatgaccaacatgtcgaaacaataagtctttcccgccaaaatcgaagagaacacaatttcacatttcccgcgcaaataacaaattgtgcagcataggaactgcaagaagtgtgtttgttcttttcttttccctttttttttcggtaacatattaatctgaaaagcttatagaagaaagcaatggccgcgaccgggatacctgatatgcttcaaaatcgtcgaaactaaagcgggacctagcgacagtgtactcaacgtgattaagaatatccttctgaagactcataggatcgttcttctgaaacccatccatcaaagcaaacatcctctccgccttggctttccgctccccggacaccaaccctgacgctggcctcctcacagtcacacccctcgtcgctgaacccaccacatcgccgtcgccaccatcgccgattgcatccatcagagcattccttatcttctccaagctctcttcgtcgacaatcttatttccgtgcgagtcggtaacgaaaaacttcttaatgaagaattcgccctcaaattcaatgctggccttatcgatggacaggccaaggactttgaagaccctggtgataacctggagtagtccgatctggttacgcgcacggatgacgaagagagttgactcttcggaatcagcattctcaacggctatcgtctccgccgacttagtggaagccggttcgctggtggaggctcgcacaggcttggctccacgagaagcagcggcggcgttgtaaaaaatggagggtagtgaaaatggcttgttcggtagccttgaaactggagggagtgagaacttggattgatgagtaatggtgaataaaggtagtgatatggccgtcattgcagaatgcaaagcaatttcaacggggaattgatatgaatcagagaaacttcgagagtgtgggtatggagattaggaactaggtataggtaagcccatggaagtgggaagaagaagaaagtttgaacatgtgatcgttggagagaatcgagctgaagtttttggaagggtgggattttcgaaacatcgaagccattgatgaactgagcaattattccaagtgaacgacctcatttaagtctatggtggggggtctgttttactagaaggccacgggatatatatgagtctgagtactgcgagtagtgggcatcccaatgccatgatacaatctaatagtaattgaatttaaaaaagggtttttttatacagcaaatatgggttttcaaaaatttattaggttgcgtttggtaacacttttgtattttaattttaaaaacagaaaaatgaaagtagattttttgtttttaa

SEQ ID NO: 113814 - DNA, 2209 bp, Cannabis sativa
tagttagggtgttacattaactcataattatcattctaaaaaattttaaataacaaattggaaacataaaataaaagatagaagagaagaattgatgaagaacaatggttgtgcacgaaaaatcctttttctctctctaatttttgtgcctctaaagttgcctaataaaaagcccccttaaatttttgtgatcagggtgtgaaaaccctattgggcctaaatttgggtagcaggtcgtgacatggtgctttcaatgtcatggcccgggtggctattttttgggcagctagtgtgcgacgatcgataattttttggaaataactctttcgatattgctcagcattagacgattaaagatgtttttggaaggctaaaagatagatctagaacttttattcaaaatatttttcttgaaagtgaacgcatcatagtaaaaaaaatagcttgaagcttcagactcgattttcgatcacaaattgaacgtgttgagcatctaaaacttagaatttttcgcccattatatcttagaactttaaatttcatgataaattcatcatattcatctcatttaacatgtttctttttatttttaatttatattaaaaattttaccctttaaacttgaaataagtagaaaacaaacataattctacacaaaataaatataatcaactaaaaatacacatctaaaacacttcatcaaatgtacctaaaactaatttatcaccaagtgcaacaaattaattagatctttattacaatcaccctttgtaatgggttaacatttgtgtacaaaaggccaatagctcatatattagccaaggaaaattggggtcaatgccatgtgcttgcttccttgtaacaattagttcatttaataaattttatttcaaaaaaataaataataataataaatacaatcaatgctcataaattatctaatgtctaatgtgatcctcttcattaattaaacctatcccaaaaaaatatatatataacaaacacaaaaataaataaatacaaaagaaaagtcaatggagaacaaaccactaccagtggcaaaactagacaaggacaagtaaagaagccaagcaaatttctttttttatttttctactttatacaactatcatttattatttcaaataaaaataaatcaggtaaatcacacaaaactttaatacacatttatgtggcaagtcaatttaatactttaataagtaggactcatcttaactaaaaatgatttaaaattatgtgttacataaatgtatcaagtttgtatgtgcaaatataatcatatcctaatataagaaagtagaaaaattctatggtgtacccttctccctatttgttcttgtatttatgagaattttgtagtctatttttctcatggttgtatatatttaagacatcatataaaattttaaaagatttagaaaaaaattattaatgtgctgaaaataacactactacaaaaataattttttttgctttgatttcttgagactctctcccgattgttgttttatattggtcaataaactgacctccatgtcataatcattcacaactatgaattgttatttgaacatggtttgtaaatcttttcaattacgaattgagtcgggacacagtctcttccatcaatcttgaatagactttaataaagttaacagattatagaggcactttgtgtcatcactggccttcactacttgcataaattggatgtatttagataggtggattctttggttcgttctgccttcgtgtatctccatctgaggcattcaaagtgtttcggcaagggtccatctattattcttcttacacatggttccagatctttttctttcgaatcaaatacgacccactttgctttcaagtaagacgctccgtaaacttggtcaattcagttatttgatcttctagacgctttgtattgtcatcatggaacttaagctcacgaactcaatcattgatatgatttttgatgtcttttccatcaagtcttgccttctcacctctagctcgatctttctttatgtttaaatgttcccgaaggtctgctgttgacaaactaccttctaaaattgggtgaacctcgtctactccatcactctggttagcaaaattactagggcaatttttccttccctgagcggtaggcctttatgttggaaatttattttaccagtatcttaga

SEQ ID NO: 113815 - DNA, 1182 bp, Cannabis sativa
catctcaggagccatcccctatcttcatatcaatgataaatatgtgttcaaggagaaaaagtttatcgtagatgcgaaatctctttggtcttggcagttaaagatcttccaacactcgaacattattactgtttccaatcctcctacctgtactctctcataattatcttctttctccaaaccaagctgctccacacaaatgaggcctttgatccacactttttccccaacaacatcaccatttggaaagtagcttgccttgagacctttactacacaatgagttgagaaactttatgcatcgatcgccttatgtgctttgttaacaacgcttggttttgcaatctcaaatctcggaaccctagtcctcgtttttttttttggtttacacatgcatcgccatagtgtatgctggtatatatatagcttgaagaatggccttaatgagaactttaatttttgcctccaaccaagaacatcgaagtctttcaccctttcactttatgccacaccctcttcttgatcacctgaaatagctctttcttcgttctacctacaaaagattgaagtcttatagatacttcccataattgtcaacagcttaaactcccaagagatcagatgttaatttgcttcgcataggccctcttacttttttcccaaaacacatttcgatcagactttggttaaaaacggcctcaccaccaaatctggtacaccatgctgccagagcagccatgatcatcacctatagtcttggcaatatccctcacaataatatgtgatcaatatatatcaactccataattaaccaaaatttccaccaaacagtgaaacctcaacgtgacatgtgacattcaaaatacacatcacatggtctgggttttctcttccactcagcagatacattagttatattaaatctaagcaatctatatacatctttcatgagtaatctatcaacaaccgaaagctatagtataaatctattatcatgtattctatgttcgtacgtattcaaaacaaatgtaaagaggagctaatatctttttaagatcttgtatagtcttacaaaacagcctctcaaaaaaaaaggtcgtactttttttttattattattaaatcaaaacaattattatatgtatagagatataattttgtcccgttattgtactttcacgga

SEQ ID NO: 113816 - DNA, 9544 bp, Cannabis sativa
  modified_base (8976)..(8979): a, c, t, g, unknown or other
  modified_base (9273)..(9282): a, c, t, g, unknown or other
gatcacctattggaataaaacactcagaaaattctcatctcttctctattttctttctctaaattataatattacataatactaatatttcataatattaataaatttttagcaaattttgaatgtatgtatgtatctttcataatttataagacaatacttattttttctttgacaatcttggattattattaatttattattagagtaatgataatgatatgtatgtgcacatacaatttacaaaaatttgacacaacatatgtgaagacagagggtgggaggaaggaagcagtatcacgtgaggttggatttcaaactgagattagcacgtggcacctgatttgattttgaacctagaaaagcccccaaaaaaaatcaaaacgctgcctgctcctctctcttctttctcactctgcaaatcggaaaacaacaccatggaacccatactcatagactgtgttcaacacagtcttcgcgatttcatgtactccaacgccattttcatctgcgagcgtctttgcgccgagttcccttccgaggtacctttctttcaccaaccttaccctttctctatttccttattattttattctttcccgggaaatttccagaaaagatcggggatatcaaatcatttctctttttatcccaagatggtgttttttttttctctgggttctctctggttttgcgtttctcagcaatttcctaacgggacgtttactagtgttaattatcaagatcgacgttccttactatttaacatttttaaatgttgatttcacatgtcggggtttatatttgttgcctgttatatataaattgctattttatagaattcatgttgttctgtacatggtttcaagtgattcatttgtttcctcttcaactagtatatttttacaagaaattaggtgtggttaaaagtcttatgattttttgttttttctttcaaaatttcaatgtttttgagctcagaactgaaaagggttcgattggatagttaagttgttttatagtgagctctaggtaatttcataaatgggatttctttaccttgttttactagttatactgcactgaattggtgcacatacacctgcccaacagtgttaattaaaactcaattgatgtttcttcaaagatttcagtgaaagattattcaaccagtgattatttagagaaatttatgtttcttgaagcttttggcttttagctctattgctgttaggatcatggtgctccgcttattgtcatctgtttgtgacattattctttgcttatttttgcttaagaaaacttcgttcgatttattaaattatatgaaagttcggtcctttatgtggaatgtatattttcctttcctgcagacaaatttgcaattgttagccagctgctacttgcggaacagtcaggcatactctgcgtaccatattttgaaaggtacatatgtcataaaatatatatctttagcttactatggttacggtttactattttttcattttgcttgagtttgattatttttttcctttacactattatctgaaggaacacaattggctcaatcccgctacttgtttgcaatgtcttgctttcgaatggatcttcttaatgaagctgaaacagcattgtgtcctcctaatgaacccagtgccgaggtagtggatgagtttttatttggaatttatttcacttatagactgtaaaaacctatgctttgtctataagcttaaactacttacagtctagcagcaccttcattgcatggtttcctttaaatagagaaatgaatggcagaatatgctcctttgtctctatcttttgtaaagtttagagtttgttggtcttcagttggcagaagcagataactagctctattgtttgtcttgcatctccaggttccgaatggtgcagctggtcattaccttcttgggcttatttacaggttgcttagctatgatcttataatgttccgaagctttaaagggctgtagggcatgttactaagttttatctttgaaagattatgtgtttcttctaatcatttcgtctgagttcttctctaggtttttctagctaaatataattagacctcctttcattcattattatttgcatcaatttttaataagatacatgcacatggacttggcatcttctgatcattgttattcacatcattctcgacatcggttttggcatttctctaaaagctcaactagacagacacacaagctgtcctatctatgagcactcactctttggttgaaccatttcttatatgctagtgctacaactagtgatgcttttgattgaatttcttcttgaacttttgatgtcatacatttaaaaattgggtagtcactctgtacagattgtctgattatgtatttctaatgatttttttcttcttctatagatagatatgtttcttaaaatgaaaatttttggctttaattttaggtacactgaccgaaggaaaagcgccattcatcacttcagagaggctttgtcaatagatccattaatgtgggcagcatatgaggagctttgtgtgttaggtctgaaatatatatttaaggtttaattcccagtgttgttgcactggtggataattgatagttccatcttcactttgaagccattaaactttttattgcttaatttataaccaacagcggatcatatttttctgagaactttgcaaggttggggtcttaatttttaagtgtaagattatccaacttattaggaatttatgaaaatgaatgttactcataactgtaatttatggtggtggtggcatgtgcccttgatcaatatatcaacgttttttctggaataataatctaacattggaatagggaccaaatatgcgattagttatattaatttgaaaaatcctgacactttgtttagttctgcattatcttcctcgttctacgatttattatgttcattatttttttacttcataaagtttcaaagatcttggtttcccaacttgcagagtgaaagtagtttaatggggctcaattagttggggtgttttttctcaagttgaaacataattgtaagatgtattgaatattatgcttctaatttagccattgctggttcttcttgaattacaacatttgttaactgatttagtttacgtttagacttttagaattatttttaagtgcttagtgtcaatgtttgattctctttatccatttgcacacatgtccttcttgggctcattttcttgtttattaggtgccgctgaagaagcatctgtagtctttggtgaagcagctgctcgttgcttacaaaagcaatacctacatcatggtttaggttcccaaaatttgcacgtgtcaaatgaggatcgcaatttttcttctgcgaggagcttaagcttggaagatttcagtcccaggcacttgaaacacatgcaaggcagtaacataagagatatccctggaaattatcataatagtgctgttataggaggagcttctgctcagtctctaactggcagctcttctaacatgccattttataatacgccttcaccaatggccacacaggtaatgatgataattcccttctgttttaagcatcaggttaaaaacttttattccttagtttaaaacgaattgatgtgttttgacctgaaggggtggtctagttgtaaggaggaactttggaaagctctggtaggcatttgttccaaggtttgaattccataggctcaaaaaaaccttggggccaataattaaaataaagaaaaaaaacaaaacaaaaacgaattgatgttgaagaaattaaagatgtgtgaatttccagcttgagtaattaatttatttcattagaagttcataaaattttttatattctcaccaaattaatgtaggtgtgagtatatataaaagtggtgctagtaggttttaagtatttaagatatatcgtatcgacagagcttgggggtctttgcatgaataggcagttgcacttaccattgtctttgtcttgtgattcgcagaggaggaaggaaaggaataaggatacagtttccattctttctccaatctgcaccatggaccatggccaaaatcacattttttttaattgcaattactcaatctgtcttattttatttcatcaatattttgcagatgtcaggtgttgctcccccacctttgtgtagaaatatgcagcaaaatgggccgaacctgaacacagttggtgctgatagctcaccaaagtcaactgtgaattctactgttcaagcccctcgaagaaaggttgtagacgaaggaaagctaagaaaggttaggaaacaggtcctgacatcagaacatatactactgctctgtcataactctgttttgatttcatgatttgtatatacattttggcgttttaaatcattttactatttccttgctgtagctgtttttacattgtttgcttcccctagattccacattattcaattgcttttgtttttttttttcagcttcttcttagattgtttttctctttcataattcaagtctgtgtttgcgttgtgcgactcttcttggttccacattatgcatcttccatcgctttttttcatttgtaattattcagctccttcttagattgtttttctctttcataattcaatccgtaaaccatttcatcagtcatttttgagtgattgtataaaacttgtccttaacgatctgtccctttcgttgcagatttcaagcaggttatttattgattctggcactcgaaggagtacaagactttctgcagatgcagggagtaatacttccacaatgatgcctggaaatggaaatacaaacacatctaaatacttaggtgggtccaagttgagttctatgggattacgttccatggctagtcgaaaaggacaaacatggtccaatgaaaatattgatgaaggtaatatttctttaatctttcttatttgatgagtgaaattaatttataatgattggaaacaaaaccacccttagttttttttttttttttttggctagaacatcagttcaaaccaccctcattaaaggtaataaaaaagagaagaaactatttctttcaaaatctttgtttatgatgcctgaattttgattttttttaggaatacgcaatgaaacttctgaagactcgcgattaaatgtaacttctagttcagcagttcctattgatagtagatctcttgaacatgatggggcaagtgctctgttgaatacctcaagaatcatgttgggaacttccgaaatattgtctcttttgggaatacttggagagggctataggctttcctgcctctatcgatgccaggtagagccttggttattgttgagaaagagttcatttccttatttctgggtttgcatgggttattaatctttgtgtttcaggatgccttggatgtctttctcaaactatctcacaaacaatataatacaagctgggttctttcccaggtaacttgtttcaaagctcttattaccactgttgcattggttttgacttagtcctctattgtgcaactaatgcatgaagtgatccaatccatcttttgttgtcagtcttcctcctgttgctggaaaaatggttaagtttattttaaactgttgaaaaaaatcaaatctaatcacttttcttcttcttgctaatttttgattttataaatcaagctctttttattattatagttccatcttaattttgtgcagatacgaaccatattaaatacacgacttgatatgtgtcttgtgctaaaattgaatacttgcttctgccaacaattgggcgttttgaatgcaggttggaaaatcatattttgagttggtagattacttagaagctgatcgtgccttcagtcttgctcgtcgtgcatcaccttacagtttagaagggatggatatatattctacagttctatatgtgagtcacgctacttgtataatgacatagaaatattgacatttgtctacatcagatttagagaagtagttttgtaaaggcacctcttgggttaattaaaaatgtcctttatacaaaattagtttggcttaatagtcaatagcatttgctgctttttggttattcaaggtaaaccatacaattcaccgtgatacaacaaaagtgcaaataaactgtgactttattcctagcattggcaacttttatctgttaagttttaccatgcactgatatgcttagaaactttagtacctctctgaaagttattgtgatctatttttcagcatttaaaggaagatatgaagttaagttatttggcacaagagctggtatcaacagaccgtttagctccacaatcatggtagctttatttactttttcaatagtattatatggtcaacacaaatttttttctgtttttcacttgtttatttagctcttatgcttgtcttttttgttcttagaagtaattttctgttgctagtaatgtccttatgtctttcctactgaatgcaggtgtgccatgggaaattgttttagtttacaaaaagaccatgaaactgctctaaagaattttcagcgagctgttcaacttaattcaagatttgcatatgcacataccctttgcggccatgagtataatacatctttcattcttctctctctccctttctcttaacattatttagtcactagtgtcctaaattaacttcttttttcttctttcttttttttttttaaaaaaacttacggacattatattgtatatgctcgtcattcctctcttctttgtttctttgtctgcagatatgtttcactagaggatttcgaaaatggaattaaaagctatcagagtgctctacgtgttgatgcaagacattacaactcctggtatgggctggggatgatttatcttcgccaagagaagtttgagttctctgagcatcactttcgaatggcattccaaattaatccacggtcgtccgttatcatgtcttaccttggtacagcattgcacacattacaggtttgtgtttgtctgcgaattcatttgtttatacaaatatagcttcctggaaaattgttgtggctaaagctttttattgcgcacaacagagaagtgaggaggctttgtcaatgttggagaaggctattttagcagataaaaagaatcctcttccaatgtatcagaaggctaatatactcatgaacttggaagattttgatgaggctttagaagtcctagaggagcttaaagagtatgccccacgtgaaagcagtgtttatgcgttgatgggaaggatctataagcggcggaatatgcctgagaaagctgtgtttcattatggtcttgccttggatttgaaaccctctgcaaccgatgtggctaccatcaaggtgatttgctgctctctttcatttatttttatatatatatatatatatgtcttaggactccttctacctgcaatctgtctatgttttaccattcaagcacatcacatttctaagattagactctcagaacatctcaacttttaatgaatgatttaaacataactaactttgtttgccaggtccttttgcattattctactatttcagtccattctcatttatctgccatattctcggacataatactaaacctttaataaaactatgcgctcccaactattgccccgagcttcatttctaatatttgtttttcaataaagagcagaatacatacatacatttttatcgctcgtgtctttgctgatccctactttgaacaggctgccatcgaaaagttgcttgtaccggatgaactacaagattacttgtagggatcgacattgttcagaatcctgtagattatgagtctcagattattcacccccgaaaggaaattggcttgtgcttttggagaagacagtgattgagctagcagggctaaattcgcttgctccaaatactgctttccatttggcagagattgtttataaatgatcctcagttttgtaggcaattgacgtaccagcatgatctcatgtagcaaagacatgaagctgccgcagtcgtacaaatagaaatagtagtaaaatgatattgagagaagttcttgtaccattaaactcttttttaactcttaccttctttttttctttctaatatttcttccagcttgtatcattatgttgagttaatacttgttcataatttttagttccttacgcctttaaatttgaaaagagtagattttttctttctataaaagagtaaaaatatgtgacacttttaatatcaaaaacattgcttcttcttcttttaatatcaaatgaatctctggttggaactttgaacgatgtatggcccaggcaggagttatctgataaatacaaaaattacttgattaagagtacggggtttggtctgcttacacacatcgagttatgagccaataaattgtattgtaattgtcgtttctttttttctttttccaatcagtctcaaattgatgatgctgattttttgtgaattgttaattaaacagcaaaaagccaatttatatattatctgaaatgaatcatgatcttcaaagttcaaagtaccctcagctttctaaattagttaggtcattgactcagtctcattgttacatgtggggctctggttttacatggggtttgttttatcaatattaatttagtgccaatctgctttatttttgtgtgatcacttcaccatttacgaaatcattattataccaaatgtttcatacatcgtaatcataatactactataaaaaataatgaacatacaattcggttaatagtgaccaaaaaaaaaattaaataattacataaggtattatttgggtgaagggaaggtgggttgaggggggtgtgcctgctggtgtggttatggaggtggactcgctgctgttggtgcgagccgtgcaacagaaaaagcatttgttgtctccggtggggnnnntaatttcggattgtgttgctcttatgcaatcctctcttttgtttcctatttcaattagttttgttaaacggcccgggaaccaggcggctaattttttagctcgttcttctggttctattcctggctatgtttcccgcggggtattgtccctgttggtttggaagctatcttggtagctgatttgatttaataaaatttaattttttggttaaaaaaacataaacacaataaaaaaactatataaaggtaacatgaaaataatatctaaataatatcaaaacaacaacaaaaaannnnnnnnnnataacaaaaaatcaacaacaaataaataagagtacaacataaaaagatcgtgttaaactgtatttttgtaatttttttattatttttgtgtatttgtagaataattccaaataaaattatagttatagttagaaacatccaataaaaacatgaggaaattatgtagaatatggatttcttttctaaagtttgataaatatggagatattataattttatttaatttatggcttttttctaatttgggttagttatatggaat

SEQ ID NO: 113817 - DNA, 3270 bp, Cannabis sativa
gagagagagagagagagagatcatcataggttagatcattcaaccaatgacagaagagaaaaagagagcaaattactacaaattgggaaattccacaaaaagtgaaatatatgatcttaagctagcttgctagcttgattgctttagctaaagtcctaattaataataaggtcgcaaaaagtccaaagtccaacccccccaagtcataagtctggtcatgccatttgaaatcttttttctctcaagcttctgcctcttctgtaatcaatttctgcatctgagcttgacattcccattggatatctcctcatttttgatgatgagaatatgtcttcctcttcttcttcatctgatatcatcatggcctctcctccacttgctgctttattactatcaccaccaccaccttgtacccttttgtgatctgagtgagaaaagcacaacaaacaaaactaagtccatttcccaattcttatctattatcaatataatatagagcataaacatttcaatcaaaattcaaaacaaagatttgagtggctttacctggcctcacttccactgggggtttcatggtaaaggagtcttccatgacatcagaaatctcaacatactgaggggttgtgatgatctcatccgcactaaatccaaacgatgctctataagcttcaatctcctcggcatcttgcttcgggcttttcatctgcctactgttctgattctgatttccattcacagcagcggacgaggaggagttgtgaacatctgaatcttttgaaacactcaacctcccaccagaattcgggaagggcgggttatccagatagaactgagcaaacgtagcagggcagaaaaagtttgaatcctgagtggatgccaccgctgaggctgcacccgcacccgcacctgcattctcatggtccagttcacatttaccattttgtggtgatatgagactactaggagttggaggacttccagggtaaagcgaataagtagcttggagatcgtttgccccaatgtagctagtcttgttgccgctaccagtagaggagaggaaatgggcaaaagggacatcaggggaagatggagtggtgaggtgagcaagctcaggtgggggtgtgagaggagcagtggatggctcagtagtgaaggttgagaaaacaggaggggagactagttgagtctcatgggcataaggaccggtggcgtacatgctggaagaagggccaccaggagagttagcagagagcgacaagaacccattggttggggattgagcggtagaaggaagagcagagttggtgaaagaggctggggaagaaggtggagctaagagtgcagtgggttgggaaggtaggccattgggttggggaccatgtgggtgaccatgaccatgaccatgaccatgaccatgagggtgaccattgggttgggttgctgacccattaccctccggaattcgagaagccggtacaattcgttttccacctttttgggttccaaaacaagataaggcactcaaacatcctccccatctctttcgctgtcaaataataaaatctcaattcaattttcttttcttcccttttctcttttctctcttctattatatgaaaaagaaaattcaacaagaaaatacagaaataaccagatctagactaataaaacctcagatctgagaagaatcccagatccaagccattttactttccgacagagataatatataataaacatatatatatatatataaataaaatgcttacccgttcagcttcttggtgctgaggaaatctattttgctcggagcccattaacagcaaagaaaagcagcgatggatttgggtgtcgaaactcaaaatacagtcactcactcactcactcacgccaaagctcgagctcttctttttcatttcattgtattctccacacacacagagaccccaagctcaagctcagctcacaccatttgggttttgtgcttttcgctttctcaaattctcgcctactcaactcactctcgcttcttcttctcttctttttcttttactaatgaatctaaataaatatgtattaacgataatatatatataagattatttccttattagtaatatatttaagtaggtataatttatttattacataatagtaaagagtaatattagtagtagttgtcacacaaagaaaaaagaaaatacaaactaaaaaattataaaaaaggaagtgtaatagtaatagtagtagtagtagcactttttctttaatccatctttatataaagagtaaagagaaaaagaggcaagactaaagagtaaagagtaaagaaatccttttttatatatataaagaaaaaaaatgaaatgggaattgagaaaatagtgagagggaatgaatagcacatcaacaaacaaattgcaagaaaaggatatatattagatgagacagacaaaagacaaaagtgaataaaactttcatttctatttttctttttcaattcagtcattgctttcctttgttctctctctcatttaatacaaattattaattagttttatgcttttattaactcatttaatatgctccattattcacatcaaatcacatgtttcctattgtatttttacttaaaatgttcattgatgatatcatgtatgagttcataaaataatcgaatttttataatttaatccaattcaatgtggatttgattagattgaaaaatctaaaatttatatttgtgcgaatgttaatttaatgtaaaaataatcgatttaattcaatacacatatttatactaatttaaagataatagatcaaatgtataatttattgttatttataaaaatatatatataatctaaaacaaagttaaatatttttttatatacacaatttttttttcatattttaaatatgttatttttgttttatttattttaatttatttttattggcataaaacaataataatttattttattttgttgttagttatgtgaagaaatatatttttttttaataaatactaaatatttcaatattaaaaagtaattaattctatccgtacttttacgaattgaatttaagttactatgcagaagcccagccctgggctaaggtgggctaggcttgtgcctaaggcctactcaaacttagggttgttcatctgattcaatccgcacttttttggtcaaacaacatccaatccgcacttagtgcggatttattttttggatccaatccaatccgcacaatagttcaaat

SEQ ID NO: 113818 - DNA, 6476 bp, Cannabis sativa
agtttcctcctcccttgaagaatcttagccctggctctagcttttggtctttgatcttctttttcaaaaaaaaaaaaaaaaactaacttgcgcattgttttaactaaatttcctccgtgttaaatcttcttagtttataaatgttatttttcaaataataattatcactttgtccataaaaaaaaatgaaacaatttatgatttatttgtaatctaaaagttattataggagaattaatttatgtaccattttttaactttttttttttaatttctatgtgtgttcctatgtgaattatgattacgatttaaattgctctattaattattatgttggttgctatatgaatttttcgtataaataataataataaaaaaactgatttaaacaataaaaattaaaaaacctcattattatttattatatatgtagagaccaataaactaaaaaaatacatatttttgtttttattttatgcaataactaatcaactaatcaaaacattttcaaccatttttgcattgaaaataataataaaaattataaaatttcaaagtaacatttttaaaacaaaaactaatcaactctaattaacggaatgatttccaaatactattaaaaaaataataaaaaaaaaatttgataatattaaagagaatgagaaaataaaagggaatcatttgtgatttatccgaaatatcggggtaatgttgtaaatatttataaatcaaaggaccaaaacgcaattaattatagtttgatcatcttctttggagaagtaaaagacgcaattgacacagaagaaaacactgccaccactctctctcccctctctctctctcttgggttcttctcttcttcactgctctgatctttggtacgtatttatattttccgtatatatagttatcgatacaatcgttgttgttctagttcaattttgtgatttttgtatggaaatgtgttaatttgactggtaataacaatttgtcatattaagcttcgattatcggttttaaatcagtatttttgtttaaatttcgaatcttttttgggggtttgaatgatttttgttacttattgtatagaaattaaaattcagatgaaaaaaattaaaattaaaatttaaaattgatgtgtttgggttcttatggtgataatggaagatcataattttggataaataacttctaatttagctgctttaatcctttcaaagtattgattttgatgcaaattttatcggggtttgattagtttttgtttgttgtttagaaactgaaattgaggaaaaatgatgggttttgggccttatggtggtaatggaggttcatatttatcaccatcatcctcaagtttatcagcttctgcaccacctttcactattgatcgttctggtcccaaaccttcttcatgccctcttatggatttggctgaatcatcttatcctggtgctggtgctgtgaattcttctatgcacaattggctcccttctcttgctccaacttcagaaccccatttctttcccagtactcaattggagcacaattctgggccatcttcaaatgcatatggttatggaggctcaccgcctgttgaatcttcgaatttgagtacccatttgcctcatttgagcaccactgtctctgcttcagtggatggattttcatatggtcaaccttcagacagtgcgggggcgactggttttgttgaagccaagccgtattatccctcatttttttcatcttcaggccacaaagatagtggtttgaggaatcctgatcaaactagttatgactggttatctacttcttctcgggttcctagtgccttggtcgggtcttctaacagcgatcaacctgtgaagtttttggattcatcgtatgcaggccaatggggtgacatgtggaatggatttgcggaatggaagcagggcaaacagggacaacttaatggaagtttaggaggctccaaggaaactggcgtgcctgttccatcgatgtatgagaattacatgaaccaaggtgaaggtatacacttaaatgtataaccatattcatgctaagtttacattataactcaatctataatgtgtttttggaagttttctctattgcctttctttatactattcttgaaactttcacatggatgccggtttcagaatatcgaatgctttagtctgcagatacatggtttaatgttgtgcagtcatttcattttcacattagcaaaatttgttggaaactaaggcagaaacataaagtagtggatgattttctcgtacttcatagactccttagaactatgtttgaaatcacactcgcaaatcagcacaatgtacttccttattttgaaatcttgaacatagtgaataaagtagccttaggttgttgtacttctgtcgttcatattgttgcttgtgctagattaacatactagctagagaattctgtgatgcagattaacaccattcgttttcttatttctaatattttatgttgcagaatctcataacccgaaggtcttgaatagaagtgaagaagtgtcccgtggcgccaacttccaagctccagagacgcatagtggatatatgaatttggatatgatgttaaatctatcctccacagggaaaacttcagatttcatgcctatggaccattcaaaacctatcttgggatccttttcaggacttcaagagactcatccagagtcgacatccttcatatttggcacaaattctgggaaccatcaaattccttatggaggttcgaatgagaagcgcttgaaacagaatattaacagtagtgcatctactgtgaagtcatcccctgtccttgtcatggggcttccgacaaataacattccttttaaaacaatgaatttaggaagcaatacaactcatgcagttgtgtccagcaaaaaggcatgtgacataaatgatcctcattcacaactaagtttcggaggcaatctttgttttgattcaagccgatttgacgatcctatcacttcacgatcattttttagtaaaaaggatgagacactaaacaaagagtgtatcactaacgatccatcatgtcaaatgctgaaagtgaaatctggagttcaaacttcaaatgtaagtcatgatggcttcaatttagaccttaatgccaatgaaagcatcaatagtgttgcagattcatctgagagtgttgagcatttttatcctcctgtggactcaccgtgctggaaaggagttgctcgttcttctcctttcgttgcatctgaggatgttacagaaatgagaaaaccggagaaacagacattccctctcaatacttgtgagaaagtgtcccccgagaaagcaatagaaaacataaagtatcatcaatttgggtgcttggaaaattcttcagagattcctttgaatctatcttcagctataaattcagaaactagagaaagacaatcagatgatgttgcaaacaccaactattgttcagaaactaaagtgattaagcaatctgatgacaacaacgaacatggaaggtccatgggattccttgactcgaaaacttttcaggcctcaaaacaagattttcagggagatggattgacatctgaaaataacaatgaaacagtgcaattcgattcatcatctttacgttttcctgttgaacatgttagttctccttttgacaaggatgcttcttctaagcttaccaaatcaaatgaaggacagtcaactccaacagttgatgttctaatgctggttaatacgataagcaacttatcagaattgctggtgtcccattgtacaagtggcctttacaatttgaaacaaaaagatctcgagtctgtccaaagtgcgattaataatcttaatgtgtgtgtgtcaaacaattccgagaagatgattccaacaacttcttccgaaaaggacacttctgactatcccagagaacaaaatgatattcataaggtaagatacttaacaatttaatttataaggttttagtttcggtcaatacttcgaacttctactatgtttgttggctgaataactttttcttccagggtgttactgaggacagcccaaaattgaccaaaaccataatgctcaaaaatctgtttgactgtcagaatttcaacaaggggaaaagtaatttcttgtctggtcagaaagatgatgaaatgttcgattctgcttctgtgaaggatgatttagacatggaggatgaagataaagctacccaggtactgcgcttttagttttttcttgtatagagcaaccgaagaactatttgttgtttctgtttcgatatgatgtaaatgaattctaattataattcttgcttataaggttgcgagtaggggagcaggttttatgaatctttactttttagtcttctataatatttttgtaggctttaaagaaagttcttgctgagaattttcccgtcgaagacgacaaaactgagcctcaaacagttttgtataagaatctttggctcgaggctgaggctgctctttgttcccttaattacaaagctcgttataataggatgaagatggaaatggagaaacttaagttgcctaattctataggtaaaagtttttatgaatcttccattgctaaatcaattgtaacaaaagtatgactattatttattagatgcaggtgaaaataccaccgctgctacagatgtgaagaaaccgtcaagttctgaggcatgtcctgatcaaaatgcagttgaatcacctaaggccgagggtagtccagccgcaagaagccacagttctcctgtcttaagctctgataaccaagctgatgatgtgttggctcgatttcatttactgaagtgccgtcatgagaactcgaattctgatactgttgctaatgtggataaaccatcaagttcccagttgtcttctgagtcgaccaatgctgtcaaaatacttgctgacgcacatgaagaaaatgttggaagccgaaaccccgagaatttatctttactggcttctaccatgcgtgacacacttaacccaactaacaaatttgaggcttctgttctggccaggtttcatatcctcaaatcccgagttaacaatcataaagaagcatcacagtcaccagatattgttaatctcggattttctagtgagaatcgagagtggccttatattggccaagaggctagaaattcagatgtccagcccaaggcttctttgcagcatcatgctgctgacagcaccgaaggccaattaatcgggagcgatttcgacatgcttgtgaacgatgattcttccactcaatctgatcacactaacagcaacagggttcagaatgagaatttgctttttgcaggttggctcgatagggtgtcatcggattgggaacatgtaaggaaggaggaattcggactgcaagtgggccccgtccctgccaccactgctggtgattattatgaatgatgctgctgttgctgtcatggtgggactgtcttggaaagtttatgctgctataatttttgtgcatagtatttagaactctacttagatttccacaacttggggtgttttaatcttaaaataattgatttgttgagacctggaacttacactctctctctctttcagtatctttgttaagacctggaaccatatgaatgatattatctatgtttatattatcaaaagtttcaatctgtggattgtatatatatattatctgatttttatcatagacaacatagtatttgcacgtagggcaatgctctttagggatggaacacaattttcatattctttataatattaaaccctactgattcgatgcaaaacgaagaaccttattaagcttgagcgatagttttagtagtctccgagcctcgagctctttcgagacttcacttgggtctaaccctttggcccgattgactacatgttcaaggaccctttggatttacttggcttctccaaccaatgcttatacacttcattgtttgtatagtttattcattagggtttggatatgtatccttcatgcatatacaatatataaatatgtgaatcactttagaggaatagacatgaaaagaatgacccacatttacaaagaagaaataagataaaaagaatggtgactattttaaggcataagattagtgtgtttcacaagtaaaattgtcatatcatatattaaatcaaagcgtaataaagaaacaaaagtgggagattttcttagattacatcacacacaaactctttacaaattaacttgacttatacaagtgttgatttcaaatattttttctcaaaaatacaaagatttcgattgttttgtatatcatatattgcccttgcagcaaataacacacctgttatgagattcttcttcttctttttattttagggcattttacaaaaatactggatttggggtaatacttttcaattttactgccacacggcagaattaacatttata

SEQ ID NO: 113819 - DNA, 6069 bp, Cannabis sativa
  modified_base (5977)..(5978): a, c, t, g, unknown or other
aaacttacatagtatttttgaaaaaaaaaaacacaatatttttttaaaaaaattccatccacaataaaaaaaaataaaaaaattaaaaatttcagtctgtggtgtaaatatctctaaataaacagtgtaaatagtttagtcgcatttggttagagggaatgaaattgaatagaatagaaaggagacaatttttattctattcttttgtttggttttattttaaaatattagaatattatttttattttagctatattttcatttcttctaataaaacgccacttaatggggtgtttgttatgtaagtttgagttaaagagagtagagttggagggagtagacttggagaaaatatgtaacccatgcgtgaagggattaacattatcaccatttaaattaaaaatgtaaaacctacttggaaacacaaacccttatcatttaaatttaatttaaatgttacattctcattctaatcaagtctatacatcatatttaagtttgtaagtgtcataaatttaatatttatttttagtagcataaatacttaatatttgtaaaactataatttctttctaatttcgccagtacaaactctattattgtcttaaatatgacacatatatagcttagtaactagatcattgagtttagacaaaaacatgtagtatagacgctctttaaaaaaatttgaaaaaaaaatatatattcaatttaattagttacgacatatatttataataaaaaaaataatatttatagatataatattaattttagtgtaatagttaaactagattacatatatgtatatatgtagaggtcaatagttcaaatgttactaagctttacttccaaatgtttttcaaataaatttaaaaaaaatactatactgaaaaaattagaataaaattataattttataaatattaattacatatcctgaaataataatgtttttcaaataaattataatgttacaaatattaaatgcatacgatcttttataaatctaaaacagtaatgatgctaccacatcatgacttatccatatcgacagtaagtaggtagtgcatgcttgcctctaactattcacctattttcgcgcgaagcaaccttccttcccaaactataatttttcttctctttccttttaagaataataatttgttaataaaattaaaaagagacaattagttaccaagttagaatctgttcttgtgagctattttattttccataaccaatggccaattgactttgatattttattgtacaaaattatcttatttacaggattcattgaagccttaaaggaccacaaaacaataaatgaccaaaaagctttcaaaaaaaaaaccaaatatatatgtatatatatatatatatatccatttctaaggtacaatttaagagtatttagtgaatcatatttaatggatttagatccaactaatttaatccaattatttattagatattgaattgtgttatctgatccaacccaattaaattaagtcatccaatctgatatcatctgatcaaatagatgtattggattgaatcggttccaattattggatgcattaattaattttttattagattaaatttgattggatccatccaatctattttaactaccatttaagttgattttattaaaatatatatatataaaatataattgaaaatctaataatctaacatacacaataaacattagtttagtccaatttaattcttatgatcttataataaaatgctaaaaaaactaaaatttattcaatacgcattgacaattttattaacatttaagaggatgagaattaatattttagatttaatgttttttttctaatctcacgtgttacatatatattaaattaattaatatatatattaaatatataaaattataaacgtattttaataatatataaatataattggatgatcattgaatcggttcggttcggtaatctattagatcggatgtcccatccaacatccgatcttatctgattggatttttaaaatttacatccgatctgatccaattataattgaatatccaattctattggatcagttaaaattggatcggtcgattataattagattaaatgactttctgcacacccctaatacaactaaaaagattaggctactacattatagttatatacagggaaatggtcaacttagccaaattatgaattatagaattagaaagcttattacaatgagagaaatgtaaaacattaacaaatgtacagataaaaaaaaatatcaacaataaagtaacattaccaacttaagcaagtaaatgtgcttttttgaaaagagtctcacacactcaagaacagtcagataacacctccgcaatctagaaccccaaccgagagcactaagtcggaccatgaagcacaacaaggcattagccactagaggcgtcaaagcagaataaataggaatagacgtcgaagcaatgcaatggctggaggaatcatgaaccaccaccccacacccgaccttcatattccactactagaaaatttgtgtatagctttagttttttacaagagaaaaaataaaatccgaagataaaagtaaggagaaaaagaaagaaaaaaaaattgcggacctatgtctttggttatgttgaaataaccaaagacataggtcatgaagacctttatcttcaattattttaaggcttatgtcttcaattattttaaaataactaaagaaatatgcctataaaaccgtaattttgaatttgaaactctcatttcttgcccagatcctgacacatgcggatttggtctccaccacccattgtacgtcgactacttgcccaggttctataatagtggggaggcttttttggatggtcccccacacgtacatggtacggggtgtcctttgtcccgtatcttcatgtcttacgtcctaaagttcattatgcataagagtgtgtagatttcgtcatatgtcctttcgtgagtagctaataggaggagacaaggctcttcttgactcatcctctcttgttattacatattgaataagaacttttgttcaatgagggtcctcaagtgatgggacctctcacgtgagtgagggccttgtgagaccatgtcgtgtgagacaaggaggctccccgctagagccttgacgtacgaggaagagaccccctcgctgggggttgtagtgggcgaggaggaggcccctcactgggggccgtgcgaacgaggtagagaccccctcgttgggggtcgggtcgtgaggagaggggccccctcactaggggtcatacgagtgaggtgaggaccccctctttaggggtcggtcgcgaggaggaggagcccctcgttggaggtcgtatgagtaaggtgaggaaccccttgctgagggttaggagacggggaggaggcccccacactgagggccttgtgagggacccccttgttgggggtcgtggtgcacgtgaagcgaggaagaggtcctcgatgggtcttggagtctcttctttgtctccaaaccttctattccttccaggataaatgtatagataagttctcttactcacttaacataggaatctaggaccctttgtcgtgttaatgtgccttattcttcgataattagattttctgtatcaaaaatattctctactataataatatatttatttgttttgcactattattgaatggtaaagtggtgactatttggaaatcaatatatatggatgagagaactaaattcttgtttaaagaccttgtcttgttaaatggacaagtttaatggataaatctattttgaggcaggatatcaagataatgactactataattctcaaaattttcaatttgaaatattatcgttagtcaatactacgtgagagatcagtgagagcaatgtttatacggttacttgatatagtacattgctcatattttatgatcctgatcgattttagagtcgattaaacgattatttgactatctctgttaaacaaagaatctgtaataaacgttatatggtctaagtatttagattcttcataatgatatcaacaataatagactgaattttcttatagtttgcattgactaactattattgtaattaatatttcgattttattaagaatctttaaattgttaagtgtgttgtgttataaaaggcataccgtccacgtgtatagataataatgagagatcaattttgaaattgtctcacatatatatatatatatacttattgaaggcggtctagagttcagtcaagtatatacattactatcatgatatctgttgcagtcatgctgtattggtacttgagttgtcatccttatggtattaaggatatgttaacaatcaaaaaactaacattgtgaaatatagtagttggtttcaataatttcgattggaaatgttgtatggatgataaaaccaaattataagcaatcatgattctaggagaagttattttagaattaagtgtcatacaaacacatataacttccactctcatacatgcaagtaaaatggtaaaataagttatacataattaggtgttgtatagactttagggtaaacccttatggccggccagctcccatgagaagaccccatgactggccaggtcttgaacaagacctctatgaccatccagggtgtgctatggatcaaagtgtgtgtttctcaagaactcgaacatgttcttcgtgttcttcatgactcaaagagtcaagaatcacaacgaaggtcaaaatcgaatctttttttgtcaagaactcacacattatgcatcctaaaactatcatgcggattaaaataccaaaaagattacaatctaatgtgggaatcaaaaaatttttaaaacaaagaaaagcttcaaaattaccatggaaaaatcaaataaacaagtaaagaacgggatttgaaagtttacccactactagaaattgttgatgaagaagatgggaagcttgaatctcaaaatagcatgaaaatcttgagagatggagcactacaaggcgtcgacctctagagagaaggaggagctttcaaaagttagtttttgtagagagagagcgaaatgtaggaaatgagaatgagttcccatagaagcttatatagcttctatgggaccccttctcacttgccatgcagcatataacaaaaaacatgcagaagagtaatgttgttaacttactgctaaggaaggtgatcagacaattaaaagcaaatatttcaaaggctaaaatatactacaagattttcctaattaaggctacattagtctcgactaaattgaaatgtccctatccgcgcagacgttcgcacaagaatttgaagggcaaatgttatctcaattttttctcacctgatgtggcatgcccacatggccaacaacaatgtcacgtgggagtacaattcgccaacaagaaggccaagccatctacttagcactttaaccaacaagtggtccgagtacttaggaggaacaatgaaatgacaaactagccacctcaaggagcccccctggccagccctatggccagcataggtcggctagcttctagacaccatatggttggccatcatgcactctggcaagtgcatggccgaccagctttttcttggcagggttttggcatgcaactttcatccacggacagcaagtcaagcatcgaatcaggccttaaaatcccacaaaaatagagggaaaatttcagcaacttccctattttaaggggcaatttagtcattttaactttattaatttattaaataatagctttacttacctatttttaagggatattagaaatgtaagctctactatataaagagcattagtccctaactctctaagtcttaagctctcagtcctaactctcaagctctaagtatgatactcatctctctcacacaggcatagtctctttctctctctctctctnnctctctctctctctctacctctctctctctctctccctctcttcaattcaaaccctagagtgaaaagagtgaatgcccacacacatcaagt

SEQ ID NO: 113820 - DNA, 2333 bp, Cannabis sativa
aataaataaaagattttgacatccacataattaatactatttataacatatacattatatatatgtgctcacaataaaatttttaatccaacacttcttgctattagaacggggttgatctatgttcaaaggtttggtttcaacatttccaatatccaaaatgagtttacagtggttgtgaattggattcgtaatcctaattcgaacatagtttttaatttttttcttttagatgttaattttttaatagcagctgttagtgatggttgttgatgctatttcatgttcagcaaatggtattatccatacattagctacttctattactagtataggagaacgtcttagaatgaatgcttgtacttatcttctaagttcttcttataacggttgatttggtttaatgaaatataatactttctttcaaaaaagaaaaaagaatatcactaaccactaatgatgctatagcaaaggttatatttatacaaccaacatagaaatgttaaagagtattgtcaataacatattatttattatttgaagtgtaatatatgaaatgaagtagtccaaaggaatcattgtgtgtgtgagagagagatggcatagacttgacaccaaatatacctaacacaaccaaaatatgcttcactgaacaccaagaaagagactgttgactgttctttctcttaatttcttttcttataatccttgttgaagttgacgactcaccttacttttcttttctttttccatttctctaatatcatattttgtttctcaaaacaaaaatattattatttggttcttcatttgtttcactctttttaatttgatgaagcacagaaaactcttcccctcacccgatggatcaaccaacggtaccgaatgtacggacttctgtgaccctttctttggttattactacacacaaccaccaccacctcctccaccgccgttaacgtcatctctctccgttacccatcaaattaacgacgagagccatgacatctctccctccgttatcgttttagtcacgttattcgccagtcttttgctcttgttgggatactacgtcgtcgtttcaaagtcgtgccttggtttatgccgagcgaggaggaacgatagctatgaggaggaagaggaggctcttccgccgtctcaattggacggcggagatgaagagtttatagatgggaatcatcaacaccatcccatttggttcatcaccaccgttggtctccaacagtcgattattaactccattacggtttgtaggtacagaaaaggagaagggttaatcgaagggacggattgttctgtttgcctaaacgagtttcgagaagatgaaacgcttcgtcttcttcccaagtgtagtcacgcgtttcatataccttgtatcgatacctggttaagatctcacaccaattgccctctttgccgtgcccacatcgttaatgaaggttccgtttccaccatggctggggggccggtgaatcaaaatcaggagatttcggtaaatactgaagagacccagatggggaattctgatgttcactctcaaatgagtgagaatcgtgtcagagttggggcagaggaggatgatgttgatgataaccaaggtgattgtgatgatcaatcaaaggataatccagagatagcgatggaagacggcgaaagacgagtagtttccttgattgctgagaattttgaaagatcagattgtgctgtgaatctgaaacaagaagatgacgatgatgatgatgattgttcctcgagtatggttgataatggattactaaaacgacatccttcaatgtcgtatggtcttagcataagccctgttgccatgaaaagatcatactcttgtggagggaggtttttgccatctaaacgaaaccagagaccaaattcgattcttccattgtaaacttttttctgccttttgaggagagttataaacagaaaattttgagttgtaatgccataatattcttcgccagaagtaaaacaaacaaaattacaactttctgtataaagtatgatatatttccaaagtgtatgaactaattcatggtactttctttctttctttttttttttttaataaaagtaaattttcattaaccaaaacaatctaccattacaatattacaggtcagtttggcacagttatactgtaaaaaaaaacagatgtagttgtactgtgagaaaaagcagctgtaacaaaactttaaaaaaaaagtactaaggacactctctatcacactcttttttgcactctctactctagtttttttttcttttttttgaaaaaatgaaatatcaacttcatt

SEQ ID NO: 113821 - DNA, 1544 bp, Cannabis sativa
tgtaaccatgatggttacaataaatatgtaaccattgaaacctcttcctagcatatatattatacatatgtgcccacaataagatttttaatccaacaatttctcagttgggcaacatatattactttataaatgtataactttatgagctcaaaatttgctattatgtaaaggtaaaggtatccacaacaatctcttccatcaactatacccatataggatcaaagcagtttttgtcatatcaatcatgactaaacccatcaatggtcacatatacaaatatagccaaatgacatagatcaatcatggatgtgtagcatgcaaactacatgcaatgtaaactgtacatgcctatttctaactggtcctccttaaaccaaaatgatgtcagacttaaacataacaaaacagatgaatgaactgaaaactttatttcttattagaaactaacaaaatacataaatgtcttaaacaaacataaagtaaacaaaatacgaactcccactaaatccttatggacaacttgtcgttccgggacagcaaggagctgtaaattctccctagggggtgggtcacccttaaactcctagaacacacgttccgactttacctgctctgccagcgcatgctgcgaagcaatcctagcttcggggaccaagaaaccattatctgccagtattagctctgccacctgttgacgaccatgtcgccactatctctggaggcccacacctcactgtaaacactcacaattcccaaaatagatatttgaactagttggaagatgaaggagaagtttgcgctttagtacaatcaccgacccaatgtccaaagatgatgaaccttcccatcacgttcataaaggaggacgctaaatatgtgcactttctccacgatgaccctttggttattaaatcacaaattgcaaacaaaagagtctccaaagtacgagtagtcaatggcagctctgtcaacattttgttcaaatttgcttcccaaacgattggattaactaaagcgaatctgtcaccttgtccgatacagctacaaggatttagtggagattccttgatgtagatggggaagatccagctcccagtcaccttgaaaggcgagcacaatgtcaattccttcaaacatttcacgtttgtagtagtggattgctacaccgcttacaatgctatactgggatgaccagtcttaattgactttggaacagttacttccatccgatatttatgcatgaagttttcatgcgataatggaagcattagagtggtcagaggtgatcagaaaagtgcaaggatttattacaatgtctctgtccgatcgatatccatggtcaaagaagaaactaaagttgctcccgaaatagccaactaaccaaaagaagagcctatctgggaggaggttaaagacgatttagatccccgagttgggatagaaaggtgtcaaattaaacccccatttcttttatcaaactactataaattttttttttttggaaaacttttcataataaaccaaaaatttgaaaaaaaaaa

SEQ ID NO: 113822 - DNA, 4000 bp, Cannabis sativa
cacagtacgtttaaaaatcacgttaacacgcttatgctagttagggtgttacataaaatataatatgaatggtttatatttttccaaaccgatttaattaggttggcccattgaaatttcttcaacccggccaacccaacccatgatcagccctagttgtaaccgagggtgcaaacttgatttccatagcttactccacatgttgcacgtttccttaaaacggtgttgttgacttatccaataggcgtttttaactaagaacacacccgacttagaagctttccaaaacataatatcagccccttcctccaaaggccttatttgaaggatctcttcagcaatagttgggttaaaacaatcttgaatcagctcctcattccatactctcagtctgtctacaaagaggtctttaatgttccaaaaggcctgattgtgtctgattctgaagtgagtttttaactcctccatgttcctatggggaacccagggcctatcccaaagctcgctgcttccatctgcaacaatcagccctgcaccatccaaatagactcggcgagcctcaaggatactcttccagcaccgcgaatcaatagctttcctttccactgaccatggggacatcaacctgcaatacttgtctctgagaacactaacccagaccttattatcatccttcagcaccatccaaaaaagcttcgtaagaagagccacattcatatccgcaaaccttctaaaaccaagacccccactcttctttggttggcataactcattccagcttttcagcgcacaatacctgttcctatccgagattccaagccaccagaacttagcaaggatcctgtccaaatcattgcagagcattttgggaacaaggaccatggacatgaagtaatttggaatactctggagtacaaaacttatcagcacagatcgtcccgcttgggccacatggcgagctttccatccttcaagtctactcaagattttttccttaaggaattggttatcccttcttttactagcagtaaaaaagaaagggtttctaagatatttctctcttgagttcaaacaactaatacccaaactttccttgatatcatcacggcatcttcgggaggtattaggcgagaagaccaaaccacttttctgtttattgactctctgcccagaccagccctcgtacttgcaaatataattcatcaaactgtctgcattagcagctgtggcgtgaaaataaaatatggagtcatccgcatataataaatgtgatataggtactgcactctttgcaatacgcacggcagagatctctccatttctttcagctctagcaataaactttgacaacacttcactgtagagaatgaaaataaaaggagagagcggatctccttgtcgaatacccctattaggattgaagggagctatcggagccccgttaagcaagacagagaaactaaccgttgtgatacattacataatcaaattacacactttagtactgaaaccgtttgcttgaagaacatgccgaatgaaatcccattcttggtgatcataagccttactcatatccgttttgatagcaatggcccccaccttcctttcttggatttaatagcatgtaggacttcttgagctaggattgaagcttcagcaatccatcaccccggcatgaaagacgattgaaggggcgatatcaaacgatctagaacacctttcattcagtccgctaatatgcgcgatatgactttatagcagaagttgcataaacttatagggcgatagtgatcaaaccttgaagcatttgggttcttcaggatgagacagatgtacgagtgatttagcttcttgttcaggacccctgattcaaagaagcccttgaccatctcacaaagttggggaccaactgtatgccaatattttcgataaaaaattcttgggaagccatccggaccaggcaccttgagaggatgcatcttaaagacaatatctttaatctcctctgaattaggacttctaccaatgtaatcgctttcagcatccgtgaccttatcctcaaaaaacatagaaaactcattatcaatggtgctttctgtcaactcaaagatgtctctgaaatggtgattgaaatagtttcctatctcctcacgatcactcaaccaaaccccatgagagtcctccacgcaaccaatgaaattttgcctacgcttgataatagtggaggtgtggaagaactttgagttagcgtcaccaaatcgtatccaattctctcgagatttctgcctccatattatgtccattctttcctccatttctatgatttccaattgcacctctgattccctttgtacactagcatgagagatcgaatccttctgaatctcagccaattgtcgccttagagccactagtcttctgtcactgaagccaaacacctcctggttccacttttttaaatcatacttaacccccttaagtttccccagaaactgaaaattcggactaccataatcacctctccttcacgcattcttgatgacagtctcacagtcaggccgagaagtccagacttccaaaaagcgaaaggggtatctgagcttgggtgcctcacccgtggtctgaaggcaaatcagggcatgatctgatcctaaaattgggaacttaactaccctggctttttggaaatcagtacaccaattcgcatccgcaatgaccttatccaggcacttacgaattcgaccatggaaatttcttgaattttgccaagtagcgaaacctccttcacaccccaaatctactcccccagtatcaaagagaaagtcctgaataagctccccttctttactattgaaatgtttgcacccctccttttctgaagtgtctaaaatgacattaagatccccaatgacgacccatgaagaattacaacaaagaaccttacttgtaagccattcccagtaagagttgttcatagcctgatacggagtaccgtatatacaaaagaggcaccaaggatctacatccccagggggctgcatccttacgcaaaaaccagcatcgaaaacttctgtgattacacaaacaacacccgtcctccaggccacacaaaagcccccagcaacgccaactgctggaatacagcacgagttaccaaaacccaacctattcatcacatccaccatagtgttttcatctacctttgtttccgaaagaaagaccatatcatcattactatctcgcaccaaaccccgcagggttctctccgccgcgggtctacgaagtccgcggtaattccaagatagacacctcatagagacggtgggggcctgcttgcggccgcctcctcgcctccaccaaaaattcgttcaaacgtgactgccacttcgatacaattacccagtatttcttccaaatttccagttgcaaccatttattggcaatttgccatattgcatttcttctgtcccctccgagttttgacttttgcagatcttcgtgtcgagtaggacttactctttccccttgtcttccttccagggattctaggctgagagcacgacccttcatcgcccacaccaatacagaaagtatccttagaagcctcatctttatcactggcattaacaaagtttgcagggcttgaaggcgaggagaagtttgaaacaggagggaaaggttaatatcaagtgtgggccttcctcttcctactattacccaagagatgattaatcatctcagataagttgggtgggttggataaaagggattgttgggccttatagagattcaggtaatctagtttgtaaagctagaggaaaagtttttgggcctccatatcattattgggccaggtaattggggtagcttcaggaaatgaatgtggtttttgagataaacacaaccactcatggggtacatcaatgctttgggcaagggtagggcccaaatcagggataagatccttgttgggttttgtgccctaaataaaacccattac

SEQ ID NO: 113823 - DNA, 1541 bp, Cannabis sativa
  modified_base (63)..(66): a, c, t, g, unknown or other
atatttatatatgttcttgacttaatagaatttatacaataaatataatcatgaaataaatcnnnngaaccatgcaacatagaatgatttatgatcttttataaattactaaatctaattatattaaaataggttttatttaggggtatctctaggtgcagaacgtgttggtgctggtaaaattgtggcaaaagatgtaggttcaagtgtatttgttgtagtaagtgatggagttatctaatgtattaggggtgctaggggttgataataggttcatttatttgaacatgtgggattggggcctgattagtggtgacatgtgatggtggggatggaataggaaagacaattggttgtatcaatggagatgttggtgagacaggaactggtttgggaaacagtgtgtcataggggaaagtagcttcattaaacttaattgttattgctatataaatttagcctgaaggatgcatatatttttaccccttatgactggggctatatctaagaaatagaaaatgagctattctaaaagaaagtttattttgttgataaggtcgtactaagggataacatgaacaaccaaatgtcctaaggaaagagtagtcaggttgttgatgaaagagtacctcaaacagatttttgaattacaacactggtgtgggaagacgactgattgtgtaagcaatagttgtaaaggcatcccaccagtgtgatagaggcatgtttgccagtgcaagaaatgagaggcccatgtcaacaacatgtcgatacttcctttctactcgaccctactactgatgagtgtggggataagggtgtcgaaaattaattcccaaaggttcaagtatggactataatggcctgtattcaccaccccaatctggttgtactacttttatttttgtattaaactgtaattcaacataagctttaaactgtcagaaaatgccaacaactttagacttgactttcatagggtataaccctgttaatttcaaaaaaatcatcaataaaactaacataatatctgaaaccttccattaaactgtaaaatgagggtccccatacatctatatgaactaagtcaaagcaagaagtagttttaggtacagaactactaaaatgcatgttgtgtagcttgtcatactgacatgcttgacaaaaaggaagtgagttacatttagttttagaattgacactacagagaatatttttcaagatccttggggaagcatggccaactcgatggtgccaaatttgagcttcagagaaggttccagcatggttattcttggtacagttgaaagcagcaggtatgtgaggtactcctttattgtaagtggttgaatttactctagcatgtgaaagattcaaatggtataagtcgtgtttaagatggccccgaagaagtacttggcctgtagtcttgtcctcagagatagactcactcatatttatagcccccactaaaaaaatattgtcttttaaaaaattaaatgtaaattttctaattcgataattatggatcaaaatagtag

SEQ ID NO: 113824 - DNA, 3607 bp, Cannabis sativa
ccattgaccttcatatattaagaagcctgagatcaaccatatgagctgcacagaaacaaaagcaccaagaattttagagagaaatcggaggagaagggaagaaatcgtaagagaatcgcaagaggaatcgcaccatataggaattggtgaattttgatattttgggtgtgaattttgatattttgggtgtgaattttgatattttgggtgtgaagtttataaatggaaatattcttttataggtattctattttttttccatttttttaatttttttattttttttttccagattttaagttttttctataaatgtccatatttttcaaaatacttttaagaaattttatatttataaaaaattcccctttcccaattgttattgggccaagttggatcgaagtcaggtctggcctgacccgccccatttgacattgctacccatttagcttaaaaacccctcaaaactcgtgttgaatagaattaggtgtaaaattattaatcaccacatttgggtttcattaacccagaaaaaaaaaaaagataaaaaaacacactttttgggttttctgcatgggtctttgatcgagcagtgatgagaatttgaaggaagcaagattgagagttttgctttcgagtttgccttactgttactggtgttgcctagcctagggctaaaatacttcttcaaaatggccccaaaggcacgattcaacaaggttcctcctttttcatttcacatcgttctgcattctccatttctttattctctttgttaatcttggaatgctttttctttttagttccgttatgtgctattgatcgtttcatatttgattataatatactctgcacttgcagagaggtaacacacgtatggacgcggcactggatgctatgggtcaatttggatttcagaagcaacgtgttcgtgaagctgtcagaaaacttctaagagtgggttttatttcctttctaaattacatatagtatgtctgtgtgtgtatatatgtttgagattctaaaagggttttgctttaggtttatggaggagatgatggatggccttttattgaagaagattattacagagtcctacttgaggctctccttgagaaggtaagttggtacatctatgctataattttcttggttattatattattattgaatgatattatgttgatgataggtgatgttctattttttttccattgttttgtgattcttaaacaaggtagtgataatccctttctattttcacgtgctgtgtattctctagtgttataattaggtaaaacaaaaagaaaaaggatggcccctttgattgttcatatggtaaagaaggaaaaaatgcatctaagtcttacagaatactgaaataatatgtaatatcttatgtacacagccatacaaacaccatcttctgtgtattgtttagttattttgtatctgaactaaagagttattcccttaatttagaataaaccctttgggttgagttaattaaaactctggtattactattttagctgtgtataaagcagtcagtataataatactatagtcatgatgctagtttgagctggtctatttttgtttttactcattttataggatggttcacaagatgatgcaagaagtctaaaagacacagaaacatcaactgctgggccatcttctggagttaccacacgtagctatgctaagtttcagactctcaaaaccaacttgcaaattgaagctgctttgaactctataaaagacaccgaaccatcaaatgctgggtcttcttctagagtttccgcacctgactgctctgaacttgagactgcgaataccaacttgcttactgatactactgtgaactcacagagcactaaagctatggactttgatccagagactaataaagaaggtaatttaactttctttgctgtttcatagacttaagagaggttaatgttgatagacttgaaattgtgtttttatgagcattttctcctatttaacaagaatgcacttagcttcatattgctaaaacctgcttttcgtaatttgttctcaggggcagaagatagcgacccacctactaaacaaggtggagaggggaacttggccgataagaagttgaacatgaattccactaacttgcaaattgatgctgatttgaactctataaaagacacagaaccatcaaatgttggttcttcttctagagtttctgcacgtgattgctctgagcttgagactgtgaataccaagttgctcactgatactactgtgaactctatatcacagagcactaaagctatggactttaagccagagactaataaagaaggtaatttatctttctttgctatttcatagacttaagagaggttaatgttgatagacttgaaattgtgtttttacgagcattttctcctatttaacaagaatgctctagcttcatattgctgcaacctgctttttcataatttgtttctcaggggcgaaagatagcaacccaccaactaaacaaggcggagagggtaacttggcagatgagaacttgaagttgaatttcactaagaatgatgtggatagttttcttgattctgaaatccaaactgataaaccacaaattgtgtttgccaaagattcgggatacgacaaaaatacttcaaactaccccattcacagcccaaaccaggaatgctctctttcactgaggaagcgtcgacattatcatggttgggttagtgccagctgcgaagatcacaacgacaatgatcttgtagatttgacaccggatcctttaccagaaggtttagcgaatttgtccaggaagattcatggtaagaaacaacgcaaatcgctttgggatatgaagcctgaagatatgtcccagcctctcaccaactatctaaaagcctagatcactttttttttgttaacttctgcttttgggtagatagcaatagtaatactcgatggcactactggacttaggctacctagcaggttttgctgatgtatcattggagttgaagctgaacaactacacatttgtgattcccaaatgggttaatattacttaatagaggaaaaatgattataactttcagtgtaatttcttgtgggacatcgactaatttaaagaatacatactgtcttattgttagaatgttcactctctttttgcacgcttaatagaagtaaaaatcatttaaaagtacatggaaatattaaaaagattttttttttttctttttgtaagaataaaaaggaaaaaaaaaaaaaattaaatatgctatcaggacaaacttttaaaggtgagtcttatttgttgaataagtatttgaaatatttccacatgacaaaattgatatctataggtatacggtgtgtatttagattaccacttattacaaaatctattatgatattgtaactgcttactattagagcttctccaaggaagccgcattttatataaatgccgttgctttttgttccaaggaggcaccaaacacagcattttgaggcactgtagaccacggtatatgttttttttttttaaataatatttatatatatttatattatttgatttatttat

SEQ ID NO: 113825 - DNA, 4974 bp, Cannabis sativa
agggtgttaatcaacatacttgggagtagatctaagatcctggtaaaataatttccaatagttacttcaacgtataaagagcgagatggataaatgtagttattttctctacatgcaaatatttgggtcagttgttacaagctctttactcacaagtctgtggatcaatgagttgcaagctgttattcctaagtatgtgggtcaatgagctgcaagctcttggtttactcatctcgtacaacttttactatggactctatttatcttgagatggacttattatctcgccaatcttatcagttaatagttattattctcatcgcgcatctacctacgtggcagcgagtttgaatatttctatcaaccgtaattcttgaggtgagttatttaaattgcatttaataatacaatcattaagttgattcacattccttctgtggtacacgtgtcagcttctggttgttagtcgaaatttgggtatactattctttacaggcttttctgtgcataaaccctaaaagtcatgcatgtctctctatcttccaagtcaatcgaaaataccaattaacttatgttaggttgttgtctcttgactgtggggtcttgaaggcaacactggagacttttatggtacaaaggctaggttgtcttgggataatgcgctacgagagcgatcatccagaacattatactgactatttccttcaaaatagtctttagcaggatcacaagtacgaagagagttaaattgattgcttaggttcaactcttccccatccactcgaggcaagtactcatattggatgccactggggctgcgagtgaagtattggcataactcacttctctaatcttgaaaatacttctgagtgtgaagcagctcgttagtccttacccttcgaatttcttaacctctagttttgaagtaaatccattgtcttcccccttcggtgttagtggaaagtccctttccctttgtaggatcacaagacctagtgtcattcgatcgatgaggaaaacctagtggaggaaatggattggttctctcagcagtatacggtcaccccattaggtggagtgccattggtttgcgtgcctaagcttgagccctttcgggcttagagtttgcttccctatgaggagccttatcacatgttgctccctaagtgctatcacagttatcaggtttggagaaagtcttccatgcattaagggtttcccctttagtactcattcccatgtggctagttgggcgatggggtatctctctagctagctcaaaaactctccttatgggagccattttgtgattggagtgataagcttctctaatccgttcagacagattagctctttgttgttcctactcagcacgctgattctcaatgttcctccaattctccatgaaccatgcttgaaattgttcatgttatttgccgagagaatctcgtagatgttggtgtaggtcaaccattgttttgctaagatgtttaacttgaggatcagcctcctcaatgtcttctagttccacacgtggttccccaggtggaatttattcactggtccagtaccaattgtagttggtgaccttaggggatgagttgtggatccggttctaaggcctccacctggcatctgagatgcatgtgttgtcccgtcaccagtcccaataactggcgtgcccccatcattttggccagtagttgtgcttctttccacacttgtggatcgtgttggaaccatcttataagtgacttcttaagttctgcctctcaatgaaagcactaaatgtttgcacagaaatctggccaactcgctcatatgtatagagagcaacctcaagaatttattgtactacaatccctgtgtgacgacagtaatggagctacgtctactcgagtttttattcttacgataatgattacaacaaaaaatagctaagtctgaaagctctaatttctagagagagatgctctgacttatatgtactttctgaatgtgaaaaatgagctagagtaactctccttttatatggaatgacgtcctattaaaatattaataataataaaatataaaaaagttacatttaggctatttttaaccattgatgatgatttaatggtgaaattgaatctggaggttggtcgttgatttctggagcttgagtcacgtttgcgggactcactttgggtaagttgtagttgaaatttgtaactctcttgaggaaaaaatttggacttgataaattaagaattgatatttgagtgtgagacataactcgatagagcattgaaatagcttcagaactcaagttgtttcacgtcaatcgaatcattattgagtgagttgtggtcgttttactaaaggttgttctgatattaacaaccaagttgatatatgatgtcaacctggacgttgggccaagggaaaaatatgttgaggatgtattttttgagacctaagtgatactttgacatcatttagctactttctatgttttggtgaagatgttcaccaattctcagagatcttgttgttttgtagaatcgagagactcgatactgtccggtccgtgacttagaaattttgccaaaaaagtgaaaatatgaagttatgaatttgacttgtctaacttcatagctttagtttaccatgaaaaactagatgaactctcaagacaaatcagaattggataagtagaacccagtgcaccaagtcatacgacatcatagacgttgggtgctctttctagagcttccaagatgtcgttctgatacttccaaggttcttgaaatcaaggacgatgtcttctaccccattttcaaccatgctagagaaaatacttggaatagaatttgcatttggatgattgaaaccagtgcaacaggttgattgtcaacttgggtgctgggctcaactttcatgccatctacattctcgttttctccccgagtttacttgtatctttgttttttttatgatgaaaaaaattcccaaacatttttggggatatgattggaaaaaatccaggttgacaaaatgtcaacttgggcgctaggtctagcttttggccatcagatgactctactttattctcagaagaagttgtatcttaatctttgacaaaaatagagaatatgcccacaatacttctcggaaaaactccttggaaatatttcaacctgagcactgggcctagcaccaagtgtcaacatgggcactaagtcccccttctggcctccaacttgatttgtttcttccttgaaagcacttgtttcctcgtttttgatgaagatgaagaaaatgctcgggacatctcttaagtttgatgcttagaagtgccccgggtttacaaaatgtcaacctgggtgcttggtgtcaacctgggcacctagtgcttagagtgctcaaaaataaaaatgctctgaatcttattctaatgcctcaaatatgttcgtgacatgtctaattcatgtcctagtacaaattttgacacatttacactaagaccgtcccaaaaattgaaaccctagttgggttgtcaaccaacgtgctaggtgaaaccctaggcacccgggtttccttccaaggtgttgtttcgtgtattttcagctctagggccttgaacttggatgcttcatgtgttcatcatacagaaattgaaagatagtaaattggaaacaacttggcaggatccaaagacccatttcggagttctctaagtcaacctgggcatagggctagggacccctcccaggtcgactactatgactcaggactactccactctgagatgtttctttctttccacgtgtcaaacattgatgttcaagtcactagggtcaatttttaggttaacaccatcccttgttggaggttggtaaatcccaaattatgtaataagggattttaagagatatgtatcaggcgacaaagcgagcaacataggtggttctatagaagcaagcaaagaattaagatgtaaagagtatcattcccttaagagcataaagaatggttatacccaaaacagtttgaacaaagtttaggagtagttgaatcatagacacccagataagagataggatgtacactaacaaaggaggaattgggaagtgcaaagctacatttattttcttctgactaagatctttgtccctcatctcgaggtctttcaaacttttggtcaaattcagtttatgttagtattcgaaaggtgacaccattaggaactggatacttcacatgaatctcattgtaaactgttttgtatccaaacacaaaatttgggtaaccggttccataacatctgagttcagacttaatagccaagagctcaaaaattgtagaaccgaggagaaattgtaagggataaaaataatatgatcactactatagaaaacccctttaatgtctcttttttatgtccaacaaaattattgttggacatgaaaaagttttggggagttttctagtctaccattgttggactaggaaaaaatttcatcattttcaacaatgctagactaaaaaaaagacaatggacgtgatatatattatttaatttttttgaaactggtccattttcacgtccaactctgttggacgagaaatatattttggagagttttctagtccaacatagctagatgccatgggccgactatttggacactccatgtaggaaaaaatgtgcggcacttgctggcacaccgagctagcaagttagcctaaacacgcctgcaggaaaacaagctcaacggttaggcacgataaatgccccgcacatgttgagtacatacaagaagcatgagcaagaaaacataattcgtccccaaggactaatctccacaacccacaagtaaacatgtagacaaatggcaggcaatggcccaacaaaggcaacacagtcatcatataggcaacatagaagcatacacaagaagaatggataaacatcgttttattaatata

SEQ ID NO: 113826 - DNA, 969 bp, Cannabis sativa
ctattgccctttagcgggccagattggtggaccaaatagcggccgaggggcccgccgctatagcttatcaaccattacatttatattccattcttcaagtgtcttccattaccaagaatcttgttagtgtttctaaacaaattactagcaatgatgtctttcttaaatttcataaattgtattgttttgtcaaggacaaattaacagggactatcctactcaaaggaaaggctaaggatggcctataccagcttggtgaagcttccagttcctccattcagtgtcacttaacctgtaatgactgtatttcataatatggattagtaaagacaattagcactaattattaatatttgactaatttacgtcaagagacgttgttttcattttaattacgaatttggccttgttttaattaatacggtttttataccgtttatattttaaaatttagagtccatgtataccgttccaaatgctttccatatttaatattttctgtgtgtatattacggttgcaggtttgcttttgtagagcatattttctctttctttctcatagatgttaggcacaatcatttggattttgattttctttatgggcaaattttttttgaatatacctaagctagcagaaagaaacttacggtcaagtttgttgagatgactggctaattaatatatttctttgtgttattgtttttaataatttacacattgtctcactttaaaattttaatatatttctttgattttctttgtgatatttcttttagccattcacacattgtctcactttgaaaatttaaaaaaaaaaaaattaattatttttttatatttttatataactcatgacatatataataatttctttttaataatgataataaacttatcaaattttttcttttttttttattaaatatttttatgttttttttttatagtttgataatatataaataaata

SEQ ID NO: 113827 - DNA, 2617 bp, Cannabis sativa
tagtcttaaaaattgaaactcattacttgtaattatagaatacttagcaagttgatggcctaattagagtcgtttggatgtgtagtttgtttgtattgtttgtggatccaaaataaaaaagttatatattttttaataaaaaataaataatttttaaatcgcttaattaatttttttttttgaatagaatcgcttaattaattttaaaatttaatttcttttttaattttttaatcattcaaaatatatttttttaaaatttattattttttaagatttttttttaatggaaatatggcaattttattaaaaagaatcagccattataatgttcatcaacttagatggtgacttggttacatcagaaatacaaattgataagtaacaagagctacatgtaaggaaatgtgcggccttattagcagtatgcttaacaaaattcataacaaaattcaaagaaacaaaagataaatcaccatctctcaaaaaaaaaaaaaaaaacaaagataaatcaccaagcagttacttgcaatcggaaaccaggaggccaaagtaggatggtaagtacacataactatgcattgcttggattgcaactagacaatctatttcagctgtaaccaagtgccaaccttgaaacttaatccagcttagagcctccttaataccaatcatttcagccactttaggagagacacaaccaggattgagtaaagttcggacttcaataagggtaccatcacaattcctagctaagaaaccacaaccaaaagaattcgaagcttggaagataactccatcaacatttaccttaatagtattgaacacgggtttgatccaacgctcatcctccataccttgtccaaagaataaaaagaatttccattctcttttgttgagcacacttctattcattaaggtttgatcatgctgaaagaacaactgtcgcggctgtcgatgctttttgattccataacaggtcattacaagcattccatatagcccaattgatcattaaagcctcttccacactagaatcagaatttacatcacccatattctagaaccagaccgtgaagcttgtctcagatgtacctcctaattgcacacttgatctattccaacacaactttgcaaaaggacaatctactaggacatgacaaattatttttgcttctccattgcagaatggacagaggaggttcgccattatatgctttgattgcagctgtgtattagttagaagacaattagatagggccctccaaccaaaatggagaaccttgggaggagtatgaatctgccaaaacttcttccacttgctgctattttcatgcaggtcaattgtaacagttgcaaaaatgaggaaattgtatgctcttttcaccgagtatagcctagaggcctccatctttcaactccagcagtcatcacacacaactgaactaataagaatctgtagaatcaaggagctatctcaggtagtaaatatatcagacaccacctcagtgtcccatcatctttgtttcacacgcagcagacttgctgccattttatcctctaaacctggattcgaagtcatcacaaaggggttaaggtcatcaggcaaccacagatctctgaggatactgatgttgaggccattaccgaagtattttcttgcaccagctttaataagatcttgtgtttcaattaagcttttccaaatgaaactttgattggctcctaaacttgcagtcaaaaaagaaccatttgaataataacgagctttataaatattgctaacaagtgaagaattgttaaccaacaacctccaagattgcttgccaagcatggcaaggttataatttctgagatcccgaaagctaataccacctgaatgtttgtgtctgcacaaccttttccaactcatccaactgataccctgactttgtttttgacttagattaccaccagtagccactcattatactttctaggccatgacaagttcctatagggagaagaaagactgacattgcaaagcttggaagagcttgagcagctgttttgagcataatctccttactagcttttgaaagaaatctactttcccaattaaaaattctttttttgagcttatctttgatatacttcaaaatggcatttttatttctaccaaccatacatggaaacctagatagaggcttgtttcatcaacttcctttatgttcatcaagctggaaactctgtttctgttgtaagcactggtatttgagctaaaaaacacgaaagatttatcaaaaatcacgacttgaccagaagcttttttgaacatatttagaagttgtaacacactgttagtgtccgtctcattagctctgcagtacacgtagttgttgtctgcaaaaagcatatgtgaaatgataggggcaccattagcaactctacaacctcggatctatctcgaagcctcaaaggagttaataagagacgagaaaccttcagtaaaaatcaacaacaggtaggacaaaattggattaccttgtcgaattcctcttgtaggagcaattgggtctaattctctgtcatcatgtgtaactgttggaatttattgtaccaggatcttagatctact

SEQ ID NO: 113828 - DNA, 2563 bp, Cannabis sativa
taaaaataaagtagagacctaagaagtatatcaaataatgatccatgtgaaatttttttacacccaagccaagcctacaaaagataatagtttggcttgatcaaaataaacgtcataaaagctatgacaaaatcattagtatgttaatgaactttggtaatgttgagttagaagtaataaaatagaatagaaaataaataaaatatttatttcatttttatatttaattgcattttaaaatattagaatcttattctaatacaatgacatttctaatattttagaggaatgatcattctattttaaaattaataaaaaaatactcattcggatacaagatgacaaaaaatttaataattctttcatcactttttttttttttacatttcaaattttattttattcaattcctttttctattctcacttttttatttttatttcttctaactaaacaacacctcaattaataaacatgtacatttatgatacacacaacctataaaagagtgttattttaattctttttacaaaaccatctctgcattaatacatttcaattttatttcatttcaggttcgtttcataaggtttcatttcagattattattgtgatataaaattaaaaaatagaaaataaaagaaaacacataaatttctcaaaattttacaatataatacaccctaaaagcattcaaagctaaccaagtaaagtgacttaattgcacacactatcagtgatctcttgattaagatggttgtaactgtaagcatactcctggaaactgggaagccttggctttcacgttcattaattgtacagtcaaatggatgcccgaggctttcaatacatgtgtatggagatacacaagttcatgagacgttttaatactttctctcaccgtctggagtatgataatcataaccatgatgactcccattctttctcaaatcttctcgagattttttgtcaccctctggaaaatccctcttctccaatctatttgactttgagtgtctcctatgacttgattttctgcttctccttgatctgctttctctcccactctcagcggaacattgctcgtaatgatcagagccagacttacttttagacttccagtgttctgaaataacttcttcagattctgaaggattctccttctggtcttgataatgatatagttctaaatcatggtcatttgacttttgctttccattgtattgacctgaactgctgctaaaactagttaccatcctagacttgtgggatttcttatcggaacactgttcagactcccatagatcatgggatctatatctctcatcatattgacttgaagtgccagaatcatagctcttatctttactgttaccagaatctgcttttacaatatctatgcacgaatcgcctctgttttccaagctattttctggttctccttgatcatcagaaacatttgatacttcattcgtttgtgtcctaatttgacaaaagtgccttgctacatcctcgcccaacaactcatcaccatagctgcctttgtcagacaactctcgaccagtatcatgacttctgttattcctgtccaagtgattaccaggatatctacggcgtcttgagctgctcttcctgctatcatgtgatatttccttgttaccactcttccctctcctattgaaatctatttcatgacttctataatcttcataatcatccagctttctcactctcttatgataatttgagcttttcctagcacgatcatggtgtttctttctgtctccctccctcgtcaaccgttctccatctgaaccatattcatgagtgttgttcttgtattccttactcttccatcttgaggtttccctcatataatcatgagattcatctccacttttctttctatcgtcatcaaatatttttgcatcagaatcagtatgacgcttttttcttttcttctgatgcttatcatcctcatggatatcatcatcaaggcttctgataccatcacttgtacacctaaactgatcttctgttctcctcacgaaatctaaattctcctttcttctacttgaaccactatggccatggtcgtccctgtaacttgtttctctagatccagatcttcttgagcaatacctgaaataaattaagcaggatgcttaattttttcaactcaacacaacattgaatgggataaaagagaagcattgagctcaagcaagaagtcaattataaagaaagaaaaatacatatattttctctactgacttacgtgcatgtctacaaacaaaactcaaatcataatatggtcattatacatacataaagcaaatcatcagctctaagattacctaattaaatattctcagtatgtcacattacacactcaagaaacagctttcttatagtctaatcacttgaccaaacaagcttcaaccttctattgcatggataacttgtcgaaatgaattgaataagatgcaaccttagggctcgtttggaactttgcattagctcgtattgtattgtattatattgaattggattatatatcata

SEQ ID NO: 113829 - DNA, 3809 bp, Cannabis sativa
ttttttttttttctagttatgtttctacacatatgcagagaaacatgccaaaaacagatatcaacaaatgaaagatgacttttcctataaattataatgaacagtacttgagatgcttttaaaggttgtagctagttatgtttctaatggtcccctaattgttatttcattgatagttattttattttacttagcttttagttcgactttttctcaaacaccaccataggtgtttgatgatttcatcatagataaccaaaaaagaatgaatggaaaagaaaaaagagaaaaaaaaaacgcttagtcactcacttaagagagcaattcccagaaaatggactactgttttggccaatgatggtacttgtagaaatccattgagcaagaaagttggtcagacccacataccatttttggtctcgctattgcccacatcccattttctattcttttctccttaatcactgtctgggtactatttgatcaaactttgggagttccctatgcaaatctgaaccattctttatgttcccttccccactataaaccatataaagagccactgtttttgacaaaaccaccttctatgcaaaaactaaattcgaagcctccattttgttgaccataatggaaaccaaaaaaatcttgaagcacctataatttagcatgtaaatccagctgttgatcagtggagttgagaaaatgtattccactaaatgcccaggtttgttattagattggtctcgaactgtagtttgtaggtttagaattctccatttgtactgattttttattgttgtgtttagtgtttagtgcaaaataagatcagaagcttttggggtcgaccctgtctccaccttaacttagtggcttctcacatcatccccaacaccactaaacaaataagaagataaggaaaatgaaaaagaagtcttaaatggaattataatacttttcatcactctctctctccctctcttaaaaaatgacttttattctgtttcactgtatacttgagggtagttaatttggttttaatgaaacatgcatgctatgtgttcattagtttgccaaaattctaactgccatatcactttcaggtatgggaaccaaaattgaatttgccatcaatcttttaggaagcttaccaaatagcaagcgctttactgtgcatggtgtggatgattgggactatttccagaacagtggggcaaacgtgaagtattcaaaaagcgagttggaggaaatgattcaaaactccatggacaagaacaatttggattccatcaagaagacaatgcagatgcatgaagatatctttaagcaccaggtataaactctaataatgctcatccattttgtttttggcttattcttgttgggattgattgagttgtgatcatatttgcaaattgatcaacatagtctgaagctgaatttcataatgtaaagggagaaaatactgtttttataaaaaataccatgaaaacaactttattacagaggtattctttgttgctccacatattttttgacaaactctaatgagaactaccaacaattgatcaagatcattcatttatcgaccaaaagccaacatttctcttgatacatgaactcaaacaaagaatgcaatctgtaaaaatatgggaagacagtcaactaatcaagttactaaaagatgagtttgaatgccagtattatattggttatgataacaatcttgaattggatagttttccatttacattgtgattcatagctaagttgaggacattgaatgctaaaaattgcaggtaagagaactgcaccggctgtatagcgttcagaaaatgctaatggatgagctaaagaaagaaattaggcaagccaaactttgggatcctatgagtagaccaggtatcagccactctcagttaattaactggcaacaatcagcaaccaaacaagctcctggagctagcttccatattcatagtttgagagatgaactaaactctagagagtgtagtggtagttgttctggagatcccatgagagtctcgaggggatttgatctcgaaaggcctgcagaggaagacatctctacaggagtcagcgctatcggtgaaaatcccagaggtctaaactctaacattgtcctcaagagtggcaaggaagacgatagcgaagttgagctaacactaagcatcggaagtagccaaagtaagaagaaatcaaattccatgaccctcaaggacattaaagaacttgattcatctgcttcatttaaatcggataggggagcagaatgcagtgatcccaccactccaatgagcagttccagtgcaacatttgaccaagaaagaaagcagccacattggcttttccatggtttaaagctcaaataggatcactttaacttcaacttcaacttgtatgtgtgtgtatccttgtaaaatttacacgagccattgaatttgtaaatggttcatgcatgattgaaattctaatttagttgccacttcaataaatagacagttctgaaacctcatttctgagctaagctgttgtatataggatcacttacaacttttatattcaacttttcagattaatcagccctttttttcataagaaaacaaatatctctgaattctgactaactaaagaagtatttttggtagttcagaaacatctgttaataacgatagatggactatgctcatttaaatcaggcctcaataaaggaatggagacaaattgtagttcaagactgaaacaggagaggttcatgaatcctaattttttgggaagtaattcatttattagaagcaaatgatcatgactaactcaactcaattattttctaggtaagcaacatattgtacttagttttctgaaacggatggcccactttaaaccaaaagtggtaaaaaaaaaagcaagtcctagaaatgacaatgattactgttaaagattgattcttattgcaatctgaactgtgcataatggttagtgggacaacctgtagaacattaatgtttaatccgaatttgtctctaagtaattgtcaatgatcgcctaaaacaaattatacagttgcagatgacacgtctctttcacttcattaaaataaatgcacattgtttttgctgtactccttaactattttttttcccttttataattttataaatgtccacaactgagtttgagattcccttatgacgacataacagagtgtcatatatcaattacagagtacagacataaataaaacttatgcagagattatatgagtagttaattgtggtccagatccatgaatgaaatttagaattcattatagttacatgcttgattgttctttcagctactattaaagccacgaacgtacagacaaaaaagtgattattaattgactaagcccacacaatagaaaaactatttcagtatgtttttcttcttaaagaaagaatttattaaattaagactgcaaagtcacacagtttacatattaaacagtcacatattagtctggatttctttcatccaacaaaatttactatttaaccaataaccaaaaggtagagatgtttacctctaaatttttattattttcgaatcagaccaatattgtaagttctttaaaattttaaaaccaaaacaagtaactaaatgcttaaaatacatcaaacctatccactttacgcttactaaccagtgttaagaatcagaataaattaatagagaaatgtaacggaataaataaacaataatcgaaaacaatatttgtaatatattatttactataactgtttggaaat

SEQ ID NO: 113830 - DNA, 1307 bp, Cannabis sativa
cctctaattttatatttaattgaacatacctctttttatatgtattgtacctaaaataccctgacataagagagtcacatgaagagtatcttcaggtgacatgagtaaaattggtacaatgtttaaaaaaaaaaaagtaaaaataatagattttaaaaaagaagataaaaataaaagaggacaatataaaaaaagtatagagtgcaattttctctatttaattgcatcttttcctcatctttcaagcttggccttgaaaagtcttcaatcaattccagcctatgggcctcactctaaactcttgccgagcagaaatgggcggcaacttctcttcttcataaggcccagtcatcaaatacagcagcaaacaaatcaatccaagacaaatttgcaaatctttgttacaaaatatttgggtttttacaaaataccttttattttttttttgtttttttttttacaaaattaagttttcaaaaatactatcttaaagtttcaaaattataaagatactgtttcaataaaacaattatacaacacctaaacaacaacatgaaaataactataaaaaaaacagttacaaaacaacataaaaattataagacatcgacctccttgtaatatgtaaaataatctcaactcctcagcttatttttgtataatgaagttcttttttacttaattttgacagattaactatttgtactactatatttttttttacatcttcatacttgttaactttttttttcaccatttcaaagttagtgacaactaaaacgataatttattttttaaaatttaaaccaatgattatattaataatacaaataataaagtcttataatttcaaagttagtatataatataatgggtaatatataattaaaataacaaaaactaactaaacaacaaatataattttaagatgacaatatctaccagtacacattgtgtcaattaaaaaaatgaaaaaaaaacttatcattatacttaaaaaaaatatgttaaatatatgtatttatatctaaaaagtagcacacatataaaataaaaataaagaatgaattacaaatatatattataataaatgcacataaatcaaaaaacaactaaaaataattggacaacaaaaaaacctaaaaaccacataaaaataactacaacgtcatataaaaacaattacatcacaacataaaaacaacaattctgtcacaatatacaaattattcataaatcaactctatataaaatacaaaatatccaaaaaaaaatattttgttataaatattaataattatgtggat

SEQ ID NO: 113831 - DNA, 2050 bp, Cannabis sativa
ttttttttttttttttatgttagtcacaatggcaatatttttttctctttagatctgtagaagcagaacaattgatcaacaaaaacaatgatcagataatatatatttatagaattaaaaagaggacttagcaaatagtaataaccccccctaatttctctccattgaagactttagttaattagaaaatatcacatttttgcttcaattaaacttcacatagatgttaagtccatcaaatatacattactaattatatgagccgctaaaacgacaaataacgtatcaacccatatttttaacaacacgattaaaagattaacatataaacctaaaataaaaatcttacactattcagtcaataaaataaaaatctcaaaaataaaatatcataaaaaagacaacaatctcacggttggatgcattatcaaggacgggacagaaaatttctgtgacagggatagattttttttaaggcgagcaatttaataaatctaaaaaaattacaaaaatattattgataaattaaaataggaaattttttgggcagcttgggactcaaatacctctatcgcagtggatattaacccaaaccctaatccgagtcaaattaatccaaaccctagtttgaacctcacccgaataatgcaacatgttgtgcttaacctttttttttttttttttgaaccatggaaatcatttatttattaactttcagtaagtacaatagatttaagagcagccgaagcattaagctcagtaaaattataatctgacataacacaagattctcgagcaaaagaatacaaaaggttcaacatgtatcgttttattataaattactttatactcaaaaaaatgtaggtacctacttaattttctttagtgtgtgtgtattaggtacgtatttgtagacaattctacttattaattaatcaattaataattttgattatcataataaagttttaaagggtttatgaccatatattaataatttattcagttgaaaatatacagtttggtatcacaatcaatcaatataattaagcttaacgtgtaattttacgaagctatatatagcttgttgaaaatcgtacttaaattaatataatgcaaaacttgtcttaattaattatatgcttctgaaatttagtggaagtttggaaaaaaaatatttttggatctttatttaaaataaaatgtggtattttttaaaatttgtaaaaaaataatatataattttaaaaggggaaaaataaattttgggcctttgggttaggtaggtaggccctagacacaggactagttcaactatacttagggttgggcctgctaaaaataaaacatataaaatcacctcatatattactttttaatttttttttttttctatttttacagtttgggttgtttcggcggttgctttgtaagtttctatgtggatatatttgggttacgatttaggttgacccattggttgctatgtggatttttgtaaaaatacaaaaaaaaactgttttgaaatttaaaaatgaatctattggtaatggaaagctcgtaaaagttgctatataaattgctatgtgaatttctgtaaaaatatattataaaaaaaaactactttaacgtgtaaaaataaaaataaaaaattcgtacaattgattgtgttatttcaaaaaaaaaatatatatgggtaaaaagtagcatttatttatttattattattattttcgtaaggatttattttttattattaattatttttaacaaagtgtttgtttagctttttgggaattattttgttggtctaataatatgacttggtataaaacaattagcaaaggtcataattaatatacacatatgatcatagggatataaatatatatttttctattaagtgtaaatgtaattattagacggattttttttttataatgtttttaattaatttttaaataaaatatttttcgaataaataaattatattatagtattttattcctatttttttagggattatttcacaaaaacataaaaacaacaa

SEQ ID NO: 113832 - DNA, 1380 bp, Cannabis sativa
  modified_base (1187)..(1190): a, c, t, g, unknown or other
gcttattacatgaagagttgtttccattagactataataaataaaatagaaaactaaattaattccataattacaatgcaaagaatgagaaaccaagacttattgcctttattctctaacctaatcccacgaatgtaaggattatcttcgtgtcatggaagcagtgatacttatctttgaaatggccaactctcgtatcatgcccagtgcatatgagttgatcaagcgattgagctttggtcaaatgtccttgggtgactctactaagacatactgcttggtaggccactcaaccaccatccatgacatcacacgaccaacatgattggcaagtcacttggccattatgcagggaatccactcgaccaccatgcttggtagatcattagaccaccatgcatggacgtcattcggccaacatgcttggccagtcactcaaaccacaatgctttgtagacctcgcgaccaccatggatggtaggccactcgtccaccatgcatggaagccactcgaccaacatgcctggtaggccattcaaccaccatgcatggaagcgactgcgccaccatacttggtaggccactcaaccaccatgcatgaatgtcacttagctaagatgcttggcaagtcactcagcgaacatgcttgggaagtcaccaaacaccagacatggtagcccacttggccacatgcatggaaaccactcgaccaccatgcatggtaggccatcctggcactatgcatggtaggccactcgaccaccatgcatgaaagtcactcggccaccatgcatggatcccactcgctcaccatgcatcgtaagtttctcaacaatgctcttctcgattagagcctataaatgtctcattctaaggtatgaaaggggttcgaaaatcattttgtaacagcagtcttaaagaaatacaagtatacttttctctttattttggcttagaacacattagtgttttcattttcatttacatatcatctttaccctcatactatgttttgtgttcgaatcttgattttccaagcacaagttgattaacgagtttctactgttaacacttagatacaaagaaatgaaaaaccaaaaaaaaattattagaaattcgatttgagacactatttcattgcttgaaataaaaagaaaaaaatggttgtgtgtgtgtgtgtgagagannnngagagagagagagagagataattaccttgtgttgatcgatgatggggatcaaacaaagacgaagctcctaccaatgatcgaagcaagtcaccgcagattggtggaggggcagttagggttgagattaaggccttccttgatgacgagtagagagagaatcagagtgatcatttgagagagagagagagag

SEQ ID NO: 113833 - DNA, 3456 bp, Cannabis sativa
  modified_base (41)..(48): a, c, t, g, unknown or other
  modified_base (3215)..(3219): a, c, t, g, unknown or other
atatttagggtgttaatcaacgtacttgtgagtagatctannnnnnnngtaaaataatttccaacagagcacaccttgaggcgatgccataagaaggagcgaatagtgctccaaaatagagcttaaacccttttttttaatgaagagcgcaaaaatatcttgagggaattcgaacttctgctctagtaggatcattgatcgacactgaagacctaggaaaatggatggtgcactagatgaggagagagcttgcaccttttgatgtagagcttctagaccaagtggcaggtagcatgagtgagctgacttcaaagaagtgggcaatttgtagcagcaatgatgccttcattttggctaaagcagccaagcagtaggcagcaggggtaaggcttgacgttctatctttatttttgttgtcatatactatcatcttatgttgacttgaaaggaagtggtggccttgatcatagagcttgatcaatttcaaaccaagaaccaaactttgcacggtgagaacagagctttacttgctaaacttgagaaagtcaagtcttaggccactgttaaagtgagtcaggtcaaatcaaaagtagaggcatgggtaaattaggttcaaactaagtgcggctgaagttgatgaggcagaccgattggccagtctaaaatattacaaattgtaccgagaatacaaggccaaggttgaccaagacaataaggtagagctggaccaacttaaatctcaagtgtcttccctttctaacgatctttaacaaacgaaaaaggagaaatacaaactggatgctcaaatataaatccacggtattgccctgagttccaagctccaagagatcaacactataaacaatgagacctagaagaaagatttggtaatctaaggtttccagggtaacattgaggatttgaagaataaaatcaaggatttaatgaaagaagttgagttgtggaaaggcaagtacattgctcaaatatatgtccttcgaagtgttcacacacttagtaatagttatgtcaacaccataaagtagttgcagagagaagttgcacatcagccagctaatggcaggaaagcctttattgccctggctgctatgcaaaggaccaggaaaattgctggacaatctgtcaaagatgttgctgcgcacattgccaaagtagaggcttaggctgagaggttccatcttcgatcattggagatgtcctactcaatgatccttcgaaccttatcgaaaaatgatcccaccatactcaagtatctttgaccaaataagatattatttacctggagggtgaatgccatcgacgaagtcacttatctcatgaaatatgaccttcaagatgatggtgttgaatctactgaggaatcaactggaaacctataacttgagcattcaatcaaagttgtggtttctttatggaatgcctctcagaaccttcaagacctcccccaggaaaaacttgaagacccttcaattctagcccaagatgcgactcaagatgcacctccaatttagccccaagaccaaatctaggatacttcttcagttctggatcaagacataacccaggatccgaccaagtcataaatttatctcttagttttcttttattactataaaaaattttgcaaggacaatttaatcatgccttaaccgcgtggccttatcaaataacttagaaaacaatttttttttttgttttgcttatgtatgtttgcctatttttttgctatgcttgaattgcttgctttttgcattttttgtttactagaccgttcaatagatttccttaggattctgaaagcttttggaagcacacgaattttcaaattcctctcctaagatgtcaaccttgtcaaagttacctttgtgggacttgtaaactttggcagttaaccttacatggagggaccattagcttgttcccaaattgccatagggatcgtagagctcgaatcccttctgagtgttttctgattaactaccttactcagaatgatgtagcgatttctctattatttaaatttagtagaggaataggctaagtgtgtaatagagtctaggaaatgcttctcttgaggaagcaaggctgaaaacgtattaacacttaggctatgcttccacaaatccaaagtaatgaagatggcacagcagtatgacatgtgtttcccgaatttgttgtaagagaactgctagaaacgtgagggatcttcagaaaagcttccttttctcactccttgtagaaaaccttattaatgttgtcaatagaccaaagcaaatgctataggatttaggcaatgttccttttttaaggaaaaggctgaaaatatattagctgtgcttttatggaaacgaagttgaatatacaatagaattcaagagacacttccttccaggaaggaggttgaagatgtatcgaaattcaatcgatatttccactcaaaactaaagatgaaaacaaagctaaaaatgcaatagacttcaagcaacacttccttccaagaagaatgttgaagacgtattgaaattcaggcgacattttcgaccaatagttcaaagcaaatttaaaaattaaaatacaagtaacaaatttaaatacaaataacaagtgggcaatgaacacatagctaggtataccacccccaagtgagctgagaagcttggatgtctccaaattcttggtcacttatttaaaacatagcttatgcaggagacaatattgtaaattcttgtgtaaatttcttctattttcatttcattatgcccgtaggcttacattaagaatgaatacttacaaagaattacatacaacttagaggaatgttaaaatgtggatacccccaacctattggtagtaacgatagaaatgtcctttttgagtgctagttttcattgctattgtaaagcgagttgaagtttttttacatctttgccgaacaatttcaagcacagcccttttgccacttaatcttcctacacgcttaagaactgaccctaggactagacagttaactatgaaagatgagaaggaaggttacacggtatatcatagtagagggaattatgtatagacgagggttctccaagtcgttgctcagatgtgttacccaagaagatgttgcacgactgctatctgaagtacacgatggattttgtgggaattacaccgctggacagagtttatctaagaaaattctnnnnnaaggttatttctggccgacaatgatcgaggatttaaaagcctatgttaaaaaatgtgacaaatgccacagatttttgaagatagctcgagctctgcccaatgagttaactcagatgaaatgtccgtggcctttggccatttggggaatttacctgatcggacaattacccaaaggcaaaggtggagtgtagtatgcaatggttgcggttgattacttcactaagtcgacggaagccg

SEQ ID NO: 113834 - DNA, 4547 bp, Cannabis sativa
acaaccaaagtgagacccaacccataactgatggtgcacgaaggtttgttgtgattttactattaaagatagattttgttagatttatgatagatttaggtttagaatgttagatctgtgatttgggcaaggtccgatgttcattcgatgtaggtccgatggggtccgagaggttcaatgaatctgtaaggttgcgaggtaggagacgtaggtccgatggggtggtccgatgtggggtccgatgcaaggttccgattgtgtccgattatggggtccgacggggtccgatgaggaagaagaaataggaagagaagagagagagggaggtgatgtaaatgaggagggtaatttgaggataacattaaagttggcctaaattataaatattggtaattataaatttaggaaatttttttgaaaattaggtaagtatatttagtcaaaattttcatttgaaattgtcttaaatcaatccaaagaatatttgatttaagctctataaaaagtacccaatggtgacatttttgtagtaatagatagatagatacaactaaaataattgatattgatagaaagtggccattttgctcttaaaaaatgtttgagctgttttcataaatatataaatgtattaaaataacaatttacaaataatatggatttacaactttttaaaatatttttacagattttaacttttatatgaaactacaaactattattttttactttgttctcacaacaatattataacatgttgttttatatttgtatttctcagacgttatttttatgttgctttcatgaaactttgtaaaaatataattaatttattttattgttttttataaaaattgtgactaattaggatttctactcccctaactttgacatatattaaattattttctttaaacttttcaagctattaaaattttctcccaggacttttatttatttttactaacggaagcctgacatagataaaaatttagagacacgatttgatagatatcaaagtttacgaggtagaaattagtacatgaataatagttgtgttagtaaaattgaatagaattagacaagagtccttaaatccaataatttcaatagttcgggaagaacttttaacaaactgaaaaatttaaaagtataatttgatacatgtcaaaccaaaaaaatcctagttagctagaagaagcaatacataatttgtaaacatttaatgaaaaacatcattttaagtacttttgtgtaaaaatccaaaaaaaaaaaaagttacactgaaaggcccaaaatacagttttacatgggcttgtgggcctgtggcccataatattggccaaaaatccaatcaatctctcactcactcacctccaaaccaagtcggcaagtcagatatcttccacactgtaagactgagtactgttcttgagtggagccaatagagaagacaatggcgtcaaccactctcaatctcaatctctcaactttcacagcttcactccctccattctcatcatcaccttcttcaaaattctctgctcttcgtgtttctaactcatcatattttccttcacggagactcgctctcttacacctcggctcaggtaattaagcttttcaatccatagtacctttacaagtttttacttttatcatttttttctctttaaaaccatcaaatattaagaacccattttctgaaaaaaccaaattgtgttcctttatttctgtttttgagtttctgggttattttcattcatggggcaatatgtaatctgtaatctgtaaatgtatgtggagtggtggctatcagttgatatgggttgatagaaatgtatatatatatagatattatatattatatatctccatgtttacttaagtagcctaagaatttccttaagtggaatagtatagaaaagctctcattgatgatgaattaaacagttacaatgttgaatctacaagatgtaaatgttgtgttttttgtacttatatttatagaataaaaacaaaagacttgtgtttgtccaacattggttgtgagtgaattgtagtgtttatattatacttagcagctataaagctttaaccatatcaaagattttggtaattggataaatgctatgtttggtataattaaattcatcaagaaaaagatcattagttgaatcttccttttggtttactgacattttttcctttctcttttggtgattatatagtgcttccacactcaccattgttagatgtaaaagcatcaaatttattaagagcagatgggaacactgtagatagacttatggcacaagcagctacttctactaccacaaaggaaaatgtattagattgggtcaagaatgacaacagaagaatgctacatgttgtttacaaagttggagacttggaaaagactataaagtatgtcactttctgaaactttcttcaattgtgcaaatttcacatagatagatagcatagctaattattttcttgaggtgcagattctatactgaatgtttgggaatgaagctcttgagaaagcgtgacatacctgaggacaggtacacaaatgcttttctaggatttggaccagaagattctcattttgttgttgaacttacttacagtaagtcaacttttactataatgctattactatgttgttattgtttgtacttggaagttctctaaatcactagcttcttctcacttgagttttctatgttttgttttgctagattatggagttgataaatatgatattggtaatggctttggccattttggtgtagctgttgaggatgtaagtttgaaattagtatgcaatgctttactttttgtgctaatgtataaatatttatatatataggaaattcattaggtaagagcgtcacttttgccgggacatttcttattttcggtatatttttttttatgatgatgtacattataattatagtatgtatcttattcgttttcaagaaattttgactaattaaagttgtcgaaaaatatgattcaaatagtcagttgcacgcatgcttatataactattttgaacttgattttttatgccataaattatttaaaatttctcgaaaacatacaggatggttactataactttagtctacacagtcatattaaaaaaatagaatatagtttctgtatgtgccaaaaacaaaaacactcttacaataggggcaaaagtgatgattccacctaagaagcttcctatatatattatcatttaacagaaaaaatcatataatttctttaaagttcagcatatttgggatttgtagagaattatcttagctataatcttctaaacaagtaaatctatgtataggttgatagaacagttgaacttataaaggcaaagggtggaacagttaccagagagcctggtcttgttaaaggtggtagtacaaaaattgcttttattgaagatcccgatggttacaagtttgagcttttggagagagggcctactcctgagcccctttgtcaagttatgcttcgagtgggtgatcttgaccgtgctataaacttctataagaaggtgtgcgcggtgtttttcattcttaatatgcaaaagaaaacgagcaatttgttgcgagttttaatttaatttatgttccaatttaggcctatggtatggagcttctccgagtaaaggataaccccgatcacaaggtaaatactaaatgatctcatgtaaagactcttgagatggcttagatgttgatagatggtgaattcttattctatgaagatcctttgtgtttcttttctatgttttagctatattcatatctgtttatggttactcaacttgcttttggttatgcttgttctccagtataccatagctatgatggggtatggccctgaagataagaatgcagtgctggaattgacatataactatggggtcacagagtatgataaaggaaatggttatgcacaggtcaatatggtttttccttctcttatatttcttcccatgagtgaactttgtttaccctataatgaagcttgtgttatgtcttttttaacagattgcaatagggacagacgatgtttataagaccgccgaagcagtaaaactatccggaggtaaaatagtactcgaacctggccccttgcctggtatcaataccaagatcactgcttgcttggacccagatggttggaaaacggtacattgactcttcttctcataaattaatgttcaaatcaactcacaaatatatgcatcttaacactatacactacacttatatagctgcctaacatttacactgcttctcatacttatttatctaggaataaagactcattctataatctataccactaactgtatgataccttatcaaacatatgtttcttacttaaaaagattatgtagtcattgttttcaatgagactttgcagaagaaaaacattatttaaagctactggaaactggaaaattgttgtgaaaactctttactacagtggcataagtacttaaagttttgagtttataa

SEQ ID NO: 113835 - DNA, 2605 bp, Cannabis sativa
ttgtagtagctgtggttctggctttacttttgggagcttttgttttgattcccagacccccaaaatctggtaaattgttcttttctttggaccttgttttgggattgatatgcaataatcaagtataatgaattgggtttggtttgggaatgtgtttgtgaaacaggtcatacaaagaatgatcagtcaaatgttaaactcaataaggtgattttttcattcaataactgaactcatttctttcttgtatgttatagactaagtgattatgtttactgattgtctttggagttatggacatttaggtagaatggaaacaatttttattagaattttatttcttattctagctatattttcattcctttgacgccacttaatgaagtatttgttatgtgagttttaattggagaaagtagacttagaggaaatatgaaaccaagtattagaggggattaatattaccgctttttaatttaaaaagcgagacctacttggaaacacaaacttcttggtcattaaaatttaatttaagtttgacattcttattagttatttgcatcaagtttaaacttcatactaaacgtcttaatcgggtgcgtttggaagtaactgtgtaattattagggtagtacagtaaagtaattacactatattttaaaatacaatgtgtgtttgggtatacagtgttaatttattaagaatttttaatttcttgtttagcaaaatagttaataattacacaaaaaagtaataatttttagtaaataatatttacaatgtgtgagaattggagagtgtaattgaagtctcttacttacttccaattacacagttacattgtaattacggggtcaaaaaaatatctaaaattgtgttattaccttcaattccaagtctctcttcgtctttccaaacacacccttaaaaatctcccatttccaaaatttataaatcagaaatttgcttaaataaattcactgttttacatattatttaaatctatattgaattgatcatttgcttagaataaattactagaaaataagttggatgcaaagtaggatctataatggttttggaatgaacatgaattctcctttaggtgatgaaaaggcttttgccattgcatccacaattccttagaaatttcacttttgacatttgagaaatatggattttgttttataacaaatttctttttattatgttttcataaatggagatgaggattggataagataaaactatccatatattttcaatgggattaatttgataacaattacattgtaaaagttagaagattgctgtacaagatcacattccatttgttcatatgattcaagtgcttttgttactaatcaatacttaatggaattaacttaactctgttttatttagggaacaaaactatacaccaaatcagaagtctctttgcacaacaagggaactgattgttggatcatcattaaagacaaggttattttttgattttgggggatgtttagaatcatttgattatctaaatcttgattcattttcttctgtataatcaatcccttttgacaatgataggtatatgatgttacctcgtatgtagaggaacaccccggcggtgatgccattcttgcacatgccggggatgattcaaccgaaggcttttacgggtatgtgagtcttttgtttcggttcttttgttatgttaaaacagttatgttctacacaacaagtaagcttgtttttccatgttgtaggccacaacatgcaactcgagttttcgatatgatcgaagacttttacataggcgatttggagaagtcataacaaatgactgaaactgtcatcatctctttctttgttaactacttgattaaatcttagaatttcatgatgttttccattgagaaaggcttattttacagccttcatctactcttaagatagaaaatttcggtagaatcatagaagacaaaatttgctactaatattaggaggatgacaaattttgtatttatttttgtgtttttgttatttgtttgtacccttttgaaaattcttgaattggagtgtatgtactaccattaccaaggtaatccttgaaactagattctttcgtaattttctatattagttgttaaattaaaatttgtaagatttgatattaagttgtactaataacgatatgatactctattctagtattttttcatctcgaccatgatgaatacaagacttgcataatagcatgtagtgaataaatgaagcacataatataatggtgagtgaaagttctgggtatacaatttagtcattagaatttactttcttaacataaaaaaggtagcatgagaattttcatataaggtgtcaaagaattttcaactaggaaatgtcaaaacaaacttattgtgcaaagtggttataaaggggaaaaaaaggttattattggcaaattataagacaaaaactagaatttgattcctataacatatgatcatttaaactagggtaaataccattttggatcctctgttttgcaaaagttaccaattggactctgtgttttgttaaatgacaaaataaatcctgtattttctaaaat

SEQ ID NO: 113836 - DNA, 2302 bp, Cannabis sativa
  modified_base (2226)..(2242): a, c, t, g, unknown or other
aaaatctattgttactttaaacaagtaatggatagtcaaataaagaactaagaagcaaagccaagagaactatggttaaaatcattcatattcttatttgtccaagtaaagtaagctcccgcactcttaacctcctcaacttgacccaacaaaagtcattgttgagcatcttcaatatccttagctaagattggcttacccccattcttatcttggaacccaaacatggcattaaaatctcctagaataagccaaggagaattgacatggcctaatctagcaagatcctcaaacatctcttttctttctgcaagattgttgctgccataaactggagtacagaaaaaatctcctgagttccctaccactttgaccctgctgtgcacaaactgattagtctcatacaacacatcaacatgaacaaacttagcttgccaaaaaaggatgattcaattagtgatagtgatgctagaatagaaatcccaattaggaaagctactagccatcatctcactaactttctcattttttattttggtttcaaggaaggctccaaggccaaccttattcaatctacaaacttctaaagcagaattctgcttctcttttttatttaaacccctcacattccaccctaaaatgttacacacttccatcaaatcacatattattgttagtaaccaatcctccctcatcagattccaaaagaatctcataaccattcctagtaacaacttttgaaccagcattaaccaccacttttgaacctttcttcctgggagtgatccagttagtatcctcaggtttattctcttgctcctttcccttcaaatcctgagttggagcaacttctttttcctcacatttatcccctggaaccgaaccaatatcctgctgtttcgaattctctgttggaccctgctctttattgtgctatttttccagttcttccttcttctttttttctgctccttcttcctccacacatgactcttttctttattgcaattagctaccgtatggccaagtgaatcacatgccttgcatttagaaggaagccattcatacttaacttgctgttcagccaactgttttctctcattaatataagcaatcgtctttggcgaattttcagaaatctccatgtccaccaagactcttgcatacttcaccattgtcctattcgcagtgactttatccaccatgattggtttaccaattgtgctaacaagagcactaagattgttttccccccaatactgtaaacccaatccattcaatctcacccaaactggaacagactttaccattctagcagagtccatatctgtagtccagggcctaaggatcacgggcttcttatcaaaatatataacacctgtttcaagaatgagatctctagtttcttcatccctaaaactaaccagtgtaaattccgagtgcatccttacaattttttccactcctaggtttccccatactcgtttgataaacccttcaaagactctaaatggtggattagcacccaaaacaatacaaacaacagaatttttctagaactcaacttcacattcaatttcatcaacatccaactttacaaccgattggtctccaaccttaattggttcagtaaattcaagtttggtcgaggttgtacgtacttgatttgtcttaaatttactccagactttctttgccgacgtctgaaaatccatttgctccaattgcttaacctcctttgcccatgatttagggtttgttctgatcgagctctgcgtgttctccttccagaatctcacacgaatcatggaatatctcagttccagttgggtcttcttcttccttttggattgaagggagatcagtatcagaagttccttcatcgattacaaccttggctggcttcgaagcaatctgtttcttcttcgccatgagagaaaactgagagcatcacacgcccttaacgctatattcgttcacataaaaaatttagaccatttctcaatttgtgcgtgtcatccttgaaattattttaacattattagagtaaatttctacatacatataagtagagtaaaaaacgtgtccaattgccaaaatgtatttattgaagagaagaagaatatgagtttgcaaataaaaataaagtacaatggcacaaaatttctattattatattgcctttaccttttggttaacattatgggtgttcgcggtgcgggtggnnnnnnnnnnnnnnnnnttttcaaaccaacccgcacatgtggttttttcaatattccaaactgcacccgcaccgcga

SEQ ID NO: 113837 - DNA, 4990 bp, Cannabis sativa
  modified_base (2337)..(2349): a, c, t, g, unknown or other
taaaatctaacaatttcaatagttcgtgaagaatttttaacagctaaaaaaatttaaagacatgatttaatacatttcaaaattcgaaaaaaaaatattctaattagcctaataatttttagacagtattattaaccgattataaaacaacacctttagaaaatactaaagcaaaatgttgtatttataattctcaaatccaattgttttctttgttttttataaaaaaaataaaaacgtggtaagtgagttccgtacgtagtagacctacaacacctacccataggctaaaatgtgcaacgtgtaggtattagtatgtccaatacatcaaatcatattataatatagtcaaagtttctgatatatttgaccaaaagtcaacatatgttgacattctttcttctccaaatcttctaattaacattctctttctcttccatgttgtgtataaatatttatatattaatatatatatatatatcactttcattagggttaacttcataatatgattgtgtgaatgagtgaattaatttaagtctttcattgtagactaatatacaatacatgtatatatagggtaaggtactatttcagaatcgattttaaatattttagtatatatgaataagatatgacaatgtaatataatgttatacaaagattctaaacatcatttttttttttttggctaatttagatttttactctttaaattttgacatgtattaaattatgtccttaaatttttaaagtcgttaaaattcttcctgaactattgagattgttggatttaaggatttttttttttctaatttcattcaattttattaatatgtagattgtctatatattaaatcgtgccccaaattttaatatttacaaaatcatgttccctgaactttaacatgtataaaattgtgccctctaaattttcatcatcgtcaaactttctttaataaaattaaacaaaaatctttaaattcaacaatctcaatagttcgagaggaattttttacgacatgaaaagttcagaggtatgatttggtacatgtcaaagtttaaaggacaaaaatctaaattagccttatattttaaaaaaaattagattattaagaatgctaaaatagagtttttagcaactaaatcttctaattatttcatttgcatttaaatctcaaaacttaaattttgataataaaactgttagtaaattattcataattttttaataatttattgaaagtgtcatgcaactaaaataattaaaaataggcagatgaggtttttttttgttaatgtttaaagtaaaacaaatataattgaaataatttttaaaactcaagttaaatttaattataaatattatcatagtgaaacaaattgataaaaatatatatatatatatatataataattaggaaatattgttgtatataatttaaaaatgggcctgggtaggtcactatatatgggcctgactcagtaaacgacgtgaacgattttgttgagtgttgtatattactaaaattaatatttaatatatatctccttctatctagggttttacacatggattatagagacgtgttctgaccaatcatctatttaaagttagaagacaaaaataaataaataatttttttttataacaaaaaataaataaattaattaataaatcaaattgagacaccttttattgtttttatcatttttatttgtttttttgaataaaccacataattacttattaccaatttaccgtagctatataataatttaaagagtaatttatagtataaatattcaagtaattttttattataaataaatatttaagtttaatttttaacgataataatatttaagttataattctgtaatttatgtagatacgtaactattaagtgttaagtgaaattaaattaattaaattgtaatgtggcaattattattaattttttttaatataataataaataaataatacatggataatgatttgacatttattggccacgaactatctaagtttcagatatataacttaggtattattactgtcaaaaattaaacttagatattaattacaactggaagttaagcttaaatattcactacaaaaaactgttacttttagtgataaccttttagtcacaatataaattttttgtgactaattaaatgtgacttttagtcacaacaaaaaattatttgtgcctaaaacatagtatttagttacaagttatcactaatttaattttcgtcacaacaaatattgtgactaaaaatatatttagtcacaacaaatcgtaatttttgtgactaatacttttnnnnnnnnnnnnnttagtcacaacacaataataataatttataattagtcacaacttttaaatctttagtcgcaaattttattgttacgtatgatttatgctgcaaattactctaatataaaaactctataatttaatatttattatttatattagtgtgtgtcttctctaaaacaaaaaatactaatttagtctaatttcacgtgctaaatatgaaatcaacttaatttttcaaaatttataacctgacataatattattaattacaactaaaaatacaaatgaaaaataaatacattgactttaaaagggtatctaattaaggtcttaatcaaattttttcttcttcttaataatatagttttacttcttataatgtatttgaatttgaagttcctctaataaacattaaaaatctattcaaccataaatataataataataaaattcaaagaaaatgataaaaattgagtaaaagtcttaacatatatatatatatatatatatatatatatttaattttacaatataatgagaagatttataacatcacaatttttttttttaatttattgcatactgctttgttggattagttgaatatatatctgttttctttcaaggaaaagttatatgataaaactttgcaagaataatattattgtataacacactaaattaacactaaaaataatactttaaataatattgttaaaactggacttgatacatacaattattaactcaaagtcataataatatacaatgactttgaacttatatgtacaataatagaatcaaatcccaaaaatagtttgtagaatattttcatgaacctgcagctattatatatataaatatattacttattttaaataaatggttgcaaaaaaaaatgtatatatataacatacataatatatataacacaagaattttcaaaagaaaaaagaaaaaagaattaaccattcaaaacacaactgccaaatttttcactttttgctttccaatttcaaaaaaaaaaaaaagtaattaataaattgtcaaaaaaataaataaattgtaaataataaatgtcactctagccaaatacaagtccacataatatttactatttaaataaataaaaactaagtgcagtttttattgtattttttcaactttacaatcaaatatcatgatgtttgaaggaacacacccaaaatttcaaacaatattataccaaaatatattgttaggtttattaagtaccaaaaaaccaaaccctaatagaaattaccaaactcaatttataaacacattacacacctaattatgattaatatatgcttagtgaaaacataattaaaatcaattcttaatttgtaataacttgtcggcacaaagaaagagatcaattcaaagatgatgttcttttgttttaattcatcatattattaaaaaaaaaaaacaaaacaaaaaatgaccgacacaaaacattgttttgatcaaaaacttctttcgaagctttcatgatccaaaaattaataaagaggtgaactaaattgtttttggtcatgtgtgaacataaatcccacttaacctatttggcatattttttctttttttctttttctcattaaaggaaaaaaaagaaaaataaaaatcctgaaaaataaaataaataaataaataaaacagtaaaatatgagataaatattaaaactattgttaaagcggctgaaagtagtagttcaatacaaatacaaacaccataactatttatatgtatatatatagatgaagatttgatattaaccaagaaaagggtcttgaaaaaacatcaaataacaatctgggtcattcttaatttctcaaaattgatcataaatatttacatgtgctctcttaaagtggcgaaccagagaaaacccaacgatgttagccatggcggcgaagaagaccaattagaccaacaacaacaacaaatgaatatattacttaaccaatacggtgtcgtttcaccggctgataatcagagtggtgttggtgttggtgttggtactccgactgagatgtcagcaattgtttcggctctaacgcatgtcgtttcgggaaacagaggagatgagttttggggatacgacagtcgttttgatagtcaagtactctatggtacttctccttcttcttcttctacgacatctggtcaaaagagaggtcgtgatgatgatcatcatcaacaacaaggtgtttcttcaacaaccagagcttttagaacaactcatcatcatcaacctgagtcatcttcaactggtaaagtatttatataagttaatatgagtttttggcttaaaaatcccacatcggttaagtgtgttgatttcataacctatttatatcccatcctttacaattggtaccaatgttataattcaattgaatttatttatcttctttattaattattacagaagaaattataacaactatgtcggttcccgccggcaatgtagctccggcgccgccgtctagcgaggcggcgccggcggaagataccggcgagagaagaagaagatacagaggagtgagacagaggccgtggggaaaatgggcggccgaaattcgggacccgcacaaggcggcgcgagtctggctcggaacattcgatacgg

SEQ ID NO: 113838 - DNA, 6620 bp, Cannabis sativa
acttgacatccaaacacaccttgtattttaaaatacaatgtaattactatacagtgtaattactaccatagtaattacactgcatagtaattacacaattatttacaataatagatattaggttggttggatgactgaaattaattagatcagatcaaatactaaaatcaaacatctaatatataattagatcgatctgacctaaaaatattagatgtaatttaattaagactatgtaaaaggtcatgaatttttactactaaaatgaatatttacagtgtgtcaattatggctattgatttctagtttttcttttcttttcttttttacagtaaatttttagttactgtttgttgtatattaattagcaatttagtttgtttttcttatatttcttcttcttctactacttattattaagacatatcatttcattactcacattttatttacgaataataataaattatttatagtttcatctaaaatttaggatgtacagaatattcaataaacattatacctcatttgtgtgacattaatgccaacgtgtggtaataataataataataataatatataacgacctctctaaataatctaagataataatatacaaagagacttatttataggtgtgtaatatataaataatttataacaaccgaacattgaaattgtcctccgatacatcatattgctcacaacttcaaaagaaaaatgattatatgataattagcagatccaaaatttaacttaaaaagcaattattttataatatgcgactatgtgtatttatttttttagggtgagaatttgtgtttatatagtatttagtattatttaaaaaactcgtaattaacaaataaagttaaactaaatcgtatacattttaggagaaactaggtacgtacgtagtaatagttcaaatccctctaaaagctttgcacgtacgtatgcgttttttttaggaaaaaaattcatatataattttaaaacttgtataaatttcaatccactaatatgtattattattattattatttttagtaatatattattgaaaaatgctaagggggcaccataaaaatgggatattaatattggttcatattcagtactatatattttgatttaaatatcggtacggcaccttatagcaatacaacctcatctcaacgtggtccgctcttgattatgattatatgatcatgatcaatatcattgctcatcctctgagaggctatgagaaatagtatagttaatgggttcacagtactattagaaaaaatattgtaactaaagaaaatatgacaataactataataataataatggatggagctgagcaaaattcatgtgaggtatttaagagaacggttggatcacgcttagttgtacgttataatgccctttttatttatgacaagttaagttataaagagacgatacataattgaatagatccttaaagagtaataggatatgtagggctctgctactcttacttactatatatacttaattaatacttataccaccacactaataaatatcatcttctcttcttcttttgttttcttctaccttcttcctcattttaccacacaatatatataattatactcatactcatacccctcgtgaggctctctaacaaaacgacaatctataaaattattcaccttatatatataaataagaaagatgccattttttaaccgtgtttcttttaaataataattataaggataaaaattgattatttaattgttgctattgtaatacatatttataaatagttcaaattgtacggaccggaactatattgtcttcttagttgacaatttttcattagctacaggaggatttaaaattttgttttatatggttgggatgtgccaactgattacaaaataactgtaacaaagttcacattttttattttttagatgtacatattttgattgatcagttaattacgttctaatttggacttggaaataaagaagcttctataagaaaaagaaaattactatgcaaccaatttacttggtatcaaattatacacaatccacacataattttcttttcctttctaaaataaaagaaaccaattaccgctgttcttcttattaactatctacttttagtgtaccaaaaaagaatgtattcttgttaactctcctctctctacctattattttgtgagtgtacgagccaattaataaattatagcatgagtaatgactttaatactcttgaaaagtatatatatatttatatatacaatttgtcccatatgggcggttgatggtttctagttcttaaaaaaaaacaggtgaacagaaagaaagaacaatacatatataattaataaaaagagattaaatacggcatatacacattccaatattaactaatgggacaaaacataatgttggtagttctaaaaacaaggagagttgatccaacggctaccattaatccatttgatgaaatatattaaggttaataataagagtaggaaattattataacatataaaagattatcttttgttggaagttgggtttttttttttagtgtagcgtaatcatattttgcaattatttaatagtttaataatttcaacgacttaggttcgaactctaagctagtcttggtggcttgttgggagttggggttaggagttttgtttgggaccatattatattattaaaagtataatagaattgctatatagtaccggtagcagtggtagtaggcagtagatgtctgtgcttttgggttgatccattggtcatccaaaggagtttgatatgatatccatgtgagagtgggcccaattagctgttttcgttgtaccaaaatcgtctcaccgtgagactgagagtgacaccagtacttgtagtagggttctctccaacaaaatatgaactaagccatagacaaatgccaaacctggtggggccctcaccctcatcttcttttctaaattttattttatttcacatccaaaaaccccagatccatatatatatatatatatacgtatcatatattatgatctaagtgtttaaaattacatttattttgttaaagctaataattaactgtttgtattaatttaattactaaaactctatcatggagttaaggttttgatagctaattaacttcttattatcattgaaactggtacatatgatttttatttatgtatattgttgagaagttaatgatgcttaattaaactagttatataatgatgacatctatgatttttatctcttctgagtctcttattttacaattattacatatatgtcaaaatttaattaattaagctcttaaaatcttttcttatgattttgggcgttatccaatcaattaagctcttaagaacaaatgaattacaaaaatgtataattattctcacacaaatttaatttaaacaagaccatcaatattcaatattaagaatagcttagcaaattggtgatgtgtgtgttattttttttccctctttgtgatataaaaatatattcttttacttaggtacaataaattggaatatctttttactgtttttgttctataaagtgcatcactttcttgttgttttttaagataagaccaggcaaattattaagtactacgtactgctctgtaaaaaaagacactatttcctcgttagtgagataaattgtcctataattatatattttctttttttatctttctgaatcataaaacggcatatatcaacatttatatatgatagcgaatcatgaacaagaagtacacattaaaaactatgcaactaaaagtagtattcccatacatgaattatgatagcgaatgatcactcattggtatttttcttttgtcatttcctcgcaaagaaagcttccaaactataagaagtttcccttaatgatattttaatttccaagtttcacaaaatgctttatcatttcaaaactatctgatagaaaataaattgtaggagagacaagggaattgaaaaaatgtttgtttggttgaaacttgaaacttggattggagggaaagtgataaataatgagtcactataataatttgtataatgaaatttgattattcatgcctaaatattgtgttgcatgatctaattatatgtcaccctattaaacatcaaacaaaatatgctacatctttttttagtactaaaattaccctttaataagaaaactaaactccttcccctatctttcctcttccattcccgtgtctctctctctacaaattagtcacacacacaccatttgtcggagttcatcaattttgtctgacaaccaagtgtgtttacaaactctctaccgacataattcttgaaaaaaataatgggtatgtaatttatttggtaattattgttaaatttagttgtatttagattgatatgaatatagatctatacatatcattcttttatttttgttgttttgttcttgaaactcgagctgctcaaattttgtattttttggtttatttttgagttttagcgatgtttaacgatactttggcgatatttagcgacattagagtaggctgaaggttaggaatgaattttaacgacatgtagcaacatatgtagcgattaaatttacgacattagtgtatttttgctttttacttacgacttctgcgatgtctatcgatattatttgcgatatgtgtcgatgttcttagaaaatattttggtgaagtagagaaagacatttatcgacttgtggcgattctctgcgatgtaattgtcgacatggttaacgacatgcatgttgcgacatcacttgcgatatctctcgatatatttttcctaaactaatttttgccatttttgtttgcagattcaactgtatttatagttgtactatatgacgagacttgggcagttaaaggtttaaactagatattcatcaatatctcaaaaagtaagatgttaatgtttgaggttgacactgttttacaaaagatgcatgaaattttgtatgaagagttggatatagaccctcttgtgtatgaactgtagaggtatgttacatgtacatgaaagataatatgataccattcgaggttttagtgaaagatagacaagtaagattgttcttaagaatggaggtaaaaatgagtgtagagaatttgcttccactatttgtaacttataaggttaagaggcattcgaattcggggcctactcatcctgtccccccacgaagtgttattgggagtttttttctagaaactgatcatgcagtaagtttcaatgcaagccactactaatatagatgaacatagagttgataatgcatttgatcaaagataagttcgatgctccattttataacaatgatcttgtggtaagtttaaacgaggatggtgatatgttgcaagttgatgaagttgtagaggtacctgctttgaggttagaactacctctaaggaactagagtgcagagcaagaaagaggactttcttgttgtgaaaatcaccaaacaccaaggactagtagtagtcggccaagtcctcctcatagtactgtaccataagattttgaagtttgtacaaaattcaaacctcttgtgtggacaaggaaagacaaaaagaaaaataatattcatacagcttctcttagtggtacaccttcagggaaactgcacgttggcaagttgtacccaaacaagactgaattgaaatatatagtgggaaggtttgcattgaaaatgaattttgagttcatggtgaggaagtttggcaccgatgtattttatgtaacttctaaggattcaaattgtaaatggagattgagggggaggaagaaggcatgttgtgacatgtttgagatgactatgttccataacaaacaaacatgtaatttggattctagacatgttgataactgttgttaggacttaattagtacgatttttaagtaggtttttaaggtatttttagttagtttttaatttttaatttttaattgtattttttttttttttgtaattttacgcttttgattgttaatatttttaggttaagtattggagaataatagagcaaatttgagaaaataatgtgcaaaaaggattaattaaatgattttttttgctaaatcaccaagagaataatccaataaagaaattcaaaagatctggtgtgattggagcttctaatattaaaaaattggaaagcgtgaagtagcgcctcaacattagaattcaacgtcagggccctaaaatgctaaaatttggcagtaagttcgtgtttagcaactttagaggagggcctcaatattaggatctaatgttgaggcattggaacccttaaatcatcaatgtccaaaattgggcttcaagtgccgcgacaatacaaggaagtgttgcagtgctctataaaattcttgtcaatatatttcactacaataattaccttaattagcggcggactactccagcgctaataaaccccaattctgtcgctaataatagttattagcggcgaaaattccctgctaataatttcgccgcaaatgaacaaaattattgtagtgttttttgtggttgaatgacaccgaccgt

SEQ ID NO: 113839 - DNA, 2169 bp, Cannabis sativa
  modified_base (189)..(190): a, c, t, g, unknown or other
  modified_base (2073)..(2102): a, c, t, g, unknown or other
atttgatccaagatccaataagtatccgaatgtttcggatcagaggtgatccgttggatcggagctccaacccgctccaactaaatagatgtttttgatgcctatttttagtaagataataatagtccccgaactgcacgacaataaggcatgtgacgtgccaattactttttatttatttatttattnntttttttttttttttgattttgaagctaatcttaatcaaaacaatttatttatgctttaaaatatagaaactaatttgaaaagtaaaaaaattagtaattttctataggtacatttgataaatatgggttggtcatttcataaaaaataggatagcccgtttaggcccagcacaagttcggcccaacatgaataatttgtgcttaggtcgttgggcttactttaaaatatgggtcaggcctgacccaacccattttataaaatgggtcggacgggctcacattaataaagtgggcttttataaagacaagtcgggctaggccaggtcgcctgaatgtacatctttagtcacaatacaaaattaatagtaggggtgtatgtcggtcggtttgttcagtttacgttacattttattcaaccaaatgtaagaacagggttacaaaaatctaagtgcaacctacccaattaagaaaaaaaaaattaaacctgcccaatgaattggtcaatttggtcgggttaactcgtctaaaccgagcactaatattttttttcacattcaattattatattttagttaattgtgataatgagacaagtatagagattgaattcaaagttcaaatcatccgccataaaagaaatatagtagtttgatctttctattttttataaatatgtatataaattatataatatatagattatatataataaatatatatataattcaagggttagtttgggttgattaggcggcttatatttttgtcgggtttttcggtttacatttttcgtcgagtttttcggtttgcatttttcgtcgagttatctcagtttggtttaggcaggttattcggcttgggcagtttataaaagtttatgtttattcctaattaataggttcgaagatttagagaaacttacttgtaatatgacatggggatggaggaaggtgagggtgcttggcctagaaattgaaagcccaacaaaaaatctagtcacagcctacttgaatgtcaactatttcagacgactaggggtggctcacaacaagatttagtggcggcactcttggaaactccattgctcaaatttatagtaggaggtggataacaacgtcaaagagatcgctcattcaccaaagggtgaagcttaggttttttgggattttttctagggatcgttctctggtaaaaatctttcattcaaattcgaaggcaaaagttcaaaaattttaaagtgcaaaaaaggtgaaagtggtttcctcgtgcctatatatatgcaaaagtggatatccacgtactttgaaatcaagggccaagatctccctagaaaaacacgaatcacaatttaacggatatggaactgaggggacgacattaaatgcctttataggaatcgaggcattttttcatgattaatactcacctcggggcccacattgacagtaaatggtcgccgttccatcgtttcacacagaacatgccttcctaaagtgcatggcactcatgaacccaagaggtggtgacacgtatgtgatgacagttgttctccaagcagattctcgactcttcaattggtcgagtgtaggaaagagaaaaaagcttccactacttttagaattgtccacgtgcctaatgacaccaaggttgttcagaaggaaggtttcaagcttctgtcactcttaagtcctagaagcttgggggaaaatattattcgtgttttcgaaagatagaggcattgcataatatgaaggtaatcaccacttaaaaatgggcctaagccttccccctcccagaaggccagtctagacttggaaccggcccaagcctaacgaagacccagaactttgccttgggtacatatgttgggttttatgccctnnnnnnnnnnnnnnnnnnnnnnnnnnnnnntcaatttagaagtgaattatgattacatgcatgttacatgtttatggtttaatatatatacttgata

SEQ ID NO: 113840 - DNA, 3483 bp, Cannabis sativa
agtatgtacacaaaattggttgaagactgacaaaaaaggtagatatcatttaacaattgtaaatatatatttatatacattttttcatttatttattagaattaatatttgttttgtttttttacaacaacagtgaatgatgaagataatgatgttgatccaacaatggtaattagttaagtttttccaatttatcaaataaattatttgtttttattattaatacttttttctattttttattttttttgaaggagccttacgtagttgatcttgatgattagaaagtatattggtctttttagtagatatgtgagtgaggacatggatgagaacaaaatgtagtatttatggttgctagttattatatttgagtttatggttggtagttattattgatgtattaaatatgttaggaataaaagtacaatctcaaactttcctctattatgcataattgaatgattgattttcatacaaaaaaaagagatttttacctaattaatgaattttactaacaaatgaatccaactatttatctttaaaaaaaatacttaaaacaattatcctccacaatacaaaaattaataaattgttaaacatgtcttctatttttattaacaatttttttacctaatgaataaaactatttatctaaaaaacaatatggagagattatttgtttgctctctaattttctcattaattaaacaatataatgagattattaattcctttaaaaaaaacctaatatctttttcttgagaacattgatgttataagacatcatcaataatatatatggttattatttttacttatgcatatttatgtaatatacatacatattacaattgtttattatgtaattttttattaagtataaaatggtgacattatttttcttttaaaataaataaactgattttttaaaaatatatatatgcgtcgggcctaacttggcccgattatcttaggtcgggcctgacccactaggcaaaaaggagtcaggccgggccaaattgatatcgggccgagtcggggttgtggcgggtcgggcccagcccggtctggcccgattgatattcttatttaaaagtctaatgactttagaccaccccgtgaccttcaaagggaaagggaccagcagctagtcttaggggaagacctcgcaagctctaccagaaaagtgaagaatatgagattcagagggtgaagatcaatgaactactccacactcgaacatacttatgtgaagaatgaggtgcttggtgtaggtagttcgcctgaggtcccgacgaacaacagtacgaatacttcctttgggtgcctggagacatgttgaacttgaaaaatttgtccaattccctccacacatgtgtctctgaggaagactatttcaaagaaaatagtttgtatagtactacgaacagttgctcatgaaggaaacactcaagatacaattttatcatcatagaggagaaatcctcacggttgtcatcaaggccacatcaccagacaataaccacaaggcccaggtcaataaatgcctttgatcaacttggaagacaaaagaacctacataacgacatcaaaaataagtagctagctgatacacacatcaccacaatgtataaggctgaatttgacacctttgtcgctctggttaagagtatcactactccaaagacaacaaagtatgtattagattgggagtggtgttatcctctctcagatttaatcaaggctttagagatcccttcaaagttcatatatccaatgtggtatccatacagtggcaaagaagacgctctctctcacatccacaactttgaagtacaaataagtagcaaggtactctagacaattctcattgtcgagtctttctagtgatgatattagaagcaacataacagtggtatctcaaactttcccctagatctattgatttttgggagaagctcaagaaagcattatatgaccaattctttcaatcaaggcatagaccaattaagctaaccgatttggtctgcatcaagcaacaaggagagaaacctttaaagggttacttacaatgattcttagaggcaacaacatagacaaagacactcagtgaagatgccaaggtcatggcaatcacagttggaataacagtaatgagtccattctagaaagatttgaagttcaaataagtatacaccattaaagagcttctagacacagttgatagtttcatcaagcttgaagaagccgttaagaaggttaaaggagttgctcaaccagaagcaaccgattacaatgcttatttatttcttgattctcaaacagacattgaccaagaaagtgaagaagaaataacaactaatgcctccacgaaaatagactcctcttttatttcccatgatgaactcgagcaggagatagtgatgatgaatcccctgctacttatcaagaagacgtcgaataagaaagcagtgataaagaatctccccctacttcccaagatgactcaagagaggggggagggatgaagattctccctctatttctaacaattataaagaacaagggagcaacagtgaagatgtgtgttattagtcttcgaaagatagtgaccaagaaagcaaaactgaagactccaattgagagaggggaggcaccttaaattgccacagaagcgtttgaacctcgaatggatctgaaatgataataaacaggttagtgtttgctatgactgccacttgaatccagtgacagtacgaaggcactggaatggggaccatttgaaatgataataaaatagttgttccctaaaaagttcgcttcacagtgatatttactttaccttgtgcaagtaaatcgatcacctctcaaaccataaagatgagacaaagtcatcttcagttagggaggtattttgctaaggtatggcctctacactatttttcgaatatgacattagtgtagtgggctatgataaaaaattaaagtctacaactacgacttctttttctttcaacttagctcacagtgatgtaattcaatttaatatctaatgaataagaccgttgagtaaagcttatttaaccttcattgtcattaatcaattacagctcacaaacctgacaatgctcttaggcgctgaacaaagcttgtagagttggtattgatgtaaccacgattatttctttagtgtgttaaacactactaacccacaaatctttgcataagtcgacgagtgcgcacatatgtaacaactccatgagatacatgatcaagaaagcccaacaagatttggtatggcaagtgaccaatgaaatgttgggctttgtgccctaaataaaacactattttaatgtaatctttgccattcaattatcaataaagaaacataactactctcattacatatttagtatgtcatttggttcatgtgatcatttatatgtttatttgtttagaaattcatccaaatccttatca

SEQ ID NO: 113841 - DNA, 2753 bp, Cannabis sativa
cgttggatcggatggtcaataatcactggcagaagtgggtttttggggtcatcatgatcaacggtgactggagtacttgccattttttacttcaagtgaggagaaagaaagaaataattaaaaaaaaaattgtatgtgctgttttgtttattttttcattttgtgtagtgttgtaggagagccattaaagggtaatggggaaaatggaggttgtagagaccggtacgctttttattctcgaatttggaaaaggaaaactagtggacaattttcaattttttttatttacattggcattattattttatttttatttttttggatcctatccactatatgttatttggtggtctaagtcgaagaaaataagaaagggaaaaggaaaataagaaatgagggagagagagagagagagagaaaaagaaaaagaaaacagtctaatgaataagatgattaagttagttgtaaaatagtataaagttgatatatataataagtggttttactaatccaattgcatgggcccaatagcttacgagagaaatccacgtgtctagcgtctatggataacagatagactcagttgaacagtggatgatgctaggccatacaaactgaataataataattattacataattaataatattgtaattaatcatgaacactaaaatatatatatgagaataatggccttggataactatgtggcttgaggagaatggacatggtgactggtgaatacgaaatcttattggtgatatgaggttatacagaaggataacgaagctgagtcagactcttaagatctatgaatatacaattgaaattattatattttgtacaagtggcattgctcaactcctccgtttaattatagattcttctttttttaatgaattattgtatgagtgataacgactatatagcctataggcttacttacatacatgtgatgtgagctacataactaaataatgtttaagaaggatggcctatatcgtaaatcttatctctactttccatttaaaggaataaatttctcatgtatcattattaagagagaaatgataagggagggacatgctaagtaccatgtgacatataaaaatatttaattactcacaaagtactatattagtagtgtcatgtgagacaccttaaagtgcctaatatcacttattaataagtttattacacaacatcatattaagtgtacacactcgccataacgaatggattagtgtttttttatctctctagctattttatttttcaggtggaacatttgtttgacatctgataatctacatggacttataaaaacaaaggaaactttttagtttgtaggcaaaaaattgaataatcttatattctatcataatttatcctttttaatataaaccttgtactttgttcaaatattttaacaataatatattcaaagatctaaatccacaatcctcctaaatcatatataatgtaatttctacaaataaataatattattcccacatataactgattagcttaaaaagaccaagttcgccttactttttgcaataatccaacctagacaaatcttccaagatttatggtcgtatcgtactatatattgtaacgtaatattatattaaagagattcgttccctcttttacaaaagttcacaaaaaaattagagacttgagttgttgtagagtactcagaagaccgagtggggcccaatccaaactcatcaacctatgagctggttcatgaggccataccccatctgattagtgatgactcataatcaaacgagagtgactgggttccattttcaaaaactaaaatcagacaggaatgatttggggacggtgcgtactaatgtgaaattattgaatttggttggcaccaaaccattaatatacgtaagagcatatgagttatgtgtctttactgaatttatatggtatgtatggtatgggcttttgaaataggctagtacttaacgaggttagaacttaagttatgaccagctgacaaatgttttatagtgtatccatgtgcgttgtgccaataatataacatgaaatagtttattaatgtatttccgtttttatgaaataaaagtggtcacaaaagtacaagttcaaaataaacttcattttcgtgatagaagttgaaaatcgatcaacttgatgatgagccttttgtggaaaggagccacatttggacgagaaggcaaatgcctcttcatttttgttttattattaataattaatataaataatttagatcaaatgttatatatccttcacaaatttgaagtttacaattatgctctaaatttggatacatttattagtatttttataaaaattctgaacataatatacatcatttaaattttgctttaaagacctcataataaattatactaatattataaggtaatatcaggcatcactagtggggctaatgctttatatttctcaaatcatatatattattgtgtgtttcgaaaccaccatataattataattgagtataattaagtaatttctatgttaagccactaatgcaaaacaagtttagtggtgagggaaggatgggaaaaaggagaggtcatgggtcgaatccaagacttttaaactacaaactattaattgattgtaaagaaatgctaaagggcactagtggtgtctagctaacaccctcctacatgtcaatatcgctattggtccaactaagtatcgggtctcatataatt

SEQ ID NO: 113842 - DNA, 2889 bp, Cannabis sativa
tgccaaactccaataggaataatcctaattttctctcatttcattcattgatccccatttgtgtaatagtattacatatttatactaactaagcaatattaacaattgagtagtccctataacttttcatgtaacatatcatctactagatgctacatttcctcgatgattttctttttttttttttttttatttgaaacaggatacattgccaacaagagagaactacaacgaaaatggcaagtctgtgataaacacaacacaagttgtagagggaaaatccctattctagaaaacactaacctcataattaatggagtacttagtagaagatgagcgacattatttgccttatgaaagaaaaactgaaaacccaagaaaccatgagtgggaacaatgattgtgctttaaaaattgtctttctctctctaattttcgtgcctccaaagttgtctaatgaatagtccccttgaatttttaaaattagggtttaaaaaccatattggctctaaaattgggtagcgagttgcgacatagcccttttaatgtcgtgacccgggtagctaatttttgggcagcaagattccttgtacagagaccgatagtattttggccataactctttcgatattgctcgaaattgtacgaattaagatgtttttgaaagatgaaatatatatatatatatatagatcttattcacaacgtttttcctgaaagtgaacacatcatagtcaaaaattagcttgaagctttagatttgattttcgatcacaaacggagcgtgttgagcatccaaaacttagaatttttcactcattatatcttagagctccaaatttcatgataaatctatcatattcatctcatttaatatgtttctttttattttatattcatattatgaattttactatttaaacatgaaacaagtagaaaacaaacataattctgcacgaaataaatataatcagctgaaacacacacctaaaaaacttcctaaaatgcacctaaaactagcctatcatcgactctggtggtggtgggagagaatggtgtgggtgtttatgggggcggagagggctgtgagggggatggggtggtggtgccaattgggatggtgatgcaaacgagagatactttcccaatgacgtacgaaataagggtaagattgtagtatacagggaggttttgggtgataggcacgagcgttttgtcaataatttgattgtggacaaaattttggtcatcgcatgagggtgttcttgatttggtggagatgaagaaacgaaagttaggtgttgagggggatggtgtgccaattattgttgttggttaaatcattaaatcaattctattattcaacttacaattaaaagcttaaagacaaaattaaggcaagattaccaatttgatctctttcttcaccaagaagtaaacttaaaaacctaggggtaatatggtctagactcaaaactcctaatgcactcagcattctaaatatctaactatattgtcccactaaaaccaggatattatatcttatctaagtgactttataggccaaacgccgcattctactgttactgggcataaaaaatatgaaaaacataaaattatatatatcataattaatatacatagaatttaaattaatctctataattgtaaaattaataaccaaaagcctaattctgaaaataaactttaattatctactaattctcaaataaagctgagcagtcatatatacatatgtataaatagatttaaaataaaaaatgataaaaattatagtttaatttatattgttaccgcagatttatgttaactaaatatataagtttttttacataataagtttactacagaatttaataataataaatgaacacaagatattttatgtggttttgtagttaaaattcacatactccacgagtctttcttattagggatattttttggacatagagtacagttctttcaataaatataaataatagtttctctctcaagtttttcgtcctccttttttcctgaattttacccctatttatagatgtataggatgacaattatttttattaggatctatttatttacaattgttcatgaaacgtggacattcctcacgttttatttttatgcacatggataattatttaataactacccaaccgctctttgtctttattcttaaacggttatgttgacttagaatgttgtttctcactgaatgtgaattttccttctttaccgtctttataggaaaaaatgttaagtatgaatatgcttctccttgcagtgtttttcatattgtagtgatattagagaggtagttactctgtcgcgtaaatggagagatggatgaatgtagttattttcttcatatactaacatgtggattaataagttgcaagctcttattcccaagtatgtgggtcaatgagttacaagctccttgatatctcatctttatacttatatattctgtctatcctgagatggacatattatctcatcaattacatctgttaatagttattactcttatctcgcatatgcttatgtggcagggagagtttgaatatttctatcaactataattaattgagacggttatttaagtttcatttaataatgcaatttaatattataattattgatctgattcatagtcattttttagtacacgtgttagtttttgataaatggccgaacttatgtccatatatacccaaatatacacaattttataaaaatacaaatattgatattataaaaaaactaggtaacatatccgcgcttcgcgcggttttgtattagagttaatataattttagaccatatatcttgtaaaataaaacataatgatattttgagtct

SEQ ID NO: 113843 - DNA, 7937 bp, Cannabis sativa
agaaaaagaaataaaaaaaaaaagaaagaaagaagaagccacttcatttttagtttagaagaagacaactcaaaaaataaaaaatgaaaaaacgtgcacttatattgaatacacttgcaagattaattgtcttaaattaatagaagtgcagttataatacacggtattctatttttatgtagaacgttagtttttgctcattgtttgtgtaaaggtattattgtaaatagttttctaattatgtatattaatgtaaagatcttaaaattatttacgatattaaaacacacagagatgtatcagtacattatagaatttttcaataatatatatctatgtatataaatgaataaaaaagaaagaattcagccaaaaaaaaattaaaaagaaagacgctcaaacaaaaaaaaaacaaaacaaaataaaaaaaaagtttttagattttcgtgaaaactttatatttacaaaaaagaaaaataaaatgtaattaatgaagctatttgttggatgcaggtggtgcacgcgagcttgggtgaattggtcggcattcatcatggggaggacggtactttgtgttgctatgtcacattaacgttataattgtaattaatttacctataatgtatattaataaaaaaatcccaaaactataagtaatgaacactaggttgtctacacaagcaacttctttcgtgggttgctcaagagaaccaaagggctaaattctagaataggccttaattaaactgcaataattgtggtctttacaaatagagccggcgttaagtatagacgggttaagccctaaatattggcggccctaagtatattgcacaaggaacaactatattatttttctaaaaactatttcttgctacaatacttcttctactaattttggtatgaacttctcttcttcttaactttatatctttcctttatttatttttcattagtggttgaaactgagtttatatagatttatttagttttaattatgtgttttaagtattttttttcagttattatttttatttgaccatgttctcctaattaagttattgtatgctactgagaactttagaatattggtttttttttggtagatttgtggtgacttttttcttctttatttttgtgtatttttttttttaccatgtttgagttttgtgccatgtcatctcatcaaggattatcgctcagcttgttttttctttatttttttccctttttttcattgatgttttttttttttttttgggtaagggaaatattttgactttcagtaacttgatacttgttttttttttttcttcaagattgattcacttctcatcaagaatgctatatagaatataacattttccaattttgtgtatcaaagaggtaagttttctgtagaagaactctttcaaaacaaaatctctttactttactcatcacaagttttatcaaatgatttttggttgctcattgcacatggaaataacagttgttgatgttgtatgatttggttataaaataatagaaatgatgtatccatttggatttactttagatattggaacagagtcaccctttaacataaatttagttgcattgttcacaaatagcatgtatgattggacttttactatgtgaaagaaaagttatggatttatatttactataatgatatgatgtgattatatcttggtgcactacttactacaatactttatgtgcttgatatgatgtgattacttattaattaagtaattttaaatattagaattacttgagattgttagggatgtaaaaaagataggatgtgaattggaattattcattccaacatctcacttgattagtcatggaatctatttacaccaaaagtagcattgataacgtagacatcaatgttaaacacgtggcaagaaagataacttctcagagttgagtagtcccgagttatagcaagtcgacctaggagaggtccctagccttacgcccatgttgactttaggaactctagaatggaagtttggactttgataactcgttttcaactcagtatctttaagtattctgtaccatgaagacatggagcaaccaaattcaggtcccgagaactgaaattacatgaatctgcatcctggaagttaacctaggcacctagtgtttcacctagtgcctaggttgatgtcctaactaggatttcagttttcaggactgtcttagtgcatatgggtcaaactttgtattaagacatgaactagatataccacggatatatttgaggtatcaaaatcatattcggagaaattttatttttgagcacccagagcacccggtgcccaagcacctagcgcctagattgataatttgtcaatctaggcaacttccaagtatcaaattgatgattcaactttttcatcttcttcatcttaattaaaaatagagaaataggtacttttggggaagaaacaacacttcctgggtgccacaaacaaggcccagcgccaaggttgacacctcgagctggcccaacgcccaggttcatattttgtcaacctaggccggttccaatgatgttttctaagaaatctttcgagcatcttcttcgttctcagcaaattattaagattcaattatttttaaggaccaaacgaaacttctaaagggccataaaggggacccaacgccccagttgacacctgttactaggccaaacgcccaggttgatatattatcaacctgggctgtttccaatcaagttcttgaaaaagtactctaagcatttttcttttttgtcatcagaaataatgaagattcaagcaaactcggggagaaaaccacaaacttgaggccttggaaacaaagcccaacgcccaggttagcctagtgctgggcctagcgcccatgttgacaatcaacttggtgcactggttttgatcattcaaatgacaaatttaattcgaccattcaatccaaaatggtcaaaaataggataggagacctcgtcctcaagttcaagaaacttggaattgtcaaaacgacaactcgggagctcaaaaatgaagtacccactgcccaagttgacaaatggcctggtgcgttgggttctgcttatccgattctgattctgtttcgaccgtttgtctagtttttcacaataaataagatacatgaagttagagaagtcaaattcacaacttcacctttctcatttccaacatggatagaacaataagaaatgaagagttttgagtctctcatttccacagaacaacatctctgggaactagtgaccaactttgccaaaacacaaagacagagtgatgtcaaaatatcacttaagaatcagaaagtacatccccttgttttttttcagttacctagcgtccatgttgacgtcatatgtcaacttgggcgctgggtcatggacattcttcagtaaaacaatcataaatcactaaatattgatccaattgacataattcaacttgagttttgaagctatttcaattctctataaattcatatctaacacttcaatctcaattcttaagttatcgactctaaatttcacccaagggagttacaaaaataagctccaacttacccaaagcgggtcccaccatcggcgactcgggctctgaattttaacggttaacctcaaaataaaattttcactgatagatcatcatctacggtcaaaaatagccaacttgtatttttttattattttattcctattttcaagggcctccttaatctataaaaggaaagctcgcttagttcatttttcacattcagaaaactacccataaggtcagagcatctctctctagtttctctctatagaaaccagagcttaaacacttagcatttttctataattgccatctcgtgaaaaataaaaactcgaagaagacgtagctctattaccatcgcgacatggggagtgaactactataaattgtgtgtgcctttcttagaccgttaattctgttagttagttaggagggtagattggtcctttagttctatttcattgtatataaatactgtatcattagtactgctctgtatcaattcaatttattcttccaatcaataaagttcttctttttctctgtttctatactgtaatatggtatcagatgacataaagctccaagatttcccttgaatacttccaagaacttgacaatggtgagaaccagagcaactacgtcagctaccaccactgatcccgtggtcgatgccaccatagctcagccaccatctcatacttccgcacaaacgcaaactcaaatcgatccttcccaggattctgcagatccatctcttcattctgaacctctccaggttcctcgagctcctccagctgcagatcgaccggcatatgaagatatcagatctccatattacctcagcaacgccgatcatccaggcttggccctcgcgacacctgttctcacagatcgaaacttccagccatggcaaagagacttcaaactctccattggcgccagaaacaaaacaccttttcttgaaggtactctccctcaaccttctcctactgataatctttacagttcttggatgagatgtaatcaaagggtaatgtcatggattctccactctgtgtcacctgaaattaaaagcagtataatgtacctggatattgcctctgagatgtggacagttctaaataatcgattcaatcaagggaatggccctcgaatctttgaactgaatgaacatctcacctatctcacacaaggtgatgattcggtcactgcctattttacaaaacttacagccatttgggatgaaattaatcaacttcgccccaagattccatgtacttgtgcagctgcaacacaaaaccatgcccacctcaatcatgaccaagttcttcaattcttgaaggtcctcaatgaatcttttcatgctgtccgtgaccagattctcctccttgatccttgcccttcacttaataaggtcttctctatggttatccaccaagagagacaaagaactttgggccatagaaccattcccacaattgcagcagccactaccacccctaccccaccatctactgatacaatggctaaccatacatcaaaaaataaaaggcctcgaccccactgtacacactgccagaaaccagggcattacaaagataaatgctacttcttgcatggtttccccctggttatggaaaaccaagaacaaatgaaccaacacatacaaacaactgcaagtctgacaatggttcccactcaagaatgcctcctcaaaccatgcaagcatcttgctctcagaatgaatcacagcaggcacaattcacaccagcacaatgccaacagttgatttctttactcactcaatcaatgcaacctacaactgatgcctcaacatcagatgttgctgcaataaacaattttacaggtactttcgatcctctttctcccaatacttggattattgatagtggtgcaacgcaccatgtttgctgtcacacttcttgtttctcttcttttacagcaacacctaataataaatctgttaccctcccaaatggaacaaatgtcaatattgctaagattggtactgttagacttactgctaacattttactacacaatgtcctatttgtgcctcaatttcaatataatttactctctgttagtgcctatttagctaattctcatcatacactatctttcacttctaacatgtgttccattcaggacccccttcagaccttgaagattgggacagctaggagaattggacaactctactacatcaaacaggatattgtcaattcagttgcttgtaatgcaaatgtaatcaaaaaccaatggcatacacgccttggtcatccatttgtaaccattacaaacaaattaaataaacaactgaattttcctattgatcattctcataattgtccaacttgtcacctatctaaacaaaagaaattaccctttatttcaaataataatttttcagaggctccttttgacctcatacatttcaacatctggggtccttatcccattccttcaattgaaggatatagatatttcctaaccattgtggatgaccactctcggcacacatggttacatctgttaaaagctaaatcagaagcacctcttatcattcaaaacttctttacctatgtcaatgtccatttcaaagccaaaatcaaggctgttaggactgacaatgctaaagaattaaaactcacaaccttctattccagtcaaggaacaattaatcacaattcatgtgttggtagacctcagcaaaatgctgtggtggaacgcaagcaccaacacatcttgaacattgcaagagcacttgcatttcaatctaatcttcctctccaatactggagttacatggttcacactactgtataccttctcaaccgtacaccttcagtattactaaaagacaagacttcacacgaattgctatacaataaaatccccaaataccagcatcttcaaaactatggatgcttagcttatgcatcccacattcgtcctcaaaacaaatttgctcctcgagctagagcatgtatcttcataggttatcttgatcatatgaaggcctatacactacttgatctagaaactaaatacatcttccaatctcgagatgttatcttctatgagaatatatatccgttgctcactcaccaaaataaccctgaaataagtcgtttttttcctgagcaacaacacaaccaaaacaacattccaataccttccacagcccctgaacaacctccaaaatccattcccacaacatctacagacagtttggattcaactactgcctctgataaccccacacaaacaaaaatccataccagtaatgaagttgcacctgcaacaaccaaatctggcagaccacgtaccaagcctacatatttgcaagattacacttgcaacatgacaaataatcaaacaagttctcattatccactgtccaaatacatgtcctataatagattatctgcatcttttcgagcagcaattcttgctactgccaacctcattgaacctaaaacttttgcacaagcatgcaaacataaagtatggaacaatgcaatggataatgagatcgatgctttagaggctaatgaaacatggattgttgttccattaccacctggacaacacacaattagtaataaatgggtttataaaattaaatacaactcagatggctccgttgaaagatgtaaagcacgcttggttgccaaaggttacacacaacaacaaggtgttgattactttgacacctatgctcctgttgccaaatttaacactctcaaactcctttttgcccttgctgcaatcaaacaatggcatttacatcatatggacattaacaacgcattcttacatggggatctcaatgaagatatctatatgacattgccccaaggatacacccccaccaaaggcaccattccatcaaaatgatgtatgcaaattaaagaaaagcctctatgggttgaaacaatcatcccgtcaatggtatgcaaagttgagcaccactctcatagctcatggattcaaacaatcaaaaaatgataacactctgtttattaaacacaaagcagggttcttcatggccttgctcgtttatgtcgacgatataatagtggcaacaaataacactacagaactatctgattttgtgaccactctcgacaagcaattcaaacttaaagacttaggcaaactgcggttctttctcgggcttgaaatggcccattccacaaaaggaatctctgtctctcaacgcccattcaccattcaactattaacagatactggcacccttggcactaaaccagtttccactcccatggaaacaaaccttaaactcaacaatgagacaggtaaacaactaca

SEQ ID NO: 113844 - DNA, 1212 bp, Cannabis sativa
tttttttttttttttaaatggattcaaatggtgtaaaaaaaggtgaagatatgggtggctttcgtggtggttgacgagggtttcttttgtggtctctctctgctggctgttggtttggcttcgtgatgaagaagaagaagacaacaaatggaaagatgaagtactgagggttattataaaaccctacccgtcaattattaaataactgataacataaggcacacgtacgtgtcagttatttcatatgcctatgccctcagttatttcttaataactgacgggatagggttaataaataacacttcaacattccaaaaccccccaactaactctttaggtgtagtctaattctatacctacagtttttataaaataatagcctatagatgtcaattttttattagcaggtattattaggaggctttagctttcctttttaattagtgttttgcctctatatagggtattttgtagcagtgtactcatgtttgttcaattggaacattttttaaatttacttttcagatttcatgttaggatcataaatcatgttaaaggtgagaacatgtattaaaacgaatatgcacaaatcacaagatttaagaaagaagaaatggcaaatcacattaacttatggaataacatcatttaacattcatcatatccctaacttaaaaaattagtataatctcaatattcaaatccatgtttaaattaaagatagaataaatataaagaaattaaaaggagaaggaaagaaactagatggagaactcgatcggattgcgacgcttgctctaagagtcttctttgtttctagggtttttctcttaatatctcatttctaattcgcgaccccttttatataaaatcaattttacaactcaaaattgcaaaaaatacaaaattgcccacaaattgatcgcacaacgacattgtcgcgacacaaatatagggcaccacaacacttagagctttttgaaaacttaagtcctttctgtaaaattcacacatcatgacacctccaaggtgcaattatgtaacgcccttacttacgtaaaatagatgccataaataaattggtgttaagatactaatgttgcctttattttaaaaataaaatagcaacaatattcaaaacatgggtacccagttgaaaataaagtattaccacttagggaaaagtaatagaaaatttaaacgacaacatcc

SEQ ID NO: 113845 - DNA, 2837 bp, Cannabis sativa
aaaagtccagggggcatgatttggtacatgtcaaagttcgggggaaaaaaattctaattagccttatttaaataaacattgttaaggagtgtttcattgataatgtgtggaaactcaccacattaacaatactacagactgcttcactaattattaattaattttgagatagaatcccgtagttcttattgtacaccttactatactgtctaaatcatattctaacactagcaaaagatgaaaaaaaagaaaaagaaaaaactagtatccaataaaaaaaatactaattcaaaaaagagagtaaactaaaaagaatcatttgtgttcaaaccgtccaaaattggtgaagaaaaaaaagcacaatcttaagagattcattgaccattacactctcaataattagttttgagatgaaactatacatcttaccataaacctcacacattcttactatgatgatttgtcaaattttttgttgaaagttattacacaccaatacatattaagatccatgtgttcaaacttaataaaaaatgggtgaaataggtcttttaagtgtgctaataccattcatcatatttatccataccaaaagtattataattagaaaaagtagttcaaggatttcatacaaaaattacctgtgagttccaactgttgatgcatcttgtgatttgagcacagaaagggagagccaactttctatactgatcagggtcaatattctcaaccaaatcctccaattccccaataagcaaaacctgtttttgacaattagtgagtggccaatacttcaaaatccctctaaccacaaccccaccaagcacaggttccttttgcacaaattgagacacacaataagccaactgcctatggtaaccctgcattcctttagtcttatgcaaaggaattagtactctcatcaaaaacaacttgtgctcttctttgagtggaactgtgaagccattgataatgcttccccatatctcaagcaactcaccaatcccacaatgcctctccatttcaaacacatagttcaagaactcatcattcattgattttctcatgaatgaacggtggaaagtgaatctagaatagattctatggtagatgttcttcaagctttcgcgctcccttggatcttcggattggaaaaggttgagaagattggcaaggaaatgatggttaatgtaactactcaaagtatgaggatcaatgtttgtgatcaatctcatgagaatatcataaactatttgtagatgagaccatattcttgatagtttcgaaatgggatcttcttcatcaggaaaatctgagtctaaggtgatgagtgatgagaatgaagaatatggttttgatggtggagggagtgatctaaatagattggttgagatcatctccattagaggtgacaacaaaatttgactaacatgattacactttttggtgtttcttaggattgtgaggagttgactaagcatgttgccttttttctcttgttgagaaggaaattcagatggatcaatcaaagtttttgtggaagtacaataagagatcattgaaagaatttcctcaatttcattgttggaatcaagatcaaagagggtctttagtgatgttctatttggtgagagagaggcttttgtatttgtagtgttgtattgacccttcatcattattttccttcactactctattcttttcttcttcttcttatgagttatgtcttttgttttatgatgactaaatatgaaacttgttgtgttgtgaatgtgaagaaaaggttaaaaaggacagctattgttaattagacaagaagcctagtaatgtccggactatgtgagtggtgagaatttatttgatcattagtgaagttatgaaagaagagctaaataaaaacattttctttgctattcttgctagtcatgtgggtgagtgccacgtggccctattgatgtaggagaacatattaagtagtagttaatataagttggttgagtagagttgagaagagcttgtcacaataactagttaggatagatatatcggaaaattagacaattatattgaaacaattttcatttattaacatgtacctcaccaacctttcactctactagcatataaataaatttatgtgaaaatgaatgcctaggtagtatgggtgtttattggactaaattaaatatttttcagcctacctaaagatccaattataaattagattttggatttttcttactgattctatccaaataattttagttatatgacttgatccaacactcattgaatattggattacatcggttctatttattagatgtattttacttgtatctattagctagattaagaatgatagagagtaagaatgatgtagagaattattaatctactttgtgttgtttgatattaaatataaataggaaatatgaagaaaaattaattagtaaaattataaaatagtcctattaaattgttttttaagagtaattactacattttgtaaattttattttatctttttctacaatcattctaaatttgaagggattaaatttttaaggtttggagagagaatgtctccttatatttctcctctctctcattctctcccacttgccaaacactagatttaatatctttttttatcactctctctccacttctctccatccattcatccttctctcttaccaaacatagtgttagctctttaaaaagttagatttattaaaaaaaactaaaagacattaaaaaaaagagtaatttgcggcaaaacccccttaactatcaatttacttgcaaaaaaccatccaacctcatattttgat

SEQ ID NO: 113846 - DNA, 1891 bp, Cannabis sativa
  modified_base (1683)..(1684): a, c, t, g, unknown or other
taaatcagtccctaagacacctattgaattatagaatagtcgtatacccagtttacgccattacagaatctaggggtgccctgctcatctcttaagaaagaaagatggaaaactagaaaagcgaactgaagtttgcatgtttgttggaatttctaaggagactaggggtggactattttatagtcacaaggatgataaagtatttgtttctacaaatgccactttccttgaagatgactatgttaagaactttaagctgcaaagtaaagtagtattaaaggaaatgctttcagaaataactccaactaatgttccatcatcttcttctcaagtagaggattatcccactcccttggttgaaccaatgcaagtttatacaactgagaaatctaccaccaatgttcctattcagaaggtcacgactcctcatcgtattccctggttggtcatcctaggatttgtgggattttcttggacattttctctagcacgagcttcctcattcctcctagttctcaacattctaagccttccccaagactacctcgtggatgtgtttggtttagtgagaggtgcatcactgcgtgtcgctctcgcaatcgtagcctcgcactctaattaagtatttctccgatttgattctgctagtctctatcgatctattttcaaattccaccaaaggaacgtatctcgttggatcatatgcatcctaggtacgctttttagggatctcgtcatcagtttgtttgaatccccattcaaaaactgttctccccgagtgtggtttcttagctgtgttcgttccctgagattcctgaagctctttcccaagacactgagttatttctctcagttgatcattgtcgtcttgagtagtattttccatggttggaaaaaaagaaaagacttgaatgttatttagggtacatagatgtgtcttctgagtttttttttttttaaaacaagactctcgatggaagcaccaaactgttaacactaattttttttaatcgataaaagagcctaaatttaataaatatactttcagaatgataataataatgataataaatacttaacaagaagatttttacatagtttagaagctaattcttcatagtctatgagcccatcttaaaatcaagatttgatgaatatatagagtacaaataatattttgtatattctcttaggatttagaatttggccgtcctttagtctgggaattcttcccctatttgtaggtgtttaggggtgacaaatattctctactaatcttatctttatagctattcgtgaaacgtgaataactcccacgtttcatatatacaacacatggataaaggaaataattgatattaactgcttttgtatttatccaaaacggttgtgctgactacgttttgtcgtgacgtggtagtacatcttgttttatgtctcaaagtatactacatggaatgactttgacgagctctctttggccttcttcttgcattagctaatgaagtctttatataatatttataaataacttatgataagccttttgaaagtgtatttattgtgctccttaggttagagagctgcctcatctatcacataaattatcttgtcttgcgtatcctttattctgtacttcttgaaatgagcttgtactgttagggccagtttggcacagctgtnntgtggggaaaagcagctgtagctgtgctgtgggaaaaagcagctgtagcataactgtggaaaaaagctgagctgagtgtttggtaaattataatttttaaagtgatgggagttgttaaaattctattacaataatgataatattttaatctagttcattataattacaaatatatataaaaaaatatgttatataaattttttattt

SEQ ID NO: 113847 - DNA, 6493 bp, Cannabis sativa
  modified_base (6371)..(6377): a, c, t, g, unknown or other
  modified_base (6459)..(6465): a, c, t, g, unknown or other
gattgcgtgcacttgcgtagtaattaataattttcgcaacactgatcatttaacaaaaagaaaggaaacattcttttaattctaaagagagttgtttacattcatcaatgatttgtccaaacaaagatatcattttaattgagcttcgaagtgcttgaactatcgttaaacaatctgtttcaatggtcacgcgctgccagttctttctcttaatccaactcaagacttcacgaactccaattgcttcagcaatttttggtgtagcaacccccataaaatgttcagttcggtcttccactaggaaagcatggtggtcacatgctaccagtctgataccatagctatttcccccttcaaaaagagcagcgtcaacattgatcttgatactgttttcacttggagcggaccattgctcaacaccatcacctgtctgaagaccagaccatgacaacgtgataagagtgctttgagcatttgtccattgatcaagataaccttttgccaacactacaattccttccgcacctgccattaaagatccgaatacaccaatccaaaaatgtggtgttttctgatgagatagttgtaccgattccaacacgatcccatacctactatatgtgtgaacaagtaactagagcatgaaaaattgtctcttcttctactctacaaacagggcagagagaggtgacattaactctctttgtttgcagaagacataatattgggagacaatttttgcctgctcgccacattgtgttttttacttttggtgggatttttagccgccacatggatgaccagaactttgacactatatcatcattgttgtcccacctaccattaacttgttgtaatactttataagcacctttaactgagtatatacctgaagcttcaagtgcccaagtcaatgtatctttagtcatagatggttgcagagggatcttttcaatgagtttcctatctctgtcttcaaataaatctcccaagatctccatgtcccaacccgtgctatccatcctcgttaggtttaccttagcatgtgccaaattaggatgaaaggaagtaacatacgggttctcgatgcaaggtagccaagaatcatgaaggacgctgatgtcgcttccattccccacacaccaacgaaggcctttattaactaattgttgggcttctcaaatactacgccaaacatagctaggattattatctagtgatgaagtgagataagacctgttggggtagtatcgtgctttaaagacttttgtaaccaaggaatcaggctgtgaaacaagccgccaaccttgctttccaagaagtgccaaattaaagtctctaaggtgacagaaacctattcctccttttttttttatgattacacagccggtctcatgaaagccaatgaattccttttccagacttgtctgaagattgccaccaaaatctttgtcattatcttctccatctcccaggtaatgtttagtggcagtaagaacacgctcatttcataactcggaagagattgagccattgttttaattagtatctctttccctgcaggagagaggaacttggattcccacccttgaatccgtttgcagactctttcttttaaataacccaggacagccattttgttgcgagacatggtactaggaagaccaaggtacaagctattagttcttgcaatggtcatgccaagcatgtgactaatattgttgcgagtttctaagactacatttgtgctgaagacaatagaagacttagaataattaactttctgactcgaggcctcttcaaatttactcaagacttcttggattcttgttgcttcctccagtgttgccttatagtgaaggtagctatcatcggcgaataacatgtgtgatattcgggaagctccattagcaaccttgcatctgtgtaacaaacctcatttctcataacaacatagggtagctgaaagcccttccgcacataaaataaaaagataaggggagaggggatccccttgttttatgcctcgcgcggtgttattggacctatttctcgactcccatggatcactgcataacaggcagaagaaatacatttcaacagcagcctagtccaccaatcctcaaaactcagtttttgaagcatggccttaaggaagttccattctattctgtcatatgctttactcgtgtccaactttaaagccataaatccatccttccttttccgtttcctcttcaaataatggagtacttcaaaggaaataagcacgtatttgatataagccttcttaggatgaaggcgctttgattctctgccacaatgcagttcatgaaaggcttcatacgattaaccaccactgttgttatgatcttataagacacattaaacaaagctatcgagcgaagttgcatcatgttctcaggcttcttattcttaggaattaggacaatattagcatcagcacaaccatctttgaatgccccagtagagaagaacttatgaaccatatgcaccacgtctttacccacaatttaccaacacttttggtaaaatctggtgtcattccgtctgggcccaaacttttatcaggatgcatctgaaatactactttcttgacctcttcttctgtaacgggttgacggaattcatcatgggccattttaggaatagaactgtccacacagtcaataacttcttgataagaaccctaagaagattgaaagagacaattaaaatagttgataaccactaatggcaatccgttatcccaatctccttgattgtttttcaaccagtcaatttgattctatctcttctaagtagttacagtcttgtgaaaatagctactattctgatctccttctttcaaccataattattttgatcgttgtttccagaaggcttatctttggtcaagcactttgaacaattctttttttacatcactgtatctctgcaatgagagaatatccttcttattcttcaaatttgtgagctcagctttacactttcgaatcctgagtttgaagttcccagtcacctccttaccccaagaactgagcttatcagcacataaaaatgtagtttaccagagaaattgttgtccatagctctattccaacagtctttgataattttgaagcatactggctctttaaaccaagcatttttgaacttaaacttacggccaggagtgaacacatgagtaatttcaggctccaataatattggacaatgatcaaaggaagagatttccaaattaaaaagagctgcaagaggaaaaacctaagtaaagcgacgattcaccagtgccatgtcgagtctcacctccacccaatcactggtacctctgcctttttcccaagtaaatgggttacccgtcaagtctaggtcgtgtaattgacagtcattcatggcgtgttgaaacccatcaatgagctgatgtgggtgccgccgaccaccctttttgtcttcctgtctgaaaacattgttaaggtctcctattacacaccatggtagattagagtcccttgctaagaaccggaggagatccaaggtgagatgtctacggctacgaataggttcaccataaactccagtcaatctccatactcctttctcagtcaaattccccataatgtcgatatggttattcgagtaacccagtatgctgccctcttcttaatttttccaaagtaaagttaaacccctgcactccatcgagcctccataataaatattccttcaaagcccaacatacgacccactctttacattttattttaatcattttagtttcacaaaggaaaataaaattaggtttcttttgagacacaatctctttaaggaattgaatagcctattggttcacaagcccacgacaatttcaacttaacacattcataattattggcgattctgtgaacctgaacccaccccaaacaagttttttatgttaccaactatttcagcatccatttccgcatcaaccaattctgttgccccaattgtgatgtttgtcccattattaacgtgacccatgctaagtatctcctggggccctgttgattatcaagatccattctccttctcttattttctagtacaataagagcctcatcaacattcacttgagttattttgtctatcgccctttcaatgtcagatattttcttctgaccaaaactttccttattagtcaattcctgctataactgggggttctcctccactcttcttgcaccatagttactcaaatttattggtttatttgaaatggatccctgattttgtgtgtgtaataccctgcgttgaccactccctgatcttgtgctatgttgagctgccccagttccgagattattgggatttgtcgttgctgggttgcttgaggaagatgtgccgctggacttgttcatgagtcccgatctaagccactttgcgccaacatcataggtctttctttgtggggctgcttacatctccagattatatggtttctcaaactgatctatgggggtatcaaatagacgctcgcagaacctcttggaatgtcctaggattccatagataaaacagaaagtgggaagatcttcatatttgaacagtgcataacagcacaggccaccctgcttctctagatttttctttctttaatgttgatttttacccagatgcatagatatctctccatactccaatgaagttgttcaggtctgacttaacaaatgtaccgagataatttctaagcccctgaatcacccgttccgacataaaccccgtggtcatattatgaagttggacccaaaattctagtttgttgagaaccaccaatcgaggattttcatcttgttttaatctctcaaatatcatagggactcgaccatacgtccatgggctgccctccatcaccctctcaatgtcgactttatgatagaattgaaataagtatagattactttccaattttttaacatacattccccttcctggctgccacaactgtgccattttattttgcattgcttgaaagtcaattgaccagtttgtgagaaaacgtccaaccaagcaccatctatcatctatttttaacaactcatatttccaccttcaaagagcaatccctcttcctcatcctcatcaatattacaagttgcatactgttcttccaggtttggttcgttattcatcatcgaaaccaaaatagtattaaaccacaatctccaacaaacaaataatcaaacagagttcaaaccaatccactcactcaaagacaaagaaaacactcataccatgtcaaaagacaagacgaaataattatgttataaaaagtaatcaagttgtccaaatttcaaactattattctttaattaatcatattttatataaaaaaaatcttagttaaattcttttaacctttactaaaatgtaattcttttactttcattatttttctcatatttttttaacactcttttgttagactttttatttgggcttacattaattttaactagttttattaaaacttgagttgattggatagttctttgttgtgttaacccatattattagtgatcaatagttaatgagcttatcatatgtgtgtaaagtctagttgaaacagaagtgttgacttttctagttaactgaagcatttaatgagtaggctcagtccaactagctagggttatgtagctaagtcccctctctaactctgtaaatacatattgtctcattataattgtatacttttgataatcagataattaaaactgcttctgatatagagatctaaggagtaagactcagttgatagtattgcactatcaaattgtcgtaattgctatggatcaatcaggtttgtatatctaactattatatatattattgtgttctatattatatacaaattttatatcctggtttattgatttttctaccatgtggtcctagattgcttattgtatatgatttaagacctataatttgtgtaacaattaatatatatgtatatataggtgtactcttaatgggtattacccatgaatgggtaatattagaaaaatttgaatttttatgcttatttttttttttatttaattagaattttttttttttatatattatatgggttggattgttacatcagatgaaaaaaaaacaaagttttttggcaagaaaatgataatgaaagttgagtttgacttaaatatttttcatataaatatatttttgatataatgtgacaaagagatatttttttgatattttctttaattaaatagctaaattaaacataaaaatttaaatttcgcttatattatttgctatcggaccaaaatctaatggtttaatatttttaaaannnnnnnttatagttaaatttgtttagtatacccatcaaagggtaatacccattaaaaagtattccacatatatatatatggaacactnnnnnnngggtaatacccattgatgggaactaaaa

SEQ ID NO: 113848 - DNA, 2788 bp, Cannabis sativa
gtgacattctcatgtgagcccagtaaattaatacatgttgaaggtacaacacctggtgacaattctcctaaccctgttgataaagccgtgctatctccaccagaccatgacaggaactcacctactcaaacagtatgtcgctcagaaatggacaaccaaaccactaagaacgtggacattgctccaatggacaccaatgaagttttgatttcagctagtgaagctttgggccagtcagatgataatcaaaacttgagtaatgaagagtgcttacaggagggtgtagccactgattatagtatttctgatggaaatttcgcagatgaggaaggtgttaaagagcaagttacccctgttgagtttagtttacatgaagagaaagacttgacagtggtcaaagaaattactgatagtaaacagccaaacaacagcgaagagaaaatcattaatgagaaatctctggagccagagaattcgttagtgaatcaacaaagttgtgacttaccaccagaagatgaagatgtattttctgtaaccgacttagtttggggtaaagtaaagagccatccatggtggccaggacagatatttgattttactgatgcatcagagaaggcaatgaagcatcataaaaaggactgcttcttggttgcctattttggggatagaacatttgcgtggaatgaagcttcatctttaaagccctttcggtctcatttctcacagatggagaagcagggcaatgcagattcattccagaaggctgtcaattgtgctttagtagaaatttcgaggcgagtacaattaggcttagcctgttcttgtataccaaaagatttacacgacaacattcaattccaggtcgttgaaaatgcagggatccggccagaatcaaatataagaggtgtggatgaatctgctagtgttaattccttccaatctgacaagttgcttgaataccttggagcattagcacagtctccatcaggtgggaatgaccgattggaacttgtaatagcgaaggctcagttgttagcctttttccgtttgaaggggttttgtagcttacctgaatttcattgttgtggaggattggttgagaataacaccgttggctcccgatttcaggatagtttacatcctgatgatatggctgaggatgcaagttctctttctaaagatgacgaacgagcttcctctagccaggagaggtcgaaattacatagttcttctcataaacggaaacataatcttagagacggcgtttatcctaaattaaaagagaaaagcttatcagagttgatggttggtgccatagatttttcagatgacgataatcagtctggtaagaggagaaagggtgtagattaccatgctgaggacttggcagctcaagatggaaggaaaactgtttctgttgcaaaagcttctaattccacttttccaaagcagtcatttaagattggtgaatgtatccgtagagttgctagccagatgactgctagccagacgactcccagccagatgactcagagtactcctactgtgaagcttgagagggtgaagctagatggaagcagtgacagacctggggatggttatgaaatttcctttcagagctctgaggatgtctgtagaggaaggacaagtgatgcaggaagggcagctgatgcaggaagggcagctgaaccagcagagtactcttcactagatgaattactgtctcaacttcagtctgttgcacaagatcccttgaaggaattcaatctttcaagtgttattattaacttcttcactgacttaaggaattcagtagtgattacaggccagtattttgggagtgagcatgtgtcaattgacaaagtcactggtaaaaggaagaaagggtctcctgaaacttttgaatttgatgatatgaatgacacctattggacagacagagtcattcaaaatggttcagaagagcaacctctccgtagaggcaggaaaaaagataatcaacttgctgctacacagtcagaaaaacctcctcaagaaggccgtagaacatactctaggaagcgatactctaatggtgagcttggcttgacaccagagagacctgctggctacgttagcgagaacgcaccagcagaactcataatgaacttctctgaggtaaaatctatgccatcagaaagtaacctgaacaaaatgtttaggagatttggaccactcaaagaaatggagacagaagttgatagggaaagcagtcgtgctagggtagtttttaagaagtcttcggacgcagaagttgcttgcagcagtgctgaaaaatttcacatctttggctcaacacttgtaaattaccagttgagctatactccaactctcccttgtaaagcatctccggttgttattacaactcaggatcatgaaatgcaacttgatctctctgcccatgaccatgagatgcagcttgatctgtccacccacgaacatgaaatgcaacttgatctgtccacccatgaccatgagatgcaactagacctctccagtctgtcaagttttgaggttaatttggtttaggaatttcaggtatgcatcatatactaaatatatttagttgtcttttgcagctcttaaacttatattaaatttctccttacattgatggaaggagtaattactatgaaactttaaagtatattgctagttggaaaacacttataaggtgaaccatgagatgaattttcgttattgtttctggttataatgtctcttcagttctgctgttgggtatagagaa

SEQ ID NO: 113849 - DNA, 3950 bp, Cannabis sativa
ttgctcattgcttgtaggttcattctctcggtcggcagtcaattacatggctggatgtcatacagcagtctctaacattgtgatgtcctctgttgtattcctaacattgatgttcatcacaccccttttcaagtacactccaaacgccatcttagccgccatcattatatctgctgtgctcaatctaatcgattttcaggctgcaatcctaatatggaagattgataagtttgattttgtggcttgcatgggagccttctttggtgttgtattcaaatctgtcgagattggtctcttaatcgcggtactaattcccaacataagcttacaactatcttatattcctagagtagaccaaggaagaatattgtgtcaagtgatctgttgttaatcgttgttgttgttgtggtaggtcgtcatatcttttgctaaaattctgttacaagttactagaccaaggactgcaactcttggaaagatccctagaacaactgtgtacagaaacatccaacaatatccagaagcaactaaggttccaggcgctttgattgtcagagttgattcagcaatttacttttccaactctaattacgttagagaaaggtatatagctagagccttttctgccttactgttattccttcatatttatcctacaagtaaatctatctaactatataatatgtatgtagaatattgagatggctgaacgatgaggaagaacttgttaaagcagctgatctaccagctattcacttcttgatagtcgaaatgtcacgtaagtgaattttgtacctagttttgatcaactacctatgacattttatttcttatgttttggttttgttgtttaattgttgcagctgttactgacattgacaccagtggtatccatgccttggaagaattgtataggagtctccaaaagagagacattcaagtaaataaaccaataattgtccctaagtcttatataattctacttttagttcctcttacctataatagcaaaccataattattactaacatttcatacaatacaataattgtacttaattggtttgagtatatactgacctctgttattgctaaacagcttgttcttgcaaatcctggtcctgtggtgattgacaaacttcatgcatctaagtttacgactttgatcggtgaggaccgaatcttcctaactgttgcggatgcagtggcagcttgttctccaaaattgctggaagaagtttaagtaacaacaaacacattacaaatgaacgtaatattgttgatggcaatatcataaaaatcagctgagtcttgaacatgctgataagttgaattctgaagaaattactagtataactctggatatatatggcagaagagaagagccattatgaaagtggttaatggagggtcatatgccttaattccaatagaaagaaaaataataacgtatatagatgtgtacaatttgtacactacaagaaagcatgcaagaatttaatgtaataacttgcaaaagtctataagtctgcgtagaattgaactgttaaagttatctaaagctcactccatactttgagattatgttaccctatatatcatgacctcgaggcttttctcagatcttttgttttcacccactatatatataatataatatacatttgaatgtaattaagatttaaatgagctttgatgcaaatgatcattgcataacaccatactctaatgttgtgagtagttaacagtttcgattgatcctattaatcatataataaccatggtatagcacctaattaagcttgaagtaacatgaaatgatatttcatatcaagtacgaagtttgattatattcatattttaaaaaaataatcattaaaagaaggtttcttattaaatttgtggaaaacattttcttccggccagtttttttctactatatattttcctcctaaaaatttcctagtctaatatcttaacaagatcttagtatttaactatttgtacgtaaactataataataaataaagagaaaagttgatggaagatttgttcaatcttatccatatgacctcatttatttatttattttttctgaaagaacgatcatgttcgtagaattacaccagaattttgctagaaattctagctctcttagttataatccatcagtgaaagtgaaaccattagttaatgttgatcatggagatgtaaaatgtgtcaactagttaattttacacacaattatcaagtatttaattttacctatacatatttttaattaaatgatgatgtctatgcaaaatcaaattatatatatagttaagatcattagttggacttgaactgacacatcaaaattatacttttaattttgttaattcatgaaacaaaattattaaaatgttttaaaataacgctgttagagataaaataattctcctctatttgattactggaaacaattgcagagaaaccaataaggagggaacctttaatctcagttatcttctaattagatattagggaatgtaatcaaaccaagtatttacgtacaaattagcatgcccatgcctacgtactataataataagaagcattttaaaaccaaatgaaaaaatcgctaagctacattgagatcacactcccccttctcatgtttttcacacaaatattttatcagaaaagtagaaaattagttggttgaaacaaataatacaaattaactaaaggattttctatctttctttccttctttgatctgatagtggaaaaatacttcttatatataattcacattttgagtaattaaaaaccgaacataattattaatttctcacgaccatatacaaaaataccaccatatatataatatatatctagaattatattactagaagaatgaaaaacaattgtaaagattaatcaagcttaccagctgttcctttatttgattctcaaactagctagcataagcttcagaaacccacttggttaatttaatttgaagagatttttctggagaagaacatgtacaaactgagaacttctttaaggaaaagaaagagtagtagtagctagagaaataagtcttccacttattaagacatggggttgaattgatttttgtgggctctctttttgagacggaaaaaagataaaatgtaaatgtgctgaagtggaatcctaatcagaaaccattacagcttaaggtgaacaagtacggaacagtttcaaaaaaaaaaaaaatgtaataaggttttggtccaatgctgtatgctgctaccttaaaaagggttcggttttcaggtggaaaaatacgagtctggataagcactgaaatgagtgcaaaatatgtttatataaaatgcacactttgttatatatatatataaagtcattatatatgtatatagattccagacttataaaaattatgaactagcctttgctacatatgttggctgtagcccttaatttcaaatgatgacagaagcaaaccatgtctatatgtacgaatgtagttacaaaacgaagccagattcatttaaaaactccatatatatttttagagcataagataccacattctttactatatactttattggatacatgattcactttttggcgtttgctataaagaaatgatacttgctcttatctcataccactaacttggatatttgtctcctcgggccctaaaagaatgatacaaagagaaaagctaagggcaagttaatgtgctaaatacacaagaggtgacatattgtcgggttctacatattttgattaaataaataatataaaaaattactaacggctagtatggtattgagcaccataaaatatttcatagcaatgctccacaattacctttcataataccatactgcttgtaaagaaaaaaaaatatattttttttattatttttaatatatatctattcta

SEQ ID NO: 113850 - DNA, 1634 bp, Cannabis sativa
  modified_base (1579)..(1583): a, c, t, g, unknown or other
gatttttcttgaaattttcttaggtgaaaggaccaacaggagatcaaatccacgattttcgtgacaaaacgagtgaaaagttcgaatttgttgcccaacgaaaaggagttcaccgattttgctttactaacaaatctccttatcatgaaaccatagatttcgatgtacatgttaaccatttttcatactttgaccaacacgcgaaagatggtaagaattttgtttttatcaaaaatatggattcgattttctttttcatttttcggttaacaatgcagcgatttacatgagttttgtgtcaatttgcagagcacttaaaccctttgttagaacatattcaaaagttggaggaagctctatggaacgttcagtttgaacaacattggctcgaagctcaaaccgaacgacaagcaacatgtatgtatttatctctctaattcggtttctaaatctttttgctcaatttaacttaaggattcttagcttgataggtagctctcatgattttgcaaaatggttcccgaattataaaatgtgtagaaaatatattgttccaactaattattgaggagaattctcttctctcttatctaatctaatacgaaagaaaagaaagaaaaataaccaacataaatgaactgattttcttcttccatgatttttgttttcttccttaagcaatctatttcgtcgattttgatcttatcgctacattcatctttttctcgagaagccttcgaacaactttagtaatcgagaaatagtaattttcgatgtttgacttggttctttcttttgcaactcttaatgcagtgaatgaatcaatggggaagagagcagttcagaaggctttctttgaatcggccgcactagtaggagcgagtttcctccaagtttttattcttcgacgcctttttgaaaagaagctcggaatgtctagagtctaaccttggttggcagcacagcaaccacagtagtaggatacaaaatttccaactatgcacatttagtatttttcatgtttttttttacatatataaaaaatggccttgtcctagagccaaggttgttgtaagttatacacttacaaaaatgaggattaagtaacttttgttttttttaaggttttgaggagaatttcttaagattttgagctttaatttatttataattattaatttttattcttacattattagaagtgaaatgccaaagagcatctgatacggattctatttgaaatatgcagaattttttacttaattgcaataaaggaaataattattttggatccttttgtagaagttattgattggaatttttgtttcgttaaatgataaattagattttgtattttttaaaatggtaaaaaatagtactttggattgattttttgtttaaaaaaaagttaataataacttgattgagctgttataataaaattgtatatatatatatatttatacgtgatagaaattatttttaagttggttatattaaaaaaaaaaagttatcaaaaaattaaatttagagtactattttgtattatttaaaaattaaagggctcgtttggaacgcnnnnntaggtcgtattgtattgtattgtattctattgaattgtattttatgcaata

SEQ ID NO: 113851 - DNA, 5107 bp, Cannabis sativa
gtctctaaaatgacatttgacctgttattcctctttatccaactaagtgcttctttgacactgagaacttctgaaattttgggtcggcagctgatagaagaaataaatgaaaacgtctcaatcactcggccatcgcagtcgcgagctacaaaactcgtgcctatctcatttgtggcttcaaaaaccgcctcatccacattaatattccacatcaatttagactttcttatatatttgagtttttgatattttttttacatgtaataaaattataatttaaaaatactataatttatttttataaatgcatataaatttataaaaataattaaaaatatatatataaaaaaaataaaaatgtcatatgacataagtttttatatatttgtgattataatatcatcattattataatagaatcttaacccacaacactttaaaatttataatttataaaacactctgttttcctacaacacagctacaatttattttttcacagtacaggtgtaccaaattgatccttagcagattgccaattctccaaaaaaaaaaatttaaccttggccattcttaaccataagattttacttttcaccataactatgcaatccaatgactataaataacacgagggatgacaaacctagaaagtaattgagggatcaaataattggccttcttataaacacttaaaaaaaaatgatgatgattgctttcaggaaaaaaaaacaaaacaaaaagaaaaataaacaaaaacaaaactatgatggcataattgtaatttcaaagcatcatctcccagagtcagacagatcattgaccggtcgcctttgaccagtcttttggtaactctcttttcattttctctctcctctttttgccagtactgctctctgctcagtaccaacacctctttctctctctatctaatttctacctcataaatgataagtagtactacatatggtttcaccattctctcgtatggcgcgtgtagtgcactattcaataaggtatcgctttgttgccttgtgtttctttcgcctagtacgagggagcgtgagaaatactttctttataaatgcttacagaatctctttggtatgatttttcttttaatttattttaaaagaaaataaaaacaaaaaaaaaaataataataataatagaaaaaggagaaaaaaattgatacctagcgaaaaggaaaaagagatctgcaactcggtaatttgttattttgtgagccatacatgaaagtatgttaggtaaggaagaaaaatatgatgatattttcttttcttttcatttaatagttagtttgaattttattttgattttattaaatgtgttaaatatagtcatcattgcataagaattattttgagaattagtgcatttggaagaaaaatacttgtagcatatgtttttaaagaaagatagctaaaactaaaaaatgaatgagacccaatgtaacgtttgaaattaaaataaaaaagggaaatgtatggagagatagaaacaaaataattataattagattaatgaaaatccaaatggggtacacaataaagattttgaagtatgaattatatgtacaaaacaaaagagcagccaaaatgggagaattaaaataatacaaaataaccaccaataacaattaataagaagaagaaacaattaagagctacaaaatatttataagatttaaaaattattagaaagaaataaataataattatatgtaatataaaataagaagtagctagttaattaagaagtggattggttcctatcagaagccaaagcttggatggaattggcgaggttgttaatggcttcaacaagtccattaatgccttgtctgttgacttcattctttgacttctcaatctcaagtcttctctcatgtaagcttacaagatcttcatgcctcttctgttctccttcctcgcaagcttgaagggcttcggctatgatagaagcactcttggatatagctgtggccactactacttgttgttgatgattatcacttgaggttgatgagcttattaatctcccactactgccactggttgtaggaggaggaactacaggtccttgatgaggttgagtttgagtttgagtttgaggctgagcttgatgaggttgacgatgaagaagatgaggatggtgttgttgttgctgttgctgttgttctggtccttttcttcttctctttgctggtgagtgaggatgctcgcttgtatcagtatctgagctatcacacatctccaaacgatttaaatatgcaaccatacattcaaccaatcaatatatataaatatatatatatatatatctatacatatcctaattattttaatatacatgaaagtcaatatcgtatgtatattttaataatcactttcttttatatatatgtgatattgattaacatataatgaaatcaatattattaatataagaactttgctctttctctttgtttccatgaagtaaaaagagaaataaggttttccattattatttaactaatgtacatttcatgattaattccatattattataagacctggatagtgaagtatcaaacattttgctccaaaaaaagaagaaaataataagttgattttttttcttccttcacggggggtgagaaaaagatgacaatatatagttaaggaaaaatggcattggttaaattttctcatgaagaatagtagtaataaagaaaagtgcagtcacttagagacaaatagcaataaataggtatacagacagagagtgaaaatacctactgtgggcaataatggctgcgcgtaaggaagagcaaggggaggttgctgaacttgtacgggaggtggtggagccaccgctacctctgccacattgacggtaaccgacggcggcggaagtggcaatgctgtaagtggtgcggctgaaatatggtggggctgcattaatatagcctgagaagttgagattaatggagtttgctgtagatgatgatgatgctgatgatgaacaccactgctcatagttctctcaaccatttgatacccaatacttggactcgaactgggtatggaaatggaagggactccagtactactaattccacctgaaaccctctgaccttttttctcaaccacatcaaccaaagcttcatatatctgaggcaacatattagtaggcaagttcctttctttcctctcatttttctcaatcttccaataagattgatctccacttcctcctgctactgttgatgctgctgattttccagctatttttctctcataatctctcactttcttgtaatccctcatgagattatcccacttgtcattacactgattttggctcctgcaacatccttttctccaacagtaatcttccacccatttccatctaagctcggctggtttattacttgtgggagtagtactaccactgcttcttgcttgttcattgtcgttacctgagattctcttcattcttctctcgtcgtccatcttctttgcctcgatcagaatcattgtctcactcaccgtccagttcccttttctgtagtctcttattagagtagttgtgttagtaccttgatcagccatagtatatagtatatatatatatatatatatatttatatatgtacttacttaaaaactctataatcaccaaaacacatgcacaaacgcaaacatgaagaaaggaaaagaaaaaaacactaaggttataatttgatttgggatgtgaaaactatttggtctatttggctttttttgtttatctgtcgtttggctttgatggccttgatttgatgtgggttatggtgaaaaagaaagtaccacttctactacacaacgactcctcccctcccaacaaaagaccgaaactagtcaaatctcaactaaggttgctaatttaggtaagagattacaagtgggtttttgcctaaacacaaggataataagtaactcagtgaaatgataatgagtattaagctctcctctctcaccaccaggtgttgaagtttccaataatgtgtcttttgtgtgtaaagggttgggcttttatttatattttttcccttttcaaattatatatgttaggaaaaactacacatggataggtgagaaagaagaagatcatgagctgtgttcctccatctataccctatgatttttcctttttctttttaactcaaaataactttacttgaaaatttcgaaccctttattgttttgctctataggatatggttgattgataactaaggcaaattacactcttttaaaatcctaaaaaaatcttcaaaagcttaaagttcaaatctaaatctacttattcaaaccactgctagctctccccacaaagtgaggaaaactacaagagagagagagagaaagaaataagggatggtgaagatgtatggaagagagagagggaaggagagagagagggagaggagtgagtaccattataagaaaaggccaagcaaatccattcaaactgacatatcaacaaaccccaaaaatttcagagaaagagagagaaagaaaggtttagaagagagaaagatacagtgcttgctggcacactggaaagtcgacttagagtatgactaccactaccatacacgtggttaacttcaatcatcaccacccgtttcatgtgtaacttattgcaagaaaaagttattggaggactttacagcaaaagcaaaaaagttgaaatattgtgtgaaaagtgaaatggttatccatgtttaatctcctcttaatggttatccgttttaaaaggaaaagaaaaatgttcaccgttaaatttcttacaggagtactgtattcttttatattctctttcaattcaatttcttttagtcccgtgccaagaaaaattaattcttgcttttaattaactttttttttcactgaattttgtaacaggagctaacacacatgtttttctttccttattaataacatcctaaattattttgaaacttttttatttttacacttcaaaacaattttttttttgcatttttatgaaaatctacataaaaattcctattacaactagcgctgcaacctaa

SEQ ID NO: 113852 - DNA, 1589 bp, Cannabis sativa
  modified_base (41)..(53): a, c, t, g, unknown or other
agggcataaaacccaacacttatgccgctaaaaataaacannnnnnnnnnnnngcttacaaacataaaactttaggtacttatgccactatttacccttttgtataataactaaaattcacattttggtcccaataatatctcgaagagggatcattaatttccacccatgcatttactatttgctgcaaatttaagcaataatgggcaatatatttatgttaattaattaatgtatatcatgaaagcatatatacatatatgattagatatatgtgtattgctgcatatatatatatatatatatatgtatatgagaaaaccctaggtagggatgatgagttagatagaaaagaagaagctttgtaaagtgttaaaattccataaagtgaggtcccacaaattcaccttcaaaggaatatattcattttagagaataaatgccaagaacaaataaagatgcttgaaattcaagcaaacatggccttaacactaagccaacccacttttccacttgattatataatgaaaaattaataaaagttaagtcccaactttgcttgaatatattataaaggcacaacaacatcaacaatattgagagataaataaaaatatatggtatattgtaattaaagaggaatatatatctaatttaaactaaattaaatatatgcttttatttatttatttatttattatttctattaattaacagccatttggatagtgaggtgcaaagtatagcaatatcaactataaacattaatgtgcaaaggtggtgggggacagccaatttcagagtccaaattagtccatagatttcgatcttgattccaattaatcttcttctagcttttgtccacgtggcatacgtacacagctttgattgaaccgttagtgggacctggtcaaacattttgttttataagtgggtccaaacgtgtaaacgatattgttgtgttttttatatattttttaaaagtaataaatttattaattgaaaatataatagtgctgcaataaatcaaacacatttccaaataatatagaaaatcttaagtttttcatctattttaaaatataattattatataaaagttattttattaaattatatgagatttgatatttaattttataagtaactatataattctatattattgaaaggtattagatacaactaatcttgttaaaagtatgtacaattaatctatatgtaattatattatcagtccaacaaacataaattagaaatatttttattttttttgataagtaattgcttaattctaaacaatgatttaaaattattaaaaaatagtaatttgcagcataaatacttaaatataacttctaattataaattaatacttaattttaatttttagcagtaataatatttaagttataattttaaaatttctgtaggtacttggttaaataaattaccatgtgacaattttgattagtctattcattaaatttttattatttaaaaaaattagttcaaatatataccaataaaaaaatgacacgtgaatgtaatgacttaatatttaacggttaggtacctacaaagtttta

SEQ ID NO: 113853 - DNA, 4544 bp, Cannabis sativa
tttttttaaacatttttttatcaatattttggactccgaccctaatctagaccttggaaaccggaccggacccagatctcgactccaaaccccgaccctaactcggaccccgagccccgacctagaccccagaccacagacctcagacctagactggacctcggacctcagacccgacctattcccggacgccgacccaaaccccgacctgtactcggaccccgaccttgacctcagccccagaccccaaacatcagacccggtcccgactttgtaccccgacaccaaacccaaacccctacctagatttggacccttgacttggaccttggacctcgagctcgaccctgtccctaatctagacctcagactccgacctcgatcccgaccccgacttggcccctagacccagacttggcccaagaccttgtacccagactcggccccgaccccagtctcggaccttggccccagaccgaacttaaataaaatcaacaaataaaaatgaaatttacaaaacacacttttgttttttgtttttaaaattgaaaaaaaaaagtagttattgaacacatttttgtttttaaaaacaaaaatactactgttaattttgtgattaaaaaatttaaaaacaaaagtgttactaaaagtaacctaattaatacgattaattttaatgagtaatcctaaaattaccacaataaatcattcaaactacaataaattataagagttaatattaaaaaatgtatttaactgtaagagttcataataaaataaataatctgatgtgaaatattcagcctctgcaggaagtatgaatgcatatgcggtgctttacaatgtcttttgaccgaagggggaaacgggaagagacaagagtacgtgggtaggcctaaacataatacctcaaattttcctttcataaatagaattaaatattttacttagtgtccctataatatttttgcatataaatataactcctacatcctaataaacaaagacccaatttttttttaaagggcattgctatggtgcacctcataataattatatagagattggtcttttgaaattgtctttacattactgctaacatcattacgtgttccaaattcctaattgcttctcagttccagattttcattccaggatgaatttgtcaaatagctctttttaacctttcttcttaatattataaactgaaacaggggatgtgaaagacttggttttgggaaactctcacttgagtagcagcaagtttttaatcatgatgcagattttgttgaaacttcaggtgatggtttccagaatctgttgtgcagccataaagaatcaccctctactgaatacccatcttgattccgatgccaactgaaaaatgaatgagttctgttcttgatgtcaaaaatcccatgaccgaagctagcctcacgataagctgaatagtttggttgtggctctgtcattctgcaacacatcataaaagagttaacaataaaacactaatcctcagcctagctataaaacagaactactgtaaatgattgacatactcggtcaccagtccttccagatttcctccatctccaattgttatgtaaactggggcagattcatcacttatgggagtgcaaattccattgacaatgttgtatccaatatttgatatacgttcctgtaatgcgaaaaaatttgaagattgttatcaacagctccttgagaggttaacgagagttaagggcgttttgtagagaaatcaaaggacttacagatcgttcgtaggcatgaacatggcctgcgaaaacaacatctaccttgtacttgacaaaccattgttcatacattactctcatagattcaccctccatgtaatgatgtacataactactatataatgggcaatgcatgataacaataagccatggtgtttctgatcggttcactttcagtagctctttctcaagccacttatattgaggagtgtaaatgcctacacaaagaaaattttatggattagataaatctttctccacaacacaaacagttgatactaagaaatcagctacaaggtgaaatgaaaacttgaagcaagaggtacaaataattaccgtaggctgagtaagaagacaagactataatgtatgctgaagctcttttgattgaataccacagaggtgatgtactctttgaagctctgtatggaacatgatacctgtttttataaggtttgaaaggtttaccctcaccctgcaataaaatttccaaaatttggtcctatattaagagcaattacaaccaaatggaatggcactactgagggtagaaataacaaagcatttcaggataaaagtaaagctcaagacatatcacaatttaagaagtacaacttatggaagagtaaagatccttacaatatcaggaaggaaatcaacttcatgatttcctgcagtccaaatccatggttgataagcagcatttctctctacaaacctaccccatgtatcccacctagtattgtcatgaaatggataagcatctgcataagaaaggtccccaacaaacaataatgcctgtcctttaacagggttcaactcataatgggtaagtgttctatttgaatcgtgagtttgaccaagatcccctgcaccaaaaattcaataaagtaagaccacgatagtgtttttctgatttaatcacacatatgagaaagaggattacctatgagtccaaatgtatagggaacatccggaccaacactaggaggggttctaaaccaaaactttctcttgctattccctataccaacttcatagtaatatttggtgtcaaactgcatttttacatagaattaattgttatcagttttgacttgatgaatatgcgtgagtgaacccaaaagatcctattgaatttggaaacaacataatgaagtgtacatttaatttaacaatgtttagacaatactcacttccaaatcgtaaatggagcaatgatggatgtacccagaagtgtaattgaagtacttgtaagtaagaacaatgccctcagcactgttcttcagttgactcttttctgaccagtaaagaaccgtacttgagccaggttcatctggagtaacccaagatacaatcacacccttacccacatgatctccttgagtaatatgaaccttaataaaacattcattcattaacacccacaaaaaattataatccaaaagtaagaaaataacaattctaattaaatccatgatgacccatcatccaacacaatgtttcttttacctgttgaggagcattataaccaggtggcacccgaaaaacatcactgtccaatggcatatcccttgataactgatcatttctaacgtaagtacttgtgaatccaccttcgcaaacttgtgaaagccacaatatgttcaaccccaataacaagaaaagagtaaatacaacatcaaactcccacctcactcccatccttactaagctgatctatattgtaatgacctctaactctgtcagatcattatgttcaaaatcaaacataagaggagaatatcatatgattctggcttcatccaagggataaaaatggcatattctaaggaatatttgaaaaatatataattaatggggagagtgtctttaagctaaagaaacctcttaaagattttagtacagaaactctactggatactgcttcgaggtagacacgtggaactaaagatcaggctacgcaactagatgtttatttatgagaaatactaaaatacattactggtggttggttgtcaatatattgattgatataattaaatatcggatctagtttaatataataatttttataaagtattattaactaattataagatgataaatttaaaaaatactaaatattattagtgtccaataacaatgctctttatttatttatttatttataagcctaatttatttattttgataagttcaaaagctttatttacttgaagactttgtaagtttggaatattccttgattcgaatttattcctttgttcatattaaattaaattaaataaacaaaatttagggtaataaaaataaataagtagccaataatattattcgacttgctaaatttgatatctttaatacacgatgtaaattgaagggcgcacttctctcatgacggagtgttggaacgagaattagcaaaatgttattcttaaaattaaaattaagaggttgtttggctttataacttaaaattattttttattttttaaaattaaaataatttttaaaaactattttttaaaaatagaattttaaaattgagttttaaaaaattaaaaaacaaaaaacatcaaaatattgttttcaattttcaaaaatattttttttgtctaacatattatattttatatttttacttgcatactcgaatcctagatccgaaactatacccgagcccagatgaattcatgtcatagtatggtattaaaatattaatttttttagtaagaaaaaaatcttaaaatagttttaaaaaat

SEQ ID NO: 113854 - DNA, 4132 bp, Cannabis sativa
tactcgcacttgtcgtttctctgaaaattctcttttgtattaatcaaataatataatttggtgttgcgaaattcactcgacaacaagctcattaaaagttttgagatctgttgtgcccacaaaggttgccacctcagggttgagatttttggcacacattgaaacaaccgcttgttctgacaacctctctggatattagaggttaagatttctccatcttgttatgaattaattccttcgcatttttattggctcgttactttgtttccaccaagtcatagatgcttattgtcttatttgaactcacaaactgtgccaaaaaggctttttcatgttattaaagtatttatggatcctgagggcagctgagtgtgccaagtgaacgccacctcttttagcgattgcatgaattgtctaatcaacaatgcatctgattgagcagatttaccacatgcagaagtaaaatacgccaaatgctcatgagaagaaccgttaattccatcaaacttttcaaacttttgtctgacatagtttggtagaaacatgatttggtcatagaaagctaggtatggcttatgatatcccagaataaaaatgcttgttgaagtctggtattctcgaatgctctccatgataagagcctttagatcttgttgaggttgaacaccgggtagtggtggttgcgcaccaagcggtgacaattgtgtattgcctacgggcggtgccgaggacgaggaatgttgtccaatctcactctccttttgtctcatattagcttgatgagataattgtgttgagagtcgggtttacttcttcatccctctcagccaataatctttaaagttcctggatcttctcttcattacttattgtgctagttattaacattggtatatttttatcattgccaactgagtaatgagatcaacggacacaccattgctctgtttgacaaagggagtgtcttctagagattgttcagatatgcaacgcccctcttcctgacctccttaactaaaagggttcattgattcctgactgagaattgtatgcatggcacgagctctcgatcgagttccaagtctcatataggatctagattcaacatttgaagcgactctcattggtcggtattgttaaaggaacaaccactcaccgtgttcttttaggaacgggttcaggttttctttggaaacccttatattgtcacttctagccttctttgagaaggcaaaaggcgtcctacacctcccagctagtcttaaacgtaataaaaggtgttcgttgttctcgacagatgcccctgttggttttggcgattgacatggatcacgatcataggtttgatcggcacatcctttactcattctcgtgtttcaagaggatttggtgagggtgatgttgatgttcccttcctacctcccattaccttcctgcctctcagagtttgagaagttagtgttacctcaatttcttttgcgaaaataaccatcactgaagcaacagtggacaagaagttcaggatggaaccaattaggatacactcttggccccattccttgtgggtaattatgggataaccattcgttgttagcttcctttctgccttaaaaacctttgcaatggacctttttattgttcgagcttgcttctttttgaagtcttttgcagccttgctgctcaaggcttacgcagtcttaggacatccttcacactttttcctcttccaacctttttagctggtgaaggtttcttcacattctccataggtttgggtaccctacatgaaatgggtgctcggtccatagagaatgccgccaggaaactattatttttctctcctcggcaagaagaggtcattggtagtttgtggaagtagaccgtgacttgcgatgccatttttcctgacaaatgtaaacaaaaatagcaccaaaattttaaagttcaagaatagccatcatagttggagatgaaaaggagaatgggtcccactgggcgtgccaaaaattatattaagtaaaaattatatatctaaaatattaaaataaatgcaaaacacaatttcacctatgccaaatttatagcataagagtttattaatttatgtttgatccattcaacattataaaaataatatcttaattacaatcttttagtttaaaagaaataccttttgaatctaatcacgatgatactaaataattgaaataatttgtggaaattttgggtgaatttagaattacggctaaactcagtaactttaattaatcgagatgcctacatatcttctttgtgaaggatcaatctacttgtagttcagaatatgttattttagattttgaatataagaatttcggtatatgaccagttttaagaattccagcataggtcgacaaccttttggacatcatagggtcgactagcatgagtcctgcaggtgcatggctagccagacattggcctaacaggactttggtgcaaagtttcacacgtcgagagcaagccagactgcgaattaggccttaacagcccacaaaaatagagggaaaatatgtatttcaaggggcattttagtcatttatattttactaatttaatatgtaaataacaacttattttacctattattaagggatatgaatggtttaagctctcatacataaatggccttactcaaaccctaaaaggcaaagtctgaagtcattaaatgtaagttagaaaccctagctctaagtttaatatctcatttctctctctcacacgcccatggctattctcatacttgagatttgccaactatgattcctacatggtaacctttagagagctactttagatcccatcactatagtgatctgagtagtattatctctcggtatcaatacaactaaaagaggaggacgtcattacctgctaactaagagcgccgaacctttataaaatcctatgttcatttaatttattgttcttactgtgtaacacgtgacaaacatcaacattaaatacgactccactgtcgattagtaaaatctgaggtcaacaatactaatgagtgtaatcagttggagtcttttaaatttaaagcttcctgaggaagaggtaaatgataagtaaaagataattatgccttttctcttctcttttttcaagctaatttcgaattcctatccaactaagaataggaatataaatttaaaatgtaagaacaattcctaatgctattgagattaagaaaaaattagagaaattaaagaaaaaaataaataataagcaaaaggccaaaagtctttaatttagtcaaggaatatgtgatcgttcgagtcaatattgtgtgcttaattatcacttacatttctttatgattgaatacttaatgtttataggctcttcttcctactcataagaaaataaattgggctaatcaagtttgggagagactttccattccaaagcattattttatactttgattagctgttgtaaagaggctgcaaacatatagactaatgaaatttaatatctgtcaaacgaatacttgtttattgtgtgacttttaggctggatccgtggagcatttttactttaactgttatttcatcatgacttggttagattaaaaagtaccttggttggagatgctaatttgaacactattttgagatagattgatagagtgaaaatttttaaattttcaaaggtaagtttatactatttctatagttgtcttggtgtatcacatatagataattttaaataaagccttttggttttaatatgtgcaaactatcataattagctgtcataaaattcagcaagatgttaaagatagaataggaaaaagttgcaaaaaataaatgtattatggtttaagcaattatatttttttttagttttttgagctgtttgtatataatgtgttattaaggttttttttgagctcttagattgtataaattttgttgcttgaatatattaagatgaagctgattgaacaaaatataattataattctaattagttataaatattgtagatttacatgtatgttcaatctattgtcactactacaaaaattccctttagaggcggtttttaagccctttcagcgttggttttggcaaaattcgctacc

SEQ ID NO: 113855 - DNA, 2311 bp, Cannabis sativa
atacatgcggtttttccaatttctcaaactgcacccgcaccgcgaaactaaaaaatcgcgaaaaccgcaccgcaaaaaatggtgtgatgcgatacagtttttgcgatttgaattattactaataattaaactatcacaaatacagcaaaacttgagcaacacttgtcaaaaataccataagacttaaaaatatatatataaaaaaaataaatttcaataattgtaaattaaaaaatgtaatatttactaatataatttattggatttaaatattaaaatatttttattattttaataaaataatagaataataaagaatataatatttggtgtaatttttagtgttggggttagaattgagaaaagatttggtgttgaaatagtcatcattatgtctttctctcctcctcttttttgattatgtctttccctctcttcatgctcttactattcagatgtcaatcggtttaattgttgcaatctttatttatattcatggaaccacacctcatataaaacattaataatggaaaaaaaatgagaaaattatcttgggttttgaaattgtggtattattctttaagttcccaagtaagattcggttagttagttagtctttaactaatttaattgtcaaaaaagaccgtaagtattattggctcctttaccctatataaagagaactacttatctcattcacaagatatgaaacataagaataaggtcaacaacaaaaagacacaacacaatagggagagaaattaagagtgacaaatagagagagagatatttgagagggagagggcttggattgattatgttggctcgggttagtgagttaatgaatgttgaggcattacaccatgggtgatttagtgtgattattttcttgtagctcctgagattgatatctcttattctcattatcaattaagattggtagcattgcttttaaacttgagtatgaccaagttcacattgaacttaggatcagaacaagtataattctcgtgtgttgattgtgtctgacaagcatctagattcatctgtttttatttttctagtttaatgtatttgctgattttttgttcttgatttgtttattttgatttaatttttatttgtttatgtgtgatcttaaagttaaatttaagaagttaatttctatgtatccgagctaaaatttctacaaaaacttataaacctagatagaaaccaaacaaagatttaatttgccatatagaacaatcattagaagaaattatatcactttgttatcaaacaatttttaaatttaaatatattatataaatatatatatataatttgagttgtcagttgaagagttgtttgagtaaaaaaattagtgttctgaaattcaaatagtgatgttatgtttaaatcaacaaaaaaggtatgagtttttatgaatttttcaaatccatttgttttagccttctccttaagatctatgaattaaagttgcttagcttatgattttgatacccaataatttttctaccaattaaaaattgcttagactatatattttatttcttattgtgattttttttctgtgtttatgaacacaattcaacaatataaattatactctcaaaaataaaaaataatataatttaagtatatcttaaactccatttttacaaaacaataattaaaaaaaatttattactcacgaatgagatgtaaaattagaaaaataaaaaaaatattgagatagtatagaagaaggtggtgaaaaagaagaggaattaattcgtgagaagagaaaaataaataaaaaaagcaagagcacattaatttacaccatcaattccaaaatattattaaaaaaataaaaattaagaataatttaatacaccctaaatattcattattattgtatactcattcatttatcacctttatagttttaatttatggctgtaaaaatatctctatcgtagagataaaattcatgtgcctaccatcagttgcagacccagaatttaaagtaagggagacataatgttttttggtaaggcaatggcaaaaataaacttaaaaaaaatgttctttaattgaattattgatctctatcctatatgtaatctagtttaaccattacattaaaactaatattatatctataaatatcatttttttattacatacatattgtaactaactaagttgcgtatgttgcgaaaattattaattactacgtaagtgcacgcaatcaagtagtatactcacgcaagtgagttcgaaccacagggaattagattaattactactaaactatacttat

SEQ ID NO: 113856 - DNA, 4032 bp, Cannabis sativa
acatagtcttatgatttagggccatttgctatatttttttgaaaagaggacataaactaacatactcctatgatttggggccatttactataatttcccaattaggaatggaaaacgggtcgggtcagtcccgacacgccccaactcgacccaacccgataaaactttggccttgacccgacccaaaaaagcacaatttgttattcccatgtgtaatcaatactcgcaattctattgacaatgatatatatttcacagacaaaacaaatcaccaaatattcctaacttcttgtcgccacaatggcttattaatttttctctgcccaaatcatgtatacacatgcattgaaaggtagtctgtaaatttctctcctcacctattgctagccttgcatcttcgaattcagtttagataccttcaaacttgtactgtaaaatgccaagccctatccattgtaacaaattttgggtgcgtctcttatgagaaaaacagagggcgagagagaaaaagcttaaaacttctattattattatgtgtattaatttacacgtatagacatatgtataggcatgagttagtcagaagaataactaacttagcttagtccaagaacaacctaactaatcgagccaagaatggcttaattgtattgtaactatcacaaggataagggtaatctcgtaatattcccctcaagatggcgtgtatatgttggagacacatgttagatacaatgttattaaatgatgagggtagtaaggcttttgtaaatatatcggctaagttctgttgagactgaacgtgaagaagcttgaggataccttgttgaacttttttcttgataaagtggtagtctatttcaacatgttttatgcattcatggtagacagggttctcactgatatgtatggctgcaatattatcacaatatagggacgcatgtctgttgagagagatgctgaaatctttgagaagggcaaggatctaggtgacttcagaagtggcatggcattagtcatggctcggtactcagctttagctaaagatcgggaaaccacttgttgtttttttcatttccataagactagagcctatataagaaatacatagtagccagatatagaatgccttgtatcctggcaagtcccccaatttgcgtcagcagaaaaggagagttgcacattagtgggagacaagcttatttcagcataggctgatatattgggagaggtgtttgatggggaaaaacagacctggtcctgcagtgcgtttaaggtattgaagaatacgatgagtagtttgaagatgtggcactcgaggacaagtaagaaattggctgaggtgatttacagcatatgaaatgtctagcctagtgatggtgagataaataagtttgccaatgagacttctgtaagcgggaggatctggtaaaggtttgcctttatccttgctgagttttaggctaggttccattggagtagaagctagtttggctctaaggtaacctgtgtcagttaacaattgcaaggtgaatggtctttatgagatagaaataccttgtttggctctacgtatttcaaggcaaagaaagaatctgagtgatcctatgtccttgagcttgaattttttgtctaaatattgcttgaatgagtaatggttgagtcattattgctagctataatgatatcatcgacatagatcagaatagttatgagcattgtttgtgttctttttatgagaagggagttgtctgagagggattgattgaatccttcatttgtaagtgttgtagtttttcataccattatcttgaggtttgtttaaggccataaatactcttattgagcttacaaatagagttgggtgggaaaatgtaccctggagggattttcatgtacacttcttcatggagatcaccatgaagaaatgtattgttgatttcaagttggtggacattccaaagaagatttttagtgtgttaaatttagctacaatggcataagtttgtacatagtctatccattgtttttgagtgaatcttttagctactagacgagctataaacctctcaacctcccttttttggttatatttaactttgtacacccatttacatccaatgactttgtggctagggatagtttggttactgtccatattttagttttctcaagagcttgagtttcaatgtccataacttggagccaatgtttgaactagaaggcttcagtgtaggattggggctcgatttgagagtatgatgctaaaacggcagccctgaaatgaggactgagttttgcataagaaatgaattccttaatggggtgagctgtagatgtagtatgacaaacataatctttcaagtgagaagatttgtttacgtgtccaccaatttttgaggtaacaggttgagcctcagtagcttggtctggtgtggtgaaaaagccattttttattgatgttgtctcaatagtaaaggctagattgattgttgtaccaataggagctggtggtatttcagtagcatgaattggtgtgttattgacaccagtagttggagtggttatatcttgagtaattggtaaatgaattggagtgattgaatgttggaaaaactaattgattttagtgtttgaattttgaccagtgaggggaaaaatgttttcatggaagatgatatctcgagagtgatagatttgtttagttttaatgtcaagaagagtgtaggctttcattccatgaggataaccaatgaatatggattcacgacttcttggtgagaatttgtgtcttgtagatgttagggtggaagcataggctagacatccaaagcatcttaggtgatcatagttaggggatttgttatgaagttgttcataggaggtgcttcctcggaacagtgcggaatgaggtctgttcattaagtaagtggtagtttgaatgagatataaccagtaagcaagaggtaagtgagattggaaacacaatgctcatgctatgctattttctttccataactgagttttgttatgggtgttctacacaagaatggtagtgaacatgcctttagatgcataaaaagattacatgtttagttctttggcattgtcagatcgaatagccttaataagcttagagtattgtgtgcaaaccatgttgtaaaacagaagaataacagtttggacttctgctttgtttttgagcatgaaagtccaagtaaatcaagacttgtcatctataatagtaaggaaatatctatatccttctatgcttataacattgaatggttcctaaatgcccatgtggatgagatcaaacataatttcagcaaaaatattattggatatgaattgtaatttattttgtttggcaagacggcaaacatgacaatgatggttttgtgaaatagaaaaaccaggatctaattttttattgaatgtatttgaaatgtactttgaggatggccaaggcatttatgccattgatctacattattttgagaaaacaaagagtaactagaactagtcataggatgagactcttgaagaagaacatagagttttccaagtcttttagctgtcccaatcaccacactcggagaatgagcctatatgacacaagaattatttctaaaaaaaactagattagtggtgctgtcaagaaaagcagtaatgggaaaaaggttaatgtagaatgtgggaacaaagagcacattgtcgagggtaatgtgtttgtttatcttgacagtgccaatacctttaactagaatgttattgccattaagtaaaatcacatattggggaaaaacatcattagagaatgaagaaaaacaagatttggtggtacacatatggtgtgtggctccactgtcgatgatccaagaatgagtttgaaaaaaaattgttatcagccatgttggatgctgcaggaggcagtgtttggatcatcacgaggagttgcttggctgagttgttggctaagaagtgaaatgacctagtggcatgttggaatattattttaccaggatctta

SEQ ID NO: 113857 - DNA, 2864 bp, Cannabis sativa
  modified_base (160)..(160): a, c, t, g, unknown or other
ctctgctcctgactcgactcgccgtccggtggttcttctcagctcagctcacctcagctcagctcagctcaggcacggcaccatctccatctccatctccatctccatctccatctcccaaggtactctatcttcagttccctctctctctctctctctntctctctctctctctctacatatacttttattatttacaattccatttttgtatttgttctgtttgagaacagttacattatatcatgctctaatggtgtttgacaaaatgccaatatggtttttgttttagtatttttgcttagttttttgccacattcactttgcagcttcaaccccttttctagctttacggataatgatactaaaaatcaaatcttgagagaaagatgcctgctttaatatcaccacgctttctgttttttggaggctcacttcgttttcaaaagctcacccatttttctaggaagacttggtttcatagcagtgtagacaagggacctctcactcttgctagctttgatattaagagtaagattgaaaccacagaaccaagggaaacaactaaattgaaagtccccaaaggtaagaagattataagaagtaatgcgattaagccaaagaaggttgaaaatgaggcagcaccatttgcagctcagtcattttctgagcttggattgccttctactttgatagagaggttagagactgagggctttacaactcctactgatgttcaatcttcagcaattcctgttattctcaatggtcaagatgttgttattcaatcttacacaggttcagggaagactcttgcttatttgcttccgattctcactaatgtcggtccactaaagaaggattgttcttctggtggatcatatagagaatctggtgggaagagagctgagattgaagctctcattgtggctccttctagggagttgggtatgcaaattgttagggaggttgagaaattattaggtccgaatgataaaagagcggttcagcagcttgttgggggtgcaaatcgctctaggcaggaagaagctcttaagaaaaataaacctgttattgtcgttgggacgcctggtcggattgctgagattagtgctgctgggaaacttcacactcatgattgtcgttacttggtattagatgaagttgatgaacttctttcgttcaactttcgtgagcatatgcataggatattggaacatgtaggtagaaaatcgagtgcagaccctaggaacccggttgccaagagagttgagaggcagaccattttggtttcagcaacagttccatttgcggttacaagagcagccaggagttgggggaatgatccacttcttgtccaagccaaaaaagtagtaccacttgaatcaatcccacaatctgggccggtcttgtctaagaagaccgatacaagttcaacctcaaatcctcagacacagccaacagtggagctacctccctctttgaaacactaccattgtgtcacaagagtacaacacaaggttgatacattgagaagatgtgttcatgcacttgatgccaagtctgtcatagccttcatgaaccacacaaggcagctaaaagatgcagtctttaagctcgaggctcgtggaatggtggctgcagagctacacggcgatctgggcaagcttgctcggtcaaccactttaaagaaattcaagaaaggggagattagaatccttgtaactaatgaactctcagctagaggtttggatgtggcagaatgtgatcttgttgttaatctagacttacctacagacacaattcactacgctcaccgagctggtcgtactgggcggttaggtagaccaggcacagttgtgtcgctgtgtgaggaacgagaagttttcgttgtgaagaagatgcaaaagcagctaggtgttcctattcctgcttgtgagtttgtagaaagtaagcttgttgtgactgaagaagagaagattccacatcagttagaatgatatagaaaaagaaagattagtttttttacatggtatcaaaaattttgaagtatcaagaactgtttgtgtttatttttgtacatttatttcatccttatttttaaatgcagaaactaatgtcatgagaatgtattcaaagatatatgtacattgataagaaaggtttgtgtttcatatatatgtatgaaagaagaaggttgaggaaaaatccttagtcataaaacatgaagttagatttatttattttatttatttaagggtaaagtattatttagtcataatcaacttgaagttagtttctgaacatatgcaaaaaaaaaaaaaaaaattattattatttttgctacaacactttcggttatgttattattaagtttttaatttgataaaaattaagttaaggatatgtactattttgagaaatatagtatttgaattgttattttattaatagagagttcaatatgtaatttttggaaaatataaaatttaaaatttaaaatggtacttatcttttattaaatgtcaaactcatgaaagcactaaattgaatgggatccatgaatgctataaatatattaatatatataaaatattttttcttgtaagaatatacgtataattgtttttttttatcgaagaatttatatatacctcttatattgtataatttggaattcgttctaaaactccccacacatactctcttaaactttttatggtcgctcgagttaatttcaagtaatttatacaattggttagtgttgtgattatttaaatgctaattagtaatttttacttcgaactttgacatgtaccaaatcatattttttgaacttctttggccgttaaaaatttcccctg

SEQ ID NO: 113858 - DNA, 1676 bp, Cannabis sativa
tttttttttttttttttcataaacgtgtaatttgtagttatttaggatcaccatcaaacttttaaaaaaatcaaaataatatatattattgaaaataaagttcaaatattttcttacaagcgtgactgtttttttatacacacgtggtaagaaattgtttgaattttatttttgacaatgtaaattattcagtattttttgaaaaatttatagatggtcttaaataactataacgtacacgattatgaaaataatttggactaaaaactctcttgaatgtcaaaacatataagatgtctaccgaaataccattttagggagctatattataaatttttccaatatatacatacatacaaagggagcttctacagtgcacccccaaaaaagagtacactaacgtaccccctagtgcttcaactatgggaaacaatacaataagagtacgcagcagaaaatatacacattattgagtaggagcatacatagtctgttagaaatttatatgaatgatatgaaacatatatgatcatgtatgaaatatagaattaatcgaatatatatgcacaatgaacaaaggatcgaaatacctcgagtcattgattctttgagcttcaatcccacacgagctttggatctacaaaagaaaagaaaactgattagtgtggataatcaggctttcaagctctctttactctttttagaaggatatactgtttcacagaacgagtagttaactcaaggactgagaccctatatttatataggtgagacatttcatcaaagtttttgtcacaattaattgtcagaatatgttaacaattaatttagaaaatcaaatcggaaaataaaatgtttagtaaatcgtaatctgaccatagatagaatatcaactaattaattgtgaccaaattcaataaatataaaatattcatcgtattatatacacgtataaatttatttatacaaaaaataaataaaatattctaatatagttatctatacaaaagttttctattcaatctataaacaatttatatttttaagatcacgtaatctcattaatatatactactaaaaaaaacacatggacgactgttttaaacacttagatataaaattttcgtcggttcctaaaattgatgcctatgtcactgacaccaaacgagatggtattggcgtcagttataaacggtcggtattgagcattcctcactgttcataaccgacagcaaaaggaggataaaatatgcgactattttaaatggtcgctaacactttacccttcgattttaaactgacacaaaaaaaatccagatatgagatatatctcatattttccaacagcaacaaaaataattcttatcccaatttttgcccacatgacgtggcatgcccatgtgggcaaaattcataccacgtggagtatagcttgtcagcaagaagaccaagttagcatgcacaacatatcagttgatgaggattccaaatacttaaccgagaggaagagataatgaacttgccatcttaaggggtctggtcggatccccttggctgccctattgcgcacttgtgctctactgtgacaacagtgtagtggtggtgtaataccctaggattatgaaatagattagcaaaaccctaattagatattatgaataattgaggaattatat

SEQ ID NO: 113859 - DNA, 2541 bp, Cannabis sativa
atatatatatatgtcaatttaaaggaataaagatggattaattgtatcatcatgatatatatatatgctgcgcatgcaggagtagtactggtaagaaagaagagaatgagaagtcttacgatgggaagcagaagaagaatattgtaataatattggtaatggttgggagttccatgggagtaatggtgttcggatgctcttgcgtattggtaataaggcgtcgacgagaacaaacccattttaatcaatcacaaatcacaaccaccactactgatcatctttgtaaaattggttgcagctgctgatatatatggaccaacaatatttaaacaaatctcaacttcaccccatattatcatacatacacatatataagctatagggatatccaatatcgaattagttatgatcattattgaataagttttccaagtcatatatccgattccggcattagttctttagtttaaaataagtcaattagccagctacgtttcaagactttgtcttttcgcaagttggataatgctctacacgttattgtacagctataaatggccctagctaatattgtttgaactaatcagagttttgatcgatatattaattatatggcatatattgattccaatgctaattaataatctccctcttctttttttggtcagtgtaggaatttaccaaactgtaccctacaccaacaaaatattcatcaatatattttgacctttccttgtgcttgcggaataagcatgcactttacaccttcccaaaacaacacagttttggatttgcacaaacatatataaccccaagagaaatcaatcacgaacattcattcgattcacccaaaccctcgaaaccctagcaaacacacattcaagagcacactgagagaaacacaaatcagattcacacacacggcactaatcttcaagatctaaatcgatcttgaagattcacacacaataaacagaaagatagaaagtaaaagggaaagaataacaccgagttttttagaggttcaccccaatattaaggctatgtccatgtgaccgccatgagttggggtttctctacacctcaaagatctgaatgaacatactcaaatatttgtttagtttggtgaatcccaattttaaatttaaacccatgatgcttttctaggatgtatgatttacaaaaatcaattttacttaccttgttcttacctaacaagttttgttcattcatgatctctaatccctttttactgatgtgaccaagtttccgatgccacaatatttttttcaagtcttttggtgcatggatcacaatgttgttacaatgtttaattggctctccttttaggtaatagagtccttcaagtttttggcctttgattatggttatggaacctttgcttatccctataatacctaattcaactttactcacaatacccaagtcatctaacacacttacatatagtatgtttctaataatactaggcacatatcttacacttgttagtgttcttacaataccatcaaatattttaaaattaatgttacctaagccttgtatttgacatgcctgattgtttctcaatattatatttccacctgttgagtctttgtagtctattaagaacagtctagaatttatcatgtagaaaatacactctgagtcagtgatccaatcatcttttaaagatgatgctgccaaatagagttctccatcactatcacaaccactagagtagttggcatcctctttctccgtgtacttgtttgagtggtgattttatctctgagtatttgaatcttgtccttcatttttgtatttgtttattttcttccagaaataacaatcatttatcatatgtccaagctttccacagtagaagcatccattagatctttaggctcttgtgacatgcctttgccctgactgttgtttccccttgtaggccccatgctttagcttcttcctcgattagggttaggttttctacctttatactttgccttaaccaaaatgctcacaattcagccttttgaactttgaggtttttcattccacatttccaagtctattaactttaaggaagaaatcacttcatctataagaattgatgctcttcaatactttatggctgtctttacctccatacatgaatctagtaagaaatttaatataatgatggtttggttctcatcactttaggtctcattttcccctgagtttgctaattcaatatgcatcttcaaaaattcatccatgttttgattaaaagatttggatggacttatcttgaattcaaatattctttctttcaagaatatattgtttgtgagagatttttgttgaaatatttcctttaacttcttccatattttggctatagtttcttttttgtcaactaatcagattatggcatctgacaagttgacactactacaatatgggcctctagcttccttttttttaacccattttataaaaagggaagctaaagggtgtgaaaacacccacctgattcgaaattgacatttagag

SEQ ID NO: 113860 - DNA, 4175 bp, Cannabis sativa
  modified_base (2685)..(2693): a, c, t, g, unknown or other
  modified_base (4137)..(4149): a, c, t, g, unknown or other
ttttttttttgcatttttacgaaaattctcatagcaaccaacaaagcaatctaaatcgcaaccaaaattcacatagaaactcacataaaaatcacctaaaaacccacaccgataattttaaaaataaattaataattaaaaaataatatataaagtaattcacctatttattaaaagtacacatatgtgaacaccaatataataccacctcttaagtacaactccccccaaaagctaacttgagggaagaaggtacccaagtagttttatactactaatcaattccatacttgatcaatgtggaatcctaacaatacaccccctttggagccgacacccacctctaaggctgcctactctgcagtggcctactctaggcctaatccacaggtcaccccttccgtgacgtcggtcccatttaagggtgcatagctctgataccacttgatacaactacttgggtagaactcacccccaaaagttagcctgagggaggagggtgcccaaataattatatactactaatcaattccatacttgatcaatatggaattctaacacaaacatgcacaagtagtatcatttgtatcaaaattttccaacagaacaaataaaatcccccaactgaagttcagttaaaaccccatgaagtcaatcaatgaatctacctggaagccacttgggactagctcaagtagttaggtgtgtgtgagagagtgaggggaagggaggggttcaaatccctattgtatatatataaaatcagttaatctacctggaagactcaacaacgtcgtctggggcaccattgcatctaatttcatggttgtatctttctcggagtctaatatatctgttacagagagcacaaagttctgttcgattcccacatacttcctgtttggaaaaagcaaagcacccatacaatgctgagttgctaataaagtaaataactaggtgtaaattttccacttggaaaaaggaagtgttgttacctgatgttcagctaaatcaattgcaggtaatgggaactcacaaaagtcacatgtgacaatcctttgggggcagttttcacctttatggacagctagtatttctcgttgcattgtctcactacatagtgaacaagctacctgctttcagagaaatgtcaaaacaggacaattttatgtggaaacactatatacatattatttagacaattttgaccaagaaaacttgaccttggtccttcacaagttctcttttttcccaacaattgaagtatttaccacttaataaacaggactccagtaaatgatacataataataaaatcacccaccacatacacatgaacatgtagatttgatttgctttgctcagtaaagctcgtgaatcagaaactggcagaattatagaacttctggcactactaaccaaaggaaaagaggtagccaaaagaagacttccaaaatggaaagtaggcatagaaacagaaagaacctttctaagtgaattggaactaacaattgtgcaaaaccccccaagttactaacatcatgttcaatggatagacaagagtgtagaaactagaacatactcacataccggggcatgagtgttcaagtaatgttcctcagcatgccttcgcggaatcatatcaccacaaactttacatctttcaagattgcgggagcaatgagcaaaatgcaaatcaatatttgaagaagggatagctctgtcactgtatacatactattgagcattagtacatgtcacgtgaatcagtccacttagtttatctgaaagacatgtcatcacgcatagtacatgatattggacagacaagaaattaaagcactggttggttaagacggattacataatattgatatcacaagtgacgatctttataaatgaaacaaccaaaggtaacctgagatggagattatcatgttcaagacgtattcattgggatagatgcatcataaaacacacacacatgcaggctcgaaacaaaaagagtttgaagttaattatcaaataagtattagttcaacaatgcaggggggcgagcaaagagtttgatgtaaattatacaaactctagctactgagatattggaaaaaagaataataataaaaaaaggacagagatacaatacagacttaattgagttggaatacacaagaactagcatgaggtatgaagcaatatcaaaacagcaaggatagttaatgattcaaatctcaaaagataaagaagtattgaaaaaggtaaaaaaaaaccaaaatcaaaaacactattgttagatcaaattatacagcatgtaacttattaatcacactggagaaagtaatctcaaaactgagccaattgtaagaataagtgttaacacaagtactctaacgaaatgagaatctctttcagaattttgcaattagatcaatgtacctaaagtctacatatgtgacactaaacacatattcggaaaagaaaaaaaaagaaaaaaaataaaaaaaaaaacaaacccccaaaagaaggagaatttttttaacattatagacggaaaaagcccctaaaaatataaggctaattagcaattttagccccgactttgatatgtactaaatcatgcctctgaatttttttgactgttaaaaatttcccctgaacattaagattgttaaatttaaggactttnnnnnnnnnttagtaaaaaaattctaacatgatgaaagttcaggggcatgatttagtacatatcaaaatttgaggggcataatttggtagatatcaaagggggagcacgttttagtacataaataatcactgaaacagtaaaattgaatgaaattagacaaaagtgcttaaatttaacaatctcaatagttaacggccaaaaaagttcagggaatataatttgttatatatcaaagttcgagaggaaaaattgcaaattagccaaaatatgataatatgttcatttttcacggtactcaaccaacgattgtcaaaccaaaaggaaaaaagcttaattgactcacttagaacaatcccaattcccaagtaacattattcttgaagaacaaaatggtccaaaacacgaacgaaataattattattaaagacagcaaatttccaattatccatagttaatggcatatgaaatttcccctttaccttataaaaatcttaaattaaacctaatatattcatctagatgactaaaacaacgatcataagtaataaacacatatttacataaccagaataataaacagaaaagaagttcagattaggcgttaccagtgactgcatatgctttgagcttcctcagacgacgcgacagccatggagacgcagagaaaaggagaaatccctcgaacaaaaatcttaattgaaagtgaacaaaagaacgaaactttgacaagatattatttatatataagttagggctttgagtaatggaaaatgtcaacgaaaatgggagatgggggaattcagaatttacctaaagctctttgagaagtgtgttatggatgattaaggcgtaggagtccttgatttctggttgatttaggtttagatagatagagagaaaggaaaaatttgatctttcttctttttctaggcaaacaaacaaggaaggaagggcgttgggagggtttgattgaatgaatatttttggtctaacaactttaatattatatgaaaaagagtaattaggtgagaagcaaaaggaaaggggaaggaagactcttggatctaaacaagtccacatttattacaacacatgtcactttactcatttcatggaatatttgaggaataacgtattattagtaataataaaaatgtgactaatgataaacttgataaatcacatttaacaaatgagatttatgatattagttgaaatgtttgttttaccatataagtaggggtattcacggtgcatatagtctagtttttgattatttttttaaattaactaacatatgcagtgtttctaattttccaaatcgcaccagcaccgcgaaactaaaaaattgtagattctgcactgcaaaaaatggtgcagtgtggtacggtttttgcagtttaaactatcacaaatacaacaaaacttgagcaacacttgtcaaaaataccnnnnnnnnnnnnnataaatatgaaaaaaaaaaaataagt

SEQ ID NO: 113861 - DNA, 3483 bp, Cannabis sativa
  modified_base (3410)..(3440): a, c, t, g, unknown or other
ttttttttttttttgattttgtcggtttcgattccaacggtgttcggtaggtcggtttgaacgattttttcagttttttagattttatgctcacccataatatacatatttatgtatgttctggacttaacaaaatttatatattaaacataatcatgaaataattcatgtgaaccatacaacataaaatgatttctaatctttattaattagtaaatctgaatatattgaaataggttttatttacggcacaaaacccaacatgaacacccctaactagtactaataattcgttcattcacaaaaaactacaactttactttgctctccattttcccttacttctttttaactaaccttatttttacaaaataaatatttagttctattttgttcttaaagtatgtaattattactaaaatcggttgcaaattttagttagtagaatcgtgtatggaaacgagttgttcattaaaaactcgtttagtacgtcgtgtaatattatattgtattgttttgtataatattatattggattgtattgtatcatattaatattatttaatataatattatatttagtatatattgacttttattaataccccgaccctagctcagacccaggggccggatccaagtctgggctcagaatctaagtccgggtctgtgcccagagtctaagtccgggttcgagtctaggttcaggtttgggtctgagtttgggtcctcgtttaggttcaggttcgaggtcgggtcctgagctggggttcggggttagatttggggctagggttcacatttgagtccggggtctaggtctgtagggctaggttcaggtccgagttcaggattcagggtcgagttcgggactaagtatggggtcggggtttttaattccgaaccctttgtaaatattataatacaagctaatacgaatcatttattatgtattaattaatacgattcatattgtattaaaatttatggtcataataattaatacaatacaatgtttatccaaatgtagtgttacttgttatttaatacaatacgactcttatacgacctaccaaacgagtcctaaaagtcaacttaaaatcaactactaggaagaagttacatgaaagttaatactacactctcaataagaaggggtgaagttcagtctgttatggtcagattttaccaattgtataactgatctgtaaccgaccgttgagaaattataattgtacggttttagcgttcttcacaatttttttaatttttggtggttttggtagttttggtggttttacggtttaaccaatattttttttcaaaaaccaaaatcaagcgccatgttaaaaagctgtaaccgaaactaaccaccacattctataatgccctaatccctaagaacactacatgtgtacttttaaaaattaggttataataataagctaatatttaatcaaatatgtgatttaaataaaactttactaatgaattaaaataaaccaaacataacgttataaaatttcaaacttcagggatcccttttaaattttacaaaagttaccacccgacattacatttaaagtataactttgagatctcaaaagttacataaaactatgtcccgacaacttggctctgctagtcggataaactgctatgtacatttgccattgaagaccccaactcatggctgatctaacttgttctttcccttacatgcaccacaaagtacctgtgggtcacaaaaactagacaagaaaagtaatattataaatattatataccattatagaagtagaactaaataattacatacttcaatccatatgaaaacacgctacacatcacaaaacatacattattaataaatatttatctaataggacaatctttcactattaatttataaagtaaccatttcaatgtcgttgtctaatgagacaaccattatacatataaaacttacaatggttttatgtagagttagaagcttagtggtgagggaggagtggaaaaaagagaaagggcatgagttcgaatccaagacacttaaattattaattgatatgtaataccattatattacaaaaaattgtattgaattgtttctaaagaaattatataatgtatgtattttatatacatgttaataataatatgttaacaatatgggaagtaagaataaataagaaatgagaataatttatatgaatattctcttaaatttaattatatgactcgggctttgtaaatacatgagttgttcgtatatatatatataaaaaaattatattgtaaaactagtatttttgtaatttataatgcagtgcaatttaaaacacgattattaaatttaaaactgcaaactgtactgcgtagttcaatgaaaatacaaactgtgctgcaaaaatttcaaactatattttttttatgcagtatagtacggtggcatagtgcgaacagtttgtgcaatgtggtggacagtttgatgaaaacccttaactagtacaaatgattcattcattcacaaaaaattacaactttactttgcttcaatttttcctacttttttttaactaaccttatttttacaaaagaaataattagttccattttgtttttaaaatatgcaattattactaaaatcggttgcatattttggttagtacaatcgtgtatgaaaacaagttattcattaaggactcgtttggtacgacgtgttatattaaattgtattgtgttagattgtattgtattatattagtattatttaatacaatactatatttggtattgacttgtattaatagcttgtgtaaaactatattatctttactataaactcgaccccaaccccacctcaactcagacccagggtccagattcgggtctgagatcgaggtccaggtttgggtctgggtccaaggtctgagttcgagtttgggttcgagcctaggtccgattctgggattggggtttcggtcctgagtcagggtttgaggtttgtgtccaggtctaggtctgtagggtcaggtctaggttcggtaccaggttcagagtacagggtcgaggccggggtacagggtcagggcacaggtctacggtcgggtccaagtcttggtctgagtccagttgaaggtccggatctaggtctgggtcggggtcggggtccccaactccgaactatttgtaaatattatattacaagctaatacatattatttgttatgtattaattaatacaattcacattgtatttgaatttatggttgtaataattaatacaatataatattttatccaaacgtagtgttacttgttatttaatacaatacgacctaccaaacagccttaaaagtcaacgtaaaatctattgggtatatattaccagaatctagatttactannnnnnnnnnnnnnnnnnnnnnnnnnnnnnnaattctctaaaacaatgaaataaatacataagggtttaagaaa

SEQ ID NO: 113862 - DNA, 5285 bp, Cannabis sativa
  modified_base (834)..(837): a, c, t, g, unknown or other
  modified_base (1143)..(1147): a, c, t, g, unknown or other
  modified_base (3645)..(3672): a, c, t, g, unknown or other
  modified_base (4363)..(4371): a, c, t, g, unknown or other
ttttgtaactctattttgccgcttaggtcagctaaggagaaaagacttgtaatattttgtaaaatgatttttgggatcccgaaacatctaacttttgtttgtaaggttaatattattacaggtttattttcattccatttttgtttaaagtttaatttccgcgcttattttattagtaatccagtttaggggattagggtttcttaatcatattgggtagcgtgcctaaatcttagggcgttacagttgtcatcaagacaaacctggaaatttggttcggcatagcctatgggatttaaagcaccacccttgtagactaaaacataatcccttgtccattttaagtattttagaatatgcttaactgatgtccaatattcctttcctgggtttgactgataattgctcacaattctcactgcatagcaaatgtctggtctagtgcataacatagcatacattagactaactactgaagcataaggaaattttctcatatcttctactcttggggatcagtgggacactgttccttagatagtcgcaagccatgtttggaagacataattgcccttttggcattgcttatttagaaacgctctagcaccttataaatgtaagctgcttgcgagagagcaagtaatctattcttccagtttctaataatttggattctgagaacataattagcttcacccaagtttttcattttgaattgggtgtttacaaattcctttatttcaatcatcttcttgacattgtttgcaatgactaaaatgtcatcagcataaaggatcaagaattttaccacttaattatccttgagttggtaannnnaaggttcatcttcattttggtgaaagttgtaggttttgattatttcatcaaactttttgttcgaagagtgagaagcctgcttaagtccataaatgcacccatttagcctccaaactttctcttcttttcctaaaagtttataaccttctagttactccatatagattgtctcgtcaagaattcagttaagaaaatctgtcgtaacatccattttccaaatctcataatcgaaagcggctactatggagagaagacttctgatagatttgagcatggaaaattgactaaaagtatcctcatagtccnnnnnttctctttgggtataaccctttgctacaagtctagcttgaaaagtttcggcttctccactagcaccccatttcttcttgtagacccattgacatcaaattggataataatcatcaggtccatctacatatttttagactttattcttcttcatggaatccatttttgaatccatgccaactgaccattgtttcaattttggacttgccattgcctgtttatacaatttcccatccatgagcacatatcttagggctgggtattgaactttccatgaagttgctctgtcatcttgaagtgttccagattctagatacttctggattggagccatccaagaagtggatagatcaatagttgttacccctagtgttatcgtgcttggagcagaaaaatgggcgatggagactaatccatacttttctatctttggatctgttgccaacttttctagcatacccgcaaaggcatttcgatctttgggaattttcttgacggagtaatgcttaaaatgctgcaatagctctttagattttgctacgtaattagctatattctcccctttagtttggtattctctagaaatttagttaactaccaactgtgaatcactatagagctcaatgttcacggctccaacttctttagctaattataagctagcaatcattgcttcatgctctgcttcgttgttgaaagcttcaaactcaaaacagagtgcactctctgtctacatttatttactaaacttctagctccaggatgggttcttcagggttgttgtccatccctgtgcattcagaaataaagtctataaaagcttaaccttttatggatattcttggctggtaatggatgttgaactggctcaattctattacccgcttcaagagtcttttgaatgattctggcttttgcaaccctgacgaaagggatggtttgtcaaaaccctattggcatgggcttgaaaatatggtcttaactttcgtgatgtaattagtaacgaatagaaaagcttttcgatcattggatacctagactctgcgccaaacaatctcttgcttacataatatacaacatgttgtaactttccttcttctcgcactaaagcgataattattgcatgatgtgacactaccaggtacaaaaacaatggttccccttcaacaggtttagacaatattggggccttagttaaatgttctttaagtttttaaaaggcttcttcacacttagctgtccattcaaatttgttattgccacaaaggacattaaagaacgaaatgcatttgtttgttgatttggaaacaaatctactgagtgttgtaatcctcccagctaaactttgcacatctttatgcttttggggtgaagtcatatctagaagagccttaatcttttccaggtttactttgattactctggaactgataatgaaccctaggaatttccttgagaaaactccaaaattactcttttctaggttcaatttcattccatatttctagatgatggagaaagcttcttctaaatctttattatggctcatggaggtctttgacttcaccagcatgtcatcaacatagactttcatattcttccccagatcttctatgaacaccttgttaacaaggcattggtatatggctccaacattttttaaactgaatggcataactatgtagcaatagattcgtttgtcagtttggaaactagtgtgttcctggtcagctacgtgcattttgatctagttataggtggagtatgcatccataaagctcaaaagttcatatcctgaagtagcatcaaccaatttgatctatttgtggaagtggaaaatagtcctttggacaagccttatttaggtcggtgaagtctatgcacattctccaagttccattaggctttgggagaaatactggattggctagccataatagatataaagcttcccgaagaaactatatgttagttagcttgtctactttcgcattcactacttcagatcttattggatctaatggtcttaactccaaacgaattaattctacagtaggatctacattcaaagcatgacaaatcacatgtggaataattccagtcatgtcagaatggctctaggctagcacatcactattctcttttagtgtagagacaattctttttctagcagctggaggtaaattctttccaactttgatgactttagtggaatcttcatcactgatgcacacctcttctatctcctccataggttcaattattctttccatacccacacgtgggtctaattcatcttcttctcaaactacccacaatgttggctaggtggatgttccaagttcttcatgatttctctcttggaccattgaaatggtcttggttaaaaacattgtaaaaaattcctacacttttttgatctcctttgattgttccaatgcttcggaactttaagcacaaatggtgaattgatgttattattgggattttatgccctannnnnnnnnnnnnnnnnnnnnnnnnnnnttactaattaataaaagatcagaaatcatgttatgctgcattgttcacatgattactttcatagttatatgtttattatataaattctattaaatcatgaacatatagttattcatgattgtagtattatctacacagtagaaaataatcatgattaaatgcttcaaactatttggtcccacgatttatcaatgtagtggatttacactaatgtgataattggagatgtgttttacttacacttgtataagtggaatgtcctttccaggttattagcaaagtaaactagtatcggatgtatcagctgtgcatcggactggaccaatattgacagagaaaaagatttcataaactaactgttatgtctgttctaagtcaatgtcacttagttgatcttaggtcaattgatctcaatcccgagatggttacgttctagcttaattgtactatatgggttctttcacttgtttgttaaagctgaccaattggatatagtccaatacttacatcttggaaactcggtatgtcaaatgagtgggatcgttaatcatagatatggaatctataacttttataagtacttagaagtgaaaggatagtttccttagagcttggctaaacacgtttaaatgattgaggtttcatctcagtaattatattagttttccgaaatattatttacaagtagctnnnnnnnnnaaggacaaaatacattgaagggtataacagtaatttagtccctattcattgtagaccatctataagggataattaattatttagattgtaacaatgaataattcatagcatctatatttagtatatagagcattttatgtaatcagaattgtaattctaaatctatagtggagttaggtggaattaataagctaggaaatttatttgaaaatttcggatctacttattaggagcttgattacataggcccatggtccccgaactaactgggaaaatattgttttgtagtcccaattaattgatttatttaatcaatatggattctaaataatgaatatgtcttatttatgaattttactaacgaatggcataattgagaagaaaagagaaataggggtttatttgttaattagtacactttgtgggtctaattaaaagataaatttaaattgtattttatataataatgatttataattattaaaataaaattggtatttaaataattagatgagaaaaaggctaaaaataggaaaagacatattgtttcattagttaaaataaagtggcaaaaatcctaactctaaagcccatatgtatattcggaactaagagtaagattcaacccaagtctttattccaagctcatgtcatctaatcctaaccctaagtgaagcctataaaaagaaagagaagagagctttgtcaggtgattttctaagctagaaaaccctaaaaagctcacttcttcttctcttttattttcgaaaattcagaggctattttctcttggatttctttataaaattgttaggatttatcaaacactcaagaaatatataaatcacaaatctaaacatattcctaaaagtgctttaatatagaaaatcctaaatcataaatctatagaactt

SEQ ID NO: 113863 - DNA, 7151 bp, Cannabis sativa
  modified_base (7084)..(7089): a, c, t, g, unknown or other
ttgcctttgacagccacctgcttaaagctttcaaggaaatagtcgtggcttcccattgcagccgacctttgatttgaatcaagcattccttcaaaaatttgcagcagaaaaaaatgtgttctatggtttcactactgtcattacacagtaggcagaaatcctcttcaattactccaaatctcactactttccttcgtcttcaagttcccaagcatcgccaaccacgcaatgaaattatgctttgggatgttgaaccgattccatacaaacttgtcctaaaacactctaaccgactgcacatgtagttctcgataaccagcagttaccaaatatcttccttgcgccgtgtttatggaatcaaaactcttcatttgttctttaaccattaccacttttttccaacaccaacttgcttgggctgtaggtttatatgtccaccaatcctcatccttgatgtagacattatgaacccatttaacccataggttatcttccttcttggcaatggcccaaacatacttaaaaagggtacgtcgctttgttccaatctgagatacatctaaatcccaatccacctgagcttttagcttgacaaagcgatgcgcaagctactgcaggaactcctgttaaagtatattatccattccataaaaagctacgacaaatagactcaatttcacttacaattttcttaggcagcaacatcacttggcaccaatatgaatgtacagccatcatgactgagttaataagaaccacacggccagcaaaagataaattcctcgtgctccaagttttgatccgagccattatcttttccacctacagtttgcaatctgctgaagatatcatttttgcacaaataggcacacccaagtatttgaaaggcaagctctgtttttgaaaacctaaggcatctagaatcctttgaacatcttcctctgtcatgttgctacagtatacagctgatttagaggggttaggaaccaaacctgaggtctgggagaagagttttagtccctacaacatgtagtatatgctcttgaagtcaccattgcaaaatcataagacatcatcagcaaaacttagatgatttagctcaagacccccacatctctcatggaaaataaaatctgacttcttcccgatcctcctcatgattcgggaaaagtattgcatttccataataaataaaagtggtgacattggatctccctgcctcaatcctcacttagcttggaaaaaaccatctaatgatccatttatcatcaatgagaatctaggagttctgacgcaagtcattaccaagttgatgaattttggtgggaattggaatccatagagcatctcttctatgaaatcccattcaatggtatcataggctttctgaaggtcaaccttaatcatacaactcgccttttttgtcctcctaccataacgtgtgatgagatctttgaaaatcatgatattgttcccaataaatcttccatgcacaaagtccccttgattttgtgccactaattcaggaagtaccattttgagcagagtgcatatgagcttagtagccgccttatagagcacattgcaacaagcaataggcctataatcccccaccatgttcagacacttacacttgggcaccaaagtaagaaccgtagaattcaattcctataaaagctgccctgtatgaaggaaagacatgatggtctctgctgtatccttgcctattatctcccaattatcataaaaaaaaagaaactcccatagccatttgggccaggagctttattccccgcgatctcaaagatggctttcttcacttcatcctctgtgtactcagcaagaagcatatcttcctgttctttagtcacaatcgttccctgccttattacactgccctgaaccggcttcctgctactcatattgctccctaaaagcttttggtaaaataccatgaatgcatcaatcacctgatcaggttttcccacccttactccttcaagatttgtaattgagagaacccgattctcagttcttctagcccgaagataggcatgaaaaaacccagaatttatgtctccctctttcaaccaattcaggttgcttttctgctgtaggaaagagtaataggtttcttgtgcctgtgcataaagatctcgggcatccttttcttgcttctgtaattctccatttagagggtcaacccgcaacttttcttgacaaaaatcaagattttccttcgctgaaatagcagatgcaggtacatcattaaagtgcttgctgttcaaggcatataatccctgctttaaacttctgagtttcaccacaacttggtacatcttcgtcccttttacctgccttacccaactatccgtcaccatctccttataagtaggatgctttggccacatcttgaaataatgaaatggccttttgtgtccactaggcaaattatagatagttagaatagcgggagagtgatcaaaaataccttcgttttgaaaataaacctcaaccgctggaaacaactccatccaaaattaattcgctaggactctgtcaatcatggaatagattctatcttccccatgctgcttgttactccaagtaaaaaagttctctgtatatttgacatcttccaatttgcaactttccacacacgcatgaaactcctttgcttctttatagtttgttctaaagccaattctctcttccttgtgaaggatctcattgaaatccccaagaaccaagcaagcctccttaatagccatctcctttaggtcttgccaaagaattcttctcccttcataagagttgaatccatagataaaggtgacaaagaaacttgcctttctctctatggattcaacaaagagacgaatcatttggctagtgcacttaaggatattgaccacagagctatccggcttccaacacactattattctacctcccttattccacgtattattcgatgtaaaataccacccttcaaacatacgaacatataaggctcctaaattccgaaccttaactcttgtctcgaggagaccaaccagccctatgtttttgttgatcaatcaattgcttgactgacatttgcttctgctggttgtttatcccccagacattctatgccattattttatccatctccaagagagggaactcccccctcccttcttaacaacctcttgctccatatccttcttctgacccatgtgatcaatctcctttccctttcctatctgttgcaatatctgaaacgagttactagttctcgtaggtactgatccctcttcttgattcttaatcttccaacctttagtaaccggcctgaagccttcagcatcagttttcacctcagccttgtccttgtttttcacatccttgactatccactcttgcttcctttccacattcttcctgcaatctgccgcaatatgtcccattccggatcaattactacacaccaatggcttccattcatacataattgctacaaagtagtacatccattctcatcttcaaattcaatcatactcgggtattcttgctttaaagagacttcaataacaccctagggaaacttaacttgtctctcattttagtagcatcatccaccattataagtttccctatttggccaatgatcttgaataaggacttctgcccccaatacttcaattctagatcatccaaatgcacccaaattgttaccattcgtatatcctccctcttgaaattcaccactggatcccatgctttcatcacaactggtctcttattaaagaaaatatagcctcccttgagtacttcatctctatcctctattgattgaaagctaatcagaaaaaccacatatgataccatgcctacccgttctaccttctctttccacattctcctagcaaatccttccaatacttgcaatggaggattagcccgaaggacataatatacaatggaaggcaaccagaattcaatttcctcatgaatatccgccttcgtgatcttaactctacttacattctcattcatagcaaacgatttctccaaattttttttgaacacagccagatcgcagaggagtgggattagaaatacctttcacctgcggagaagcacatcgagaagcctgcgctcccagcaatacaccaaaatctttcttgatgtcctcttgctgcctaatcgatcgaattgatgacctaggcgatagaggttctcgaaagagatcctgatattattcccattctgtttcaatcgcctctgaaaacgtcccttcatcttcatccaaaaatattattggctccacacgaagaacagcatccagagacttagttttcctcacatccgtggttgaagtcggacttttcttcttcttcttagtcgtagtgaattgcttcccctgaaccttggatctagttttagccatagcaaaggatagggaaaactatctctatcacttgagatttttaaataggatgtttgaggaggctccattgtctatcttagtttgggccactgtcttgttttctatctatacttccacgaccaaatgcgtcattgtgcaggaagtggaagtgaatagcatctattttagtaaaagttatagtgggttcccctacccatggtatttttggctttctctcctctatagccgaaactgtttctttttgctcgtcttctaaggctcgggcatactttctcgagctttgcccgaatctcccttggatttgggcccgaaataatgacttgtagatttccgtccactggttggggcattagtagtctctgattatcgtctgtttgggcggccctttggttctagtcgggcttgacctacttttgcaaatgtgagttattcttactgatcaagaattcaatttcctatttcaggttattgcactcgttagtgtcatggccataatctgcatgaaaacaatagaacgtgaacgtatctctcttacttatgtcattcttcataggagctggttttttgtactggatcatagacttggttgttgcgtaaattgtctctacgtcgtcaatcatgacagaaaagatagtaaactttgaggcactctttcgagggttgtgttcagcattttcagtgaactttcccttcttttcgttgccttgcctgccaccattatttgatctcttcccacttggatttgagctactaggatattgtgtgttttgagcaggtgcctctgccgaggagatatgttgctggcctttcttatgttcgactgtgtccacacaccaacctcctcgagcttaatgaatccatctgctcgatccaaaaattctgccatggaccctacggggtcaaaccttttaatgtctttccacagtaacccgagcggctcaatgcccccaatatggcaactagacttccctcctcaattaaccccttaacttttgtagcctttgtcctgaatctgcttatgtaggctcttaggggttctcttggcacctgttttagctcgatcaggtcttctagttgcgaggggagttgatgggaggaggagaactatgcgtgaaattctgaggagaaggcttttcacaaattaagccttcctggaggtagcttaaagtaccattctttggtggcctctgcaagtgtagcatggaatattttacatctcacatcacctcgtaccccctgcagacccatcttcatctcacaatatttaagatgtcataagtggtactctttcctcgtatacatcttctaggttgacatcttgaattttaggggtaattcaaggacattgatctttagggtgaatggtgatttgtgtgcccggtccagctcgagatcagtcacttttgggccggccagtccttgtatcatgtattttagttaatccaattgtgcttgcacaaatggatgaactggtttggcctgttgactgacctatgtcacattaggatctcttggatgtgggtcctggatgcggatgctaggttgggcagctggttggacgtcctgttcgtccagaccccttcttctgttcaagtcagccctgagatcgtgtgcaacacccaatctgttaaatattgaggtaccaggtcttctcagtttctaacttgtttggtcggcaggttggccgaaattttcaatatggatgaagttaataggtataactccacccaaagggcagtcagggaggatttgcccatctatcgtttcacccacaagttaaagctatggccgtggattggacggttgaccgttatgagtttgggcagtatgcctagtagcatagtcttctataatgctcagttggatattagatgcggtagcttattgttgtttagcgacatggtaggccctccttatcagtatggcggcctaccttgtgcgatcattgatggctgcttgctgacctttcaaagtttccatctccctatccctccactctataaactagcatccctacccgtcgaacacgaggtttgtagatgcacggatatcctcctgatcatgatgcaaagtgttattatgatcttgcatggcatgcaagtgatgcatatataattataatatcaacatgagatttcaaattataaatatatacctaatagaaatagaatgaagttaataaagagaaaaattctactaaaaaataaaacatataactaacaatgtaatgtatatattgctaaaaaaatgtgtcaacccttcatcatcagaaataatattttcagaagcattgaaagcaatacctttacttttctcggtcgggaaacttcgctcactctttttcttgatctgttgatttaactcaaaagttcttagagagcccatgagttcttcaactttcattttgccaaagtcttttgccttttcgattgcaagcaattttgtgtcaaacctctcaggaaccacacgaacaattttctgaaccaagacagattcacgtaatttttctcccaaggcaaaaaactcattagaaacatcacataacctttcataaatatcagacaaagtttcagtttctgacattctcaattcttcaaatctagtttgtagcatagtaaagcgtgatctttttgttgggttttgtgcccnnnnnnaaatccatttcaatataatcaaatttacttattaataaagatcagaaaagatcggaagagcg

SEQ ID NO: 113864 - DNA, 2797 bp, Cannabis sativa
  modified_base (1676)..(1679): a, c, t, g, unknown or other
atttagggcacaaaacccaaaactctctcccatgcttcaatgtcaatgagcatgacatcaactcttttcttcatgttaatcaaacaaagtaggtctttttaaaggtccaacgttctgaaaagtgatgtgtcttgatggaaggaccagagtataaaaatattcttgatgataaaggccccaataactcttggtcaaattctcaatgtacaaactgaatttacaaaagtggtagaatccttcctcttttagagtgtgacttctttttagatcacaaacgaagttgatttcatgaggagttggaacaaaccaattccttaagcagtaaaagatgaaggaggttgatagaattctttagccattaggatttatttggtaggggtaatctccaaagtaatccgcaatcaaaatgaaccataggtgtaaaggcaagtaagcacctacattcttatggaatcgagacaaagaactaaaacatggattttgggaaccgtttggacaaagcagtttaaggatttccaattagttatcaaatccttaaattgaactcaacaaaagaagaagaaaagagaattttttggaaaaataaagcaaaaaaaatcgaaaaaattttctatccaagaaattgaagaacactcaaagaactgatgaagataaaatcaatcaagctcacaaagtaataggcgtgaagcagtgaacaaagaattggagagaaattgaataagagctctcttatttatagtgatccaagtatttaagtcctaaagcaattatgagacttttgaatttaatgttcaaaaggaaaacataaattataagctaaagagaattatcttttctcttcttttttaaacatgattttcgaattccatattgaaaaaggaataggaattcaaaatttaaaagatacaacatgatacgaaccacaccaacgatcatggtgaaatttaacactacatatggtagccactaagaactcacgactttgggatgttgaatcgcaacccaatgcttagttaagcacaaatcttggtatgagaaagacgccacaaactgtggtggaattccgtttgataagtgagattgaatgccataaggaataccctggataagttcgaatagtctcttcaagaactcaggaagataacctctcaaatttttattcatcaaaatttgtctttccaaagagttttcaaggccttttacagccgaaattacattaaagaaaaaagacctttttgtcctcctaatgaaaaccctaacactcacaaatagaaagactttccaaataaaaaccaaagactaataaagaaaaacatgactaaaaaggaaagattctaaaatccaataaatatgatcaaaaatgttttcaagctcctaaattgagtctactctgatgagaggtacaaatctttattctccttcagtgttgactacagtcaccttctgttttagaactttatggacaaggttgtcaaggtcctctttgaatctatttgcttacgccctccggaccaactcaaacttgacttggatctttagtctaagtgtcctcatcattcccccccacttaagaaggatttgtcctcaaatcgtcacctacatataagggctcaaatcagaatcattaaaagttgcactaatattatactcaccaggtaaatcgagtcggtaggcannnncattgatcctttcaagcacttgaaactgaccatctcctcgaggaagcaatttggaacgtctttgggatgggaaccgttctttcctcatgtgtaaccataccgaatcccctcgctcaaaaacttgctgtgacgacccttgttagcttgcttaatgtattgctcggtccttctctctatgttgacttgtgccctctcttggatttgcttcacaaattttgccttctttttgccacctaaattcaaatgctcagaaacaggtaaaggtgataaatccaaaggagtcaatggattaaaaccataaacaatttcaaatggtgaaaatttagtggcaggttgcttgggacgactctaagaaaaatcaacatatggtatacaatcttcccgtcttaatatttttacttatgatagccctcaatgaggtggataaagttctattaactacttctgtttgaccatcagttgaggatgacaagtagtagaaaacaatagttttgttgcaagttttctccacaataagaacttagcatccctgtctgatacaatggtcctaggcagaccatgtaatctcacaatctcccttaaaacaaatttgcaacataagaagcatcattagttttatgaaaagggataaactgagccatcttagaaaatcggtctaccaccacaatgattgaatccgacccacacttacttctaggtaaacccaacacaaaatccatcaaaatatcaacccatggtgaactaggaataggtaggggtgtgtaaaggccatttggctgaaccctcaatttagcttgcctacaagtggcacatctaccacaaattcgctaaacatctcttttcatgtggggccaaagaagtgtttttgtaacacaactagggtcttagcaactccaaaatgtcccatcaaacctcctctgcgggattcccaaactaacaaatgtcgtaaagaataattaggcacacacaatctatgctccctaaacaaaaaaaccccatgcctataaaacttgccatcattagatttttcacaagtaccataaatctcccaaaatcatggtcaacaagatagagttgcttaatgtgttcaatgtttgattttatgccctaaataaaac

SEQ ID NO: 113865 - DNA, 4737 bp, Cannabis sativa
  modified_base (3948)..(3964): a, c, t, g, unknown or other
ataaaatattcatttatcagaatcaataatattattttatttccttaattagaaatattctaatatacttttctttatcctttcagttacatttgtcagagtatattctcattgttgttagagttttctcaccctttggtgaggtgtcattgttctagaaactttgtgtaatcaagccttattattaaaatgttgggcaccatctatctccaatcgacatgatccattttgggtcaagatcacccttatggctctgctatcgggtttatcccaaacggcctatttatcatgatcctcctcaccaaatctagcaaatgtcattttactaataacattttaatgttaacacatttttgtggctcttacaaaaataatgtccaatcgtccacgccatttcgttactttgtaaattccagtctttacccttaattagcatactggatgagggaaatcgtaaaatacaaaacttgaacatgctttaattaattaacatccaaccatgtccacaataacaaaattataattagttccaaagcaaaaacatgaaatgggtggatgctaaagcgatgttttagtaaagaatccaaccactgttggaaataacaaaataattgataattaattatgatgatatgtaaattaggatctcatgcggctatttaatcatttagataggtgtgaattaaatggctctgaaaacaaaagtgtttcttttatctctgtaaaggaagattgatactacaaatgagagcaggacccttgatatagcaaagccttgattaggcttaacagataagtagttagcctaagtgactaaaacaggtcctaaaaacaaaattataattacgtaacttaatttcattgcttaaacaataacatctctgtcttgctgcatacattataacttcactaattgacacaattacattatagatacctctataaatataaaccattaaggcgtacaaattaatcaagaaattaaaccccaactatgtagcctgtcctaccaagaaaattttttgctctgaacttataaagtgatagccctgaattagtttacaaggtacatatataattatatatatatatatatatatagattatgcagccggagcataatcataaccagtatcatcatcgtcatcgtcatctccatccatagatccctctgaaatgtatccatagctgacgttatgggcagtagtagtagcagtaaagtcacttacatgcttcttgctccacaatgagtcaacaaggtcaacaagcatcaccatcttcttaaagaggaagagagattaaagtaatagagagaagaaatgtgtgttttggtaagaagtagtagtgatgtaagatatggttatgtaatagcttaagttgttgagcattatatacaagaggaaaagactgttatatggtcccctgctatcaatatgtggtgtgctacttcgtggtgcctcgtagagagagtgtggctgattgtgtgtgttagtgacttaaaacatgcatatagcttagcagtagtagaatattcctttacacttggcattgctcatatatccgacggtgtctcttttatgggccaatttattctgatggggttgtaaagtagggatgccaggatgcataaggtaaggcactaagggcgtgtgtttacaacatgtagtgatgagaaatgaacatgtacttaattacgtggacatttttggcaacatttcatcgaacagtggggacattattatgactccattttggctctttttctttctctctctcaattgggccttcaacttttttgattgattcgatttgtatacaagtggaaaagtgacttcttattatttattctctaagctgcgatattgatcattgaaaaagttagccattattctcgtaaaatatagggtataataccattatgttttttttgttgaaggaattataccaatggttaattaattctactatttgacagaaatttaatagagtacttctcttgtaattaactctgtaataagctatggcctatgggattataaggcctatggtggacaatataaccatgagagctccaacctcgcccaccctctgaggctggtcagccctgccgtgcactttgtgcattaatgcccttgagatggatgtcattgtcattgttctcacattgaagattttcaaagaattaagccatctaaatatgaacccataacctctatagaaattactgattaagagtaagcactttgccactaaaccacttactcgctaatttaatatatcattataaataaatccaaacatgacacttcaaattaaccttggacataaagaatacaagtgaacataatactgcaggaaataggaaatcatatggtataataacggctgagaaatctctgaaatttttagtattgctattattactcacaaggagaattagactattagaggttgaatgtatttcagatacaaacgtatgtgattttagtcagtttttctgctaagtgctatccaattgtgagtagttactaaataattaacaggaatatacatagatggtgtgttagaaactttattttggcctaaattatctttttaatttgttttaaaacatattctttcattttataagcaccaaataacattttttttaatgagaagtaacacaacaaaaacagggacatcatctatgcatttcattttcatttgaaggataagaactatacgaagatgatcttatttttaaaggctttagtgagaagttcattatttcaactttgttacatataattttactaatttagttacgaatctgttgatcttgtgcggcccaaccttgagcagatccaacataggcttcattaagtggcattttatggaccaagggtgggttgggaacattattaccgggctcattatggacctccctaggattcgtaccaggattagtattgggagcatggttgtggtcaccaatatcattcccaacatgggtagggccgttggggtagctgccaccagtataaggtggacaattgttgtaaggacatggaagaggcccattgaaaggaggattagtaggagggttaggaggaagaggaggaaaagtgtctctacatggaggttcattagacacaggtgggcatggcccattaccacagttcccaaccccaggcccacaaccttctcccgtaacaggattacagttataaggcccattacatcccccatacccacagttaccaccaccattgccaccctggcccactccaattccaattccagttcctgaagatccaccgtatcctgatccggacccagacccgtatccggacccagacccatacccacttccgatacctgacccatatccagacccagaaccgtaccctcttccagtacctggcccagatccgtaccctcttccggtacccgagccagtaccagagccgtatccggtgccggtaccggagctggcgaccaaacccgagtggggaacaaggcccatcatcccccagtgagcatcgacatacactccctcagttctagtgaacgagggaaaatccggcggttgttgttgtggagtgtttataaggactctgtaagagtagctgaaactgcttaagcagaggaagatcgtaaggcctaacttgaaagcggccatgtttgatgagtatatggttaatgagtttggggtattcgtatatataataataaagacgtatatatatagaaaagagtgttttgggtttatttcttgtcgagtattcgggatatagtcatgcagtttgtgttgtaaacaaaatttaagattgaagagagctgaacgaaaccattggcatggttttctcactttcttttgcatttttcataggatcgttcccagcttttcttccctgcgatttgcatgcttatttatttatatattaaataatatatatatatatnnnnnnnnnnnnnnnnngagagagagagagagagatatttggcttttgctaaacatatttaatgttgtacatgtataagatttccgggttacaaaattattcgaactttcgtgaagatatacagccaaaccaggtttgagatttgtttaaagtgttttattatactagttaggagaggagaggtcactaaaagtcctttgagagaaaggagtttaagagaggaaccctttaaagtttaaactaaaaacattcatctactttaagaacaaataaatgattatatagatcatttcttttccttgcatgcaagagtgatcatcacttaaatttaaatatggtttaagttaaatgaacacaagtgaaagtattatataaatgagttttgaattatgtttacaatccttaccgaatatgcaatagcgcaacagtcaacaaacatttttcatttttcgtctattaacctttaaaccatacaatttgtttagccaaaaaaaagaaaaacaaacaaacatacaatttattgttcatgatgttacatgctaaaaccaaaattgacaaagatttttttttttaaatggaaattgataaagatttaaatattagtcaaatatttcatttactttgtgttgctctggactcgtgcaaaaatataacattaaatagtcctgttttatacaaaaactagaagattttgatttatcgttagccttctctgttagacttttatttgggcttacattaaattttattggttttattaaaacttgggttgattggatagttctttgct

SEQ ID NO: 113866 - DNA, 5985 bp, Cannabis sativa
aaaaagaaaatgacacaatacatatatcaataaagttggcaaagctattgttgagaatatgcaataaactaccttaacaccagcagccgtgcatgttttcaccgcatcgctgacaccaggacgacaaggatcctacatacagacaaggtattagattacataaacattcaaatttgaaggttagcacagaaatccaatcctagagctagagattgtacatttttttttattatgaaatctaatcaaacacaactttgtccatttcaaagatggagcaaaagcttgcatttgatatttaagtaaatttctcatatttaactctcattcaagcaatcacattgacctggttattgctgcaccattttcaaactcagtaatgatcacataccacaaacaatataactcttttcacataaattcaaaaataagaaacaaaagaagtgggtgcagttaaataaaaaactgggttttgtgcatacttttataccaacaatagcaagcaaggtaagttcctcttcaggcaaagtccaatgactcaaatcttcttcatctgaaggaacttggtccaactcgtaggacctgtatgcaatggcaacgcatcgcagactacttgccgccatgttatcaatagctgtcttgaaaaattcctgcaatcagaacatgaagagaaaattgatccaaaatgattggagacaaatttgagatgtacaaattgatttaattttgcattttgtttaatttccaattttgattccacaaaatatttgtaactgatctaataagtaataacacgtcaatcaaaataatcactgaactaccaaatatgatatattcattatgaactttaatttatggcaagtttgtgatttaaccttcttacacatttacactaacccaaaacgttctgacttaatatcctaattattgacctaatggagttctttccatagcttcgtaaacatatgttttttgttggtatccacaaattctgttgttccttttcaatttcacatatcaatacatccattttcatttataatatcaccattcctaaccttatcttcatcaatgggctgcacacaaccatttgcatcaagataccctgagcatgaggccaagactatctctgctgcccccttccaatgtatatgcacttttgagtccgcctacatgaaaataaaaacaactcaaggaatgttccaaagttgtgatatctgcataactcaacaaacaagtaaatcacgtacctgtttcaaagcaacaccccctcgctttttctctgagttgaaagggaaaacatggagaatggtagtctctgatctaattacgtcaaacttcatccccaactacaacacatatgtagtacattaaaatttgtcccaaaaagtaaacattttattttacaaatcagatacattttaaaaagagggtaccatcaatgcccaagtaaggatagccttttctgtaggagagccagtgacctctgcctcttcactaccctgtcaaaatgaaatgcagttaaagaaagtttcacataagacagaagaagtaactgataagcggtaaaacataaaactgccagcatccaacagttccaccgtagaagagtacaaatactttcatataagttgaatgatgagccacataaaacctcaattcattttcgacaagaaatttaagttatagtaactttgattacaaattctaagctttctctcaattttgaacaccccattcctttccttctactgttcctataatccaccacaactcaattgccacaagaatcaaatcgaaaatttgcctcccctcctaaaaagccctcaagtctctgaaattgtctttgcaagaacctacttataatgtcttgttattaagcttgttggtctaaagtctttttcacaccattaactactactcaaaccatacacctgtggaaaccaccacgaacctatccgttctacttctgtacaaattgagatagtgtatatatacctactatactaattgatgtaagtaaacagcataattagagaaactaaagcctagagaagataatatagattcatatataaacaaatgagaaacaatgttttctttccctaggtagaaaagaaacttaaaaatttcatttatgtattgataatttgttataatacaataatatatcttcctatacatgtcttccaacataaaaatgggatatgggtaaaattgtcaagttgagaaaaaggagaggcttaccttgggcacaaaaacatttcctgttgaattctgtgctataccctcaatcagtattgcagaagtaattgatgacaactgtgaaggctcatatggtggagtcatcttctttttgccaacatatgcctcaacgacggtcatctaatgtagtaatgttttttgtgttagtgtataaagacagtactctttacagtataattctaaatgattgaaatgctttagttactactcaaaaacctttgtaaaaagcctaaaaaaataaccttccatcaagagcaaatatttaattttgaatataggtacttcacctgatttaaagttagtgttccagtcttatcactacaaatcgttgttgcagagcccattgtctcacacgcagacagccttcgcacctgtacacatttataatcatctattaaaaattggttatgaaaaattacgaaagatacaagtgcgacaaggggaaaatctaaaactgaaaaaaattgttcaaagtaaataagcaaagataataaaatgtaaagtaatacttgccaatgctttatctgccatcattttcctcattgagtaggctagactgtcatagaacgatacagacaaatttgatgaaataagtaatcacaaattcaattaatacactagaataagaagtaagcaccctaatactttgttgcattgaaaccaaaaggcttgcacttacgtcaaagtaactgccaaagggagtccttctggtactgcaacaaccacaattgtgacctgaatggttttaacattaggtaataaaaagtaaccaaataaaaaaatttaagaaacaccaagatatctctcttactgcgattgtaaaaattttgatgactccatctatagcattactaatactagttttgcccttgatgaactgaacggttccatctggatcttttgtatttccagtgaagtatctaagcatccaaaacaatttattatcgataaataattatagaagaactgaataagaaggtaagaacattcagttgcaaaggcctaccttcccaagagaacagcaagcacaagaagagccactgagagcccaactatacctataaaagttgcaactccattcaagcgcacctatcgcataccaaaagttaatatgtgaacatttaagcaacatcaaccactatataagcaacaacaattaagtagaagaattaaacctggagaggtgtttcttcaccagtatcttctgatatacttgccattaataatccccattcagtattaattccaacaccagttacctacagagagctaaagaaaggtcaaacttcatgatggttttagtaaaaattgttatatagcaacgaagaaaatctagagagtaaaactaaaatatgagatgaggacgtgttacactagtcgctagggatctgtaacccacagtttacacaaaaagcacaacggtatgaataataaatatgagatagcaaagaaaaagataatctaactgtaaggcaatgaacaactagtatatatataaacaaattactttaccagcatagtaccaacaccatcagctactttgcaaccagacattaggaagggtgatttctgatccttgtgaacctgcaaaacattggatttataagaccaataaataaaatatgattcgatgataaaaaattctaagaggtgtaaaagctcacaattttgctttcgccagtcatgcttgattcatcaatggcaagagaatgaccagtaattaagattccatcagcaggaacctaagcagcataagaatattggattgatcaatacataaataaaatgaggcaattgaacagatagaacaattaggaaatttacctgatcacctattttaagaggtataacatcaccaacaacaatatcaaatatcgatatctttaccattcttccacccctcataacctgtcaaaattttcaaagggcacatactcagcatcaccacttatttctggtgaaaaaatcacaagatgtaatatttcatacctccaactgtatgttttgcttctcctcatttaaattctgaaattgaagtgattgtctataatcacttacagctgtaaaaacaagaaataaaaaacaaagttaaaagatcataaaaaataatgtactgtcatggaaaaaaaacaaaacccaaatcgcatacaaactcaaaatatagcaaagtataatggcagttttctacaagcacaaactcttatatggacatgatgtactgaaaagcatcagagaggtttatcatttacctgtcacaaatataacaagaagaacagcaaaggtaatgcttcccccatcataccatccttcctcaagaccctgaggaatatcagagagaaaatagaaacagaaaccaactttgaggactgaagagtgatagatgaaaattaaacaaagcgaatagagaaacccaaaaaaacaggaggaaagttaaacaaagcgaacagagaatacccaaaaaacaggtgctcaaaaggccttgatgcaccacaatatttacattgacctatcgttgaggccactcacatctagagagaaaattatactttacatagtaagctttgtaatcttaacataaaggtgactttttccccctaaaatactttccttttctaagccttacattactcggtaggtctatcaaattgctaggatgtccatggctggaatcaaaccacaagggagcaaatcatgggttgaccattagacataactcttgtagtactaggttttataaactcaaccttccatatatcaaaaagtcttgtttgaggaaatacctaaaaatacatagatcaacattaaaggacttacctcagtttttattccaagtaccaatgacacaactgcagctatgattaaaattatgagggttaaatcttgccaagcttcccaaaggaacctctgcaaggacaaagcatgagatttaatagcatccatggaaaattattttttagtaaaataaacgttttacagcagaaatacacctaataaagaagataaataccaagaaactccgcccctttttacgaggatatgtatttgatccaaatgcattccttcgcttgaacaaatcattctcatccccatcaattcccttctcaagatttgtttttaacataggtgataagcccttaacctggtgattatcatccatgagcacaaaaaaatatatgtacatacgaaaaaacaagactcccaataactaacccctccatattgttgtaaagcagaaacgttgtgatccctagtcaacgtagcaagttgttctagtccaattgcatagtcaccagttggagatgggggagcaacagttgggcccagtactagaaggtaaaaattaaaacgatagaataaacatcacttttcttcaaagtaaacataaaatttcatttaaaagaaacatgatattgaacgaagatcaagctgaccataaatttcttattctataaaaatccaaaatcctagataaagaataaactttatttcttactatttctctatactaaatggtatcagagctcaaaatctatactaaatttcttattctataaactccaaaatcctagataaagaataaacttttatttcttcctatttctctatactaaatggaatcagatctcaaaatttatcacagactaaacgttgttgggcacgaagcgaccatacaataactccaagatatgaactctttgttccatccctaggcataatgataag

SEQ ID NO: 113867 - DNA, 1127 bp, Cannabis sativa
attatatgtcctgtaaattgttgcatatgaactggggagttgataaggttaatttctaattgaggcgtacagctacatgatcgataatgcatgtcaagaaaaaattctacttctcagattcttactaaaaattattagtttgttatagaattaccaactctcctttgtgtagttttgggttaatatcctttcattgattcagagtttagctatagtttcagcaatttcattactgaactgtcttgttcaatatacagaggaataaattcattctagatgcctgcctgtgagttaccaatagttaatatatatatatatatatatatatatatatattgtcttgactgtgcagattcaagatgaaggccgctccaaagttaggaaagccctgacaccatctacagcacagttagcattacaaagaattattccttttccttgcaagaagcagtatacagccgtgattttaatgccccagaaatctcgtctccgacaaataacatcatttttccaatctcagcagatcactcgtggaagagatgctaaggtcagttacacttgtgatagccacgccaatcatacaattgaaaattaatggtatatctttaagtctttagttcatttattgaattgtttaattttattggttatggcagatattagcgggtcttgctggtcttacccttttggcatttagcttgtggagatgcatacgaacacagaaataatcttagcttcttcgccgagttccatctacttatgaaagtactaagattaacagcacatattaggatcaaattttactacactaaggtttggataggagggaaaaaaatgtagaagagaaagtaattattttcgttggagtagtattacttttacatttgacattgtagccatttgctgaattgtattatttggctatgtgatattgtgatgctagttgacttgacgaggaattctctcaactcatatgccaatagcccttcaaacaggccaaatggctcaatttgctttcatgttttttgaacaagctcaatctactttcattattggtatatatttcagatttaatattttacatcatattcctttgggattatttcacaaatacaaaaaaaaaaaaa

SEQ ID NO: 113868 - DNA, 2940 bp, Cannabis sativa
aatcttagtggccaaacaccaatgaatgccttctagtaaagcttgagcttcagcgaaaagggggataaaagcacctcatctgggaatagaaaaccctgcaaagtggttttgtttactgtcaagtaaggtagcacccatccccgttttaaggttcttcaggtccaaagcagcatcaacttgtagagtgtattgtccaatctaaagggagtgagttgaaggatcctgttgactgtgtaaggtcaatgtttgaggagttgaaaccaaatggtctgactgagggggtgtagcttgggctgcctaatagtcccgcagtaaagaaaaaatgaaatcttcctccttaatgggagtgttaatgtttcggttgaaaagagcattatttcttttattctaaatctgccaaattaagctaatgaacaaagtaaaagtttctttgttaaaaatcattaaaacctctcatgtaaaactctttgatatcacagttatagttcttaagatagaaatttgcaaaagagaaatatttccacacagacttagctctgggacaatggatgagagaatgagagattgactcaatttgattgtggcaaaaaggacagaaaggagaaggcacaacctgtttttgaaagagatttaagttggaagggagaatgtggttaaaggctttccaagtaaaatgttttatcttaggaagagttttggtgttccagatagtttttcaccattgtttgaagcaatcattgtcattagagttggtcaagtgataaaccgagttgacggtgaagcatccaaagggtgatgaccccaaataagaatgtcattagaaactgggttaatggggattttcaaaatttcatgaacttaataagagggcatgaggtgttggagcttggagagatcccaacaaccatctttatcaatgaaatatgagacactttgatccgtgggtcaaaattattcaagaaagatagcgaatgaaggctaggaacccatatagaatcaaggagagaaatggactaccattaccaacttttcaaactaggccctctttgagaagctctgtgccccaaagaagactttttcaggtgttcgaggggcaatggcccttagtagcagtaaagaaatcactgtttttgaaatacatggctttaaggagagtgtaaagaagtgattaagggttggaccagattctccaagcttgagcttgattatgactttaaagagatctaaaaccaagaccaccatggaatttggatgtgcataacaaagaccactttttccaatgaattttacccttgttagtgcaggaaccccaccagaacttagagatggctttttgaatagtgaggcaggttgaagtgagcagtttgaagcaggacatagcataggatggtatggactggaccacaactttgatgagagtttctttgccaactctagagaacttttttccattccagatgtttaattttgaggccactttttgtaccaagtaatggaaattagagttggaaattttgccagtgcgatggggaacaccgagatatttacttatgaaaccttcactaccaagaccaagagatgttctaaagtgatcctgagaatcatgaggggtgttgggggagaacatgattgaaaatttagcgaggttgaaagtttgaccagtggctttgtggtaagaacataacatttccttaatggcagtactggaagcataggtagcaggagtgaaaagaatactgtcatcagcaaagagaatatgagagatgatgggagcatctctacagatttttaggccagtaaattgatgaacttgctccttagctctaatagtagcagagagaccctcgacaactaggagaaataggtaaggtgggtaaggtgacatgggatccccttgttttatacctctagtaggagtaatatttgtggaaaggatgccattgaccgatattcgataaaccacagttgaaagacatttcataaccagggaggtgaaagaggaagggaaaccaacatgttgtagaatagctttgacaaaactccactcaactttgtcaaaagctttctccatgtccagtttaatagttgcccagccctgtttgccagcttttctatagtgaatagatttgataatctcattgacgataaagatgttgtctaaaatcaggcgatccgagaggaaagcacactggttttgagaaatgattgagtgaaggaccattttcatcttattagctagggttttggatataatataaagtgttgaacaaaggctaataggtttatagtctcggattgtggaagcatttttttctttaggattaaggccaaaatggtatcattgatttgggaaaaatcagagtgatgattcagaacatctaagatggtactggtaaggtctttaccaagagtattctgattttttttttggtaaaagtgtgcgttaagtgcccattcgaaccatgggctttgtcaccagagagattaaacaaggcatgctagacctcatcctcggtgtaaggcctttcaagggcagagtaaaggtggggatggatacggttagagatgcccttaagggttagggcaatcgcattatggtcctcaccttgagtggtgtaaagctgggtatagaaatcaacaaaatgaggaagaagggaggaaatgccacttgccacagagccatcagcaagggtaatggatcttataagattattctttttcatagcagtggctttatgatgaaaaaatttggcagatttgagccaattgaccctagacctttgtttccagtaaatttcctttttatgcagaagattgtccaattttgattgaaaagttttagcttgggtaatgtccctaactgtgggattattggaatgaagaatttggacaaggtccttgggcaatgtgtattttatttagggtaaatggcggtaaaac

SEQ ID NO: 113869 - DNA, 5328 bp, Cannabis sativa
aaaaaaaaaaattctataaataaaataaaatagggttaatataattttgaaatttctattttgctaaacaacaaagtaaattttgtattttcgaaatagcataaatagaattttaatttaaattttcaaccatcttttttaatataatcaacttgaaaataatttttaacacgaacagactcaataaacgtaaccagttttatcatagcatctctaaatcgagttattattaaattttattttaataaaaaattaattcaaagtattatttattaatattttaaaaaatacagggtctaattttttattaactaaaacaaaaactcaattaataattagctttattctctatattttcggggtcggttttgtctcttgtgctcacaataaaaattttgcagctcatggtttgggaaaatatgctcttcggttagacgatgagctatcctggttcgaggaagttccagtactgattgtaatttgctgtattattaatcatgtgtaattctattcaccgcataaaaaaaaattgtattcccttaatcaaatattaaaaattctatcaaaccactaaaaaaaaaatatctttttttgtctaataaataataaataaaagaattaaattggtgactcccacaaatcaaaagtcagtggcttaaatcctagaacagtaaagccagacagaccaattccatcaatacaaaaacctcccaaaacttcatttcactcagattttcaaacccttaaaaccagaggaagaagaaggagaagaagaagaagaagaagaagaagaggaggaggaggaggaagaagaagtagtagtagaagaagaagatgcagattttcgtgaagaccctcactggtaagaccatcactctcgaggttgagagtagcgacaccatcgacaatgtcaaggccaagatccaggtacccttttgcttcattatttaatttatatacatatttatctcgaaaagggtatttcgattgctgggtatttcttgttttcgcgtttttatattgtacaaagttgagagatttatgcagttcgtagtattgggtacttttgtttttgattataatcggttgttggcttagggttttattgattctatgccgttttcgtttgtttatcgttctttctttttccattgattttgagaccccttttctattttattcatttatctgataaaaataaaattacttgactttggttatattttctgggttgttgttggtctctttatgtatgaattttcttggtttgtttggattattctggctagcatttttcttggtttgttgcttgtatacaatatatattatttggtgtagtgactatggtccctttatgtgtgcatgtatagtatttttcgtgtggagtcttcttttgggttggtgattaataaaatttaaggggtttataaggggtgggctgtagtagctagtgaatttgtggtttcagtgtaattgtaatttggactaggctgttatatagattagttggtttattgattaatgtcactttatgtgtatgtatataatgattattgatgattttttcctttagggagagttgggaattagtaagatggaagggaatgataaggggtagctgcaatgtgtattcttttggttcagtagttattttgaggatttgttttcggtttggggttaatgtggtttaagagagtgtcactttttgttagctcaagtggttgggcgtgtgagcttgagttggagggggaaggggttctactcatttgtaccgaaaaaaatgagtggagtaaggctaactgtggatttttggtttcagggtaatggtgggttcggctgtaatatttagtgtttctgttcctttatacgaatatggtatgaaaattggggatgctggtattaagggtaaggctgtaactagtgaatttgtggtttcaggataaggaaggcatccctcctgatcagcagagattgattttcgccggaaagcagttggaggatggaagaactcttgcggattataacatccaaaaggagtcaactcttcatcttgttttgaggctcaggggaggaactatgattaaggtgaagactctcactgggaaagaaatcgagattgatattgagccaactgacaccattgataggatcaaagaaagggttgaggaaaaagaaggaatcccacctgtgcaacagaggtatgcactcagtattacactgaaataaaaataataagtttcaagcatatgaatacctttagtttgaattattattctcagaaatatcatagcatatcatacagttgaaacttaatttgtagtctccaatccagtgccttttttttttccgacaaactgatttaacagtgcaattttgatctagttttaccatgtctgctgtgttatctaatgtgggtgaaagggtttatggctttacagcccttaatttgttcttggagtttaaagcattgcttctgctcagttttaacagaatacattagaatattagttattgtttaaagtaatatcaaaatcattttacaaaaaatgacataaaaggtctagtttcattactcttccattattatagctggatattctaactccatactccatttggatatggctgagcaattttgaatccttgacatagtacttacaacttcacatggtgttatattttcattaagatgaactgtgattctcttgttcttctataattagaaatattcacattgagtttacgatcggttgcaggcttatctacgcgggtaaacagctcgcagatgacaaaaccgcgaaggactacaacatcgagggaggctcggtccttcatctggtgcttgcactgaggggtggtaactaatttctgtatgcaaaccaatttcattggggggatttgatttggtattggttcttgataaatatagagttgcatatgttatgtggataaaaccaaaacacaaaacagagaacctatcataagttggtcactgtgaacaatttattctgctactacatcttctggttcctttacttgatttgatttgctgagttcttaagatgataatgttttggaaaatgattttttttttccttcaaaaaaagagctttaatgaaattgtctatctctctttattgtggatattatcttttatggctcgtttggtacaccgtatacggttgtcttaaattttaaaatataccaaaaatattattaaattttaattattatataatattatattaaattttaatttatactaaagaggagtgctaattataactttctattagaacttcttaattaatctctacatccgaaattacataacggaatacttttttaattttttttatggtggtgtttattatgtttacaatattattcctgtaaatttttgaaatattttggatagttcacggtgtcgaaaacagagttctttatatctcagtttaccaggcgcattcaaaaaatatttaaatgtattttaaaaaaatttatagggatgttgtaagcataactaatactgtcatgaaaaaaaaaaaattaaaaatatttcggtaggtatttttgggcacgggggttgactacaagattgtaataagaggttgacagcaacactcttatatactaaaatattatatatttcatgcttataaaagttaataccacatgtaaaatgtaatataatgtaccaaagaacctttactacaaaaccatgcttcatggatattttttttttcaagaaatctggttattgcatcaatctattgaaaggtcaaaactttgtttttggttttttcacaattttaattgacaagagcttgtataaccctacccacttgctatgtatctctgtctataaactttctttttcttatgtcatgtttggttgtagaggaaggaatctaaggaatccatttccattcaattcttaatacagttataattataaaatattgactattccttgcaaaaatttaaagagatactctttcaatacacaactttagtaaggagtccatcaaagcaattgctaccacattggaagtaggttccctaaaccgaaacgatggtcttatagtaacgtgaccatttcatctgcccgtaccaaattgtaagcgatcgtaatagatcatcacttgcttctagcctacctcataagcataacacagtcacttaaatcgcctcgtcttctaaacacaacaaatctcgttgtcaccgccatgcaactgtcgtgcgactcctcacttgtctagttttttggtgtccttaggctatggatatgtttggttaggaatgttaataatcattactatttcaatactattcattgtaccaaaaattattaaaattttactatttcacttctcattttcccattatctttgttcctgtccaaggatggaatttttttgctctctctgatttgatttagtcctgagattaaatcagtgttgttggtgtttttttttcttgatatagattattgattggcaatttgtacttagttttaaccactctttttttctcttgttttgactctaatttgctttaactaatattaattaaaaaggtctttaagccgcccaaatccttaattaatatcagtcttcaatcttaatttgccttgctacaatttttcttcattatctctctcttttttcttcttcattctctaatgaaattctattagttatatgtaaccaaatatttacatcattcactataccatacttaaacttgatagtcaagcttgatggcaataactttagtttatttcttagagaatatttctataagatccaagatacctttctaagctcctctttggagaatccaaacatttcttatcaaatacatttgtatataaataactatctctcgagcacaagtttatgatcagccttaataggaaaataaaatagagcacctaataacgtatcttaataaaacaagaactacaagatcaccctctttttgttctggagtgacaaatgaattgtactattcgagcttatattttcatactctttttttttttttggaaaatatagtctctaacaccttattacatatatcatcaaacctcacatgtttcgtgtcatacaaataatttattaaattgcatcaaggatcaatcatgggcacaagaggacctaggcctatatcttaggttctcactttggctctctttggtaggaatgagggagagtagaatagatggagagttaataaagaatgaaatgatgcaatgatagattattatttatggaaaattttatttacaccctaaaattttctaaagacaccctattttaataa

SEQ ID NO: 113870 - DNA, 2772 bp, Cannabis sativa
accttgttgatataggtagtaccaatcaatctatttaagtactcttcaactatgcagtctcatagctacacagtctcagaatcatcacacttaactttccccagagtgagattgcacaacttacccaatattttttcttataaatcacggaacaactgactgtcatagtacacaatcataaaaaaaaaataaactatttttttttcttaacgtcaaaacacaatgtgtaccaaaacaacccttataagagtatagaagaggttggttttactaactggttagatctaatttctaaaagagcactcttgctcatggtggccaagctcataattacattgagatcttatgtggtaatatcacaaaatattatatcctattgatataattaaataataaattttacacaattaaatttaataattattataaaaaatccttaattaccataaaattatagtagtgcacatttttatgcactagtgtagtgaaagggcatgcattagactagtgtatgtaatgcctattcacctcaatataatccaaaattatatttgtaagaaagacataaaaagttaagctgtcatttcaatctaagagatgaaaagacaagaaacataaataggtaatttgattgaagtgtttgaatccaaatccaaccataaactgagaaagaaaaaagagttacagagtgtttatgtaatgtaatgtaatgtttatgtttctttttctcattacattgagatgtttttgatgatgatagatgaattgaaagatccttgtgagagtttttaaaaaagactgactattcaggccccatcccatcaccctctgacaaattgttcttctcttttattaaactctcatttctctctatccaatgcaaactaaaaactgtcacattcatcacaaaataaaaaatgtattgaaaaaacaataggcgacaaaatttatgaatcataacaattcagccatagttactgacacaactactcaatggcccttttttttttctttcttttagattaataagtagaagagcttttggaattaagtcccatttgttttctaacttgttttctctctctaatggcttctctgtcatttttccttgttgggttcttagttttggctagtgaagtgagttgttcattagatgggtttgaaatggagatggaaaaggatgagcttttgggtctttttgatgtaatggaagctcttttagatgattctaattgggccaaagatcatcctcaaccatgtagtgaaactccatggccaggtgttcaatgtgagattggtcaagtttctcctttctattttcatgtcactaagattcatattggttctgatattctcaacccaccttgtaaaatctctgctacaatatcacattctttgctcaagctaacttacctaaagacattctcaatcttcaactgtttcacaactcatccaatatcactttctccatctctttttggctcattatcttcattggaacacttggttcttgagtcaaatccatctctttatggtaaaattcctttaaccatagctaaacttggtaacctaagagtcttaactctgtctcaaaacaaccttgtgggaaatataccaagagagattggtgaaatggtcatgttggagcaacttgatttgagttacaacaatttaagtggtgaaataccagaagaaattggtgatatggaaaatttgaccattttggatttgagttggaacactcttgagggtcaacttccttctacattgggtcaacttcaacttctccaaaaggttgactttgggtcaaacaaacttgtgggaaaaattccacctcatcttggtttggccaagagtttagtactccttgatttgagtaacaatttactcactggctcaatccctgaaaccctttcaggtttggaacatttagagtacttaatatttgatcacaacccttttaatgctatgataccaaattttgtatgtcaactcaaaaaactccaaacaatgagtttctcaggctgtggattgataggctcattgcccaatttctcaactcctttaaaacacctctcatctctttctttagacaacaatagtctcactgggaaaatcccttcaaacttagtgtcattaccaagtttagatcacttgaatttgagtaataataagctgagtggagaggtattacttcctcaaagtttcattgaaaggcttgggaaaaggttggatataagaggaaataatggcttgtgcaccagcaatcaactaaaccagaagaaggtatctatgtatttagatgcacctgtttgtttaaattcaagtagtgagcctaaaagtgatgaaagtttggcttggactcatcatcatcatcatcataatcaggcaaatgagccagttgagaataggcttaaggagacatcagatgcttcattgttctgttcaaatatcatttgtttattacttgtgtttttcttctcattgtttatattttgaatgatcttgtatttttttttcctttgttgttaataattaatatatatatatatatacataattttgtattatattagactccatttaaggtcattttgtgcatttgagaaactaaactcgggttctctattagatttggttatttagatatacaacttatgacaatttaattctagttaattagtaattttttctcttaattttaacatgtacaaaatcgtacccctgaacttttttggctgttaaaaattcccccgaactattgagattgtt

SEQ ID NO: 113871 - DNA, 1839 bp, Cannabis sativa
  modified_base (1795)..(1795): a, c, t, g, unknown or other
tatatatatatatataaatgccatattgccattttttaaagggatcatatgtaaatgcatgattttttcttttattttacattaggtaatgggcttaggctaggtaacaagatatttgtaaaaaaaaattaacctgatttatatttagatttaatatttttgttaatatataaattaatatagtttatatttgtatctatatacttgattagattatttttagttttattaatataacttatatttatatatatatatggaacacttcttaatgagtattatttagatatggttactaaacaaatttatgtacatataattaattattttgcattacaaagataaatacaaatttaaaattataagtatatattttagtcagtttttgtaattttatggcaaacactaataaataacgatctaaaagttagttaagttacttacatcatcaatatatgagattaatatttttgaaaataaagattgaaatttattattgaagaagcaaaacaaagaaaaagttaatatatcttcatctttaatgtgatatttttaaataattaaacaatttaaattatgaaatatgtaataaatattttaaataatatttttattttaaatcatattaaaaaaatcaagattaccaaatatacaagaatttcagtttatactctattatgaagaagcaaaacaaaaaaaaaaattgctaattatttgtcttaaattataaattacatatagctaatattttatgaattagaataataacaatctaatatgtttaaataattaaacatcttatttaaaaaaaaaaaaaaaacttatagaatatgtaaaataatattatatgtaaatatataatgaaacttataataaagatcatatcttccatttgccgcctaatatatattatatataaatcaatttcaaactatttttatgtatgattcaaacgtttcaacttattataccgttggttgtttttttttttctttgttaaacagtgcaaaatattatatatatatatatatatacacgtttttgggagtcttataatactcatttatcacatgcatacatatatattttcttagagaaattaagacggtcacatgaaaatgtggcatatatattatcatatatcaaatataaccaaacttatccaccaccaccatagcttatatatgttttttcttccattattgagaggcaatcgttgcaagaacatgttcaacttcctaccttcttaaattaattacgtagcacatgcatgcatattatattatatatgatagtcatcatctatattgatatgtcaaaatctctccaatcagccaaaatttcacgtgtagttatagtgctacattctacataagtatatatatggacaaaacttatttaccttttttgccctcatcataactgtaattgtatacacccatatgcccatgatataaatgtgatcaaattaacgatttgaggctagttcaagtggctataggtaggtgtgtgttggaagttttaggttcgagtctcaagtaaaatatggttgtaatatataaacgcttaaataaaaaaaataatgtgatcaaattacatgcataaggctcatcactttttaattttcaaaagatgaagaagaagctcaacaaaaaatgtgtcttgaaatataattttaaaaaattattaaaactgcgcaaaatgtaaatcaattccctggtataaaatttatacactacaaaaaattattacttttagtgataactttttagttacaacataaattttttgtgantaaatgtgatttttagtcacaacttacttgtgactaaaacatag

SEQ ID NO: 113872 - DNA, 2384 bp, Cannabis sativa
caaaatgtagcctaacccttgttttgaggcgtcacaataaatcacaaatttctcatcactgatcaacaaagtcaataccggtgcagtaatcaatctctggtccaactcctggaagttactttcacacttttcagtccaaacaaacttacaggtgtttcgggttaattccgttatgggtgtagaaatcttggcaaatcctactaacccagggaagcatctaacttcaatagcagatttaggttgtggccaatcctgaactacttcaatcttcattagatccactaaaattccatctttattcacaacatgccctaagaaacttacttggagcaaccagatttcacatttcttaaagttagcataaagttcatgttcccaaagatgttgtaacaccatctgaagatgtctctcgtgcaattcctcagaattagagtagatcaaaatgtcattgatgaaaataatcatgaagtcatccagaaaggctttgaacactcagttcgttaggtccataaatgtcgctggagcatggtcaattcaaagaatatcacaaggaattcatagtgcccatactgggtacaaaaagttgtcttgggaatatcctcctcccaaatcctcaactggtaataaccagattaaagatcgatcttagagaagatggtctttccctatatttgatcaaacagatcatttatccttgccaaaggatacttgttcttcactatcaatttattcaactcctgatagtcaatacacatccttagtgttctgtccttcttctttacgaacaaaactggtacatcccaagttgaaatactcggcctagtaaactacaaatcaaacatgccctacaactaaatcttcagttcttttaattatgtcgatgccatctgatacaggaccttggaaataggctttgccctcggtatcaatttaatcttgaaatcaatctcccgctttggcagcaacccaagtaactcttttggaaaaagatccaaaaattctcgtaccactgggatgtgttcaggtcctattggtagctttctagtggtatccaccacactggctaaatagctgatacatccatcccacaataaatctcttttcttgagcatcgagatcattggaatttaggatccttgaacccttcctacaaacacaaatgggtcctcactctcgggttcaaatattaccatctttcttttataatcaatggttgcattatatgttgctagctagttcattcccaatattacatcaaaatcttctaagtctaattcaattagattaaccgatagttctctaccttccacatacattagaagggacataacctacctgctatagataacaaactccctagtagacataaagtaccaaaaccatctagtagaacaccattaggcttatttaagcaaccaatcactttactcgacacataggaatgctaacaccaaaatcaaataaaactgacaacataataccatcgatagaaatttgacctatcacggtagaaggaccagcattgacctctacttgggtcaaagaaaatacccaagcaaaaactaaagcatcctctttcttttgttctggtcttagtaactgcagacattttctctttagatggcctactaccccacactgtaagtaggctcaagcttgacattcaccctaatggcgtctcttgcaccctgggcactcagaatagtttctccaattctcatttccaccttagcaaaaaccctgattaccttgaaatttcttattaggaccctaactgacattggtagacgatctccacgaatatcttctcatattactcctttttgggtctgatcttctgcaccctcatagtaagggctaactcaaccacctcaacataagttcgaacaaaccctgattgtttagcagctacaatcacatcacgagtaatatgttcttcccctgaataaacttggcctttctagcagccttagtggccacttcgtcagaggcaaacttttcaaccagttaaacttggtggcatactctgtcaccatcatactaccctgagtcagtcgtatgaactcttttgcgttagcagcaaggatagattcattatattacttttcatacaacaaggtccgtaatgtatcaaagctaatgttattctaaacatgaccctgtgatacagttttccaccaaatgcaagcatcctcttgcaacatgaatatagcacacccaaccgaatcgttacctttgactcacataaagttaaagagagacgttatcatgcacatccattgttcagccttaagtgggtcagcaccaccctcgaacactggccgattctactttttgaactgttcatataatggctccaaatgatttcccacatcttgtggcac

SEQ ID NO: 113873 - DNA, 2309 bp, Cannabis sativa
aaaaatgtaaaagttaaaaaagtttaaaaaaccgtgtaaggataaaaatgtaaaaaaggtgtcaattttgacatgaggtgtaaaaatctctattttataattgagttgtatatatatattttgatttattttttattataataataaaatctttaacaaatagtgattagtggccggataccccgctaatagtctttagcagtgataattgaggttattagcggtaaacccctccgatgctagtgatgttgaatattgtagtgataatgaaatcaaaatccccattactatttttgcttcatttttgttgttgtgatggaattacaatgtaatgcctatcatattagatgttgtaaatttgtaattgtcatgtaatctatagtgtttgcttttaataaattaatacattttaactaaaaagtaattattatataaaataaaacaaaataactttaatacccttgcataactaatttataccaaattaacagtacactttttattacatcacactctattacagcaaatcaaacacaataatacaaataattcaaattacaatattcattcctaaataacaaacttataaacatattgtaatcaattcttattactattattattaccatttcatacaccacattaagtgcgtgtgtgtagatatacataacttgacacatttaatatggtgacacttttgttgcagaaattaatagttgatttattattcttagagctataacgtttaggtgatgataaatcactataatcactaaagcctatacatatcacatgattattcttgaaagttggaaaacgcatacatatttacgtgaaatttattgacattccttttgtatggtccatgcatgcatatatgtttttatatatttatataatattatatgcaaactacaaaatatattgtacaaactaatatatttatattcagaaaaacggtgcaatttcatggtcttaaatggtgacatgcatgaacacaaaattggggaagcatgttgctctatgtagctccatatagctatggtacttgtacatataaatatatatagctgtatatatatatagacctttttcaaaaactttacatggaaactggaatgtgtatcttctccaaaagtttcatgattatataattgcactgataggcatgtgtattcaaggatcatggattgttgggaagacatcatataatatatataatattattaattgttttcgaagttgtaataatcaaaaaaagtctctgtattaaataaaattgtactattaattaatattttactaaatctatgcaaatgtattttgatgggaaaaagaaaggaaatgagtatgggaaagccctaggcatgatgcaataagagcctatattttgggaagttcactaaagaatattattgtatatgtattaataaaaattatagtgcgtacgtatagtagtacttcaatatattatatatatatatataaatatatatatacttttttatttgcttaatggaatggtgttgttctagggcattgttttgttttgccatatttggtaagagagagtggatatcgatgtttttttggggcatgacaaagaaaaaaatggcatgcatgtgaatgaaactttcaattaattataatttcattttttttttttatatatattgagatatggatcaatggtgaataatggtgatgggaaaagagagatcatattttcatattcgtcttcatcatcatcatttaggctatagggtgttccatcatgaatactatatatacattaattaattcaataatttattattgttggtacgtatatatttattggaaattcaatttataaacccatatagttgtacttctttctgaaaataattcatgtaaaattaacttagtcaatttgcaaacgtaaactgaagtactgaaattatatggtcggtttgttttcttggtttggtgaaattaatatatgtatgcctataaaatgaatttacttatagttaggtttgttaaggtttgtaggtgaatattgttataaaaaaaaagtatctaattattaagatgatgactattgcaattgtttattaatcaattaatatgtttacaataaataataattatgaaacgcgcatggattaaatataagtacgtacgtagtaagtatattacaactgtttattattaattagaaatttttacaccaaaaatccattttgcacactttattacatataaacctacacacggtcaaatcaacttttttaccttttctttatattttattacacatataccac

SEQ ID NO: 113874 - DNA, 3631 bp, Cannabis sativa
  modified_base (101)..(119): a, c, t, g, unknown or other
taatagaatttatacatcaaatataatcatgaaataaatcatttgaaccatgcaacataaaattttatttctgatgtttattaactagtaaatctgattannnnnnnnnnnnnnnnnnntagggcacaaaacccaacaaagctgtcaacaaaaccctaaaggacacctagaagaagtgccttgatgaagcaaaaggcaactggcctaaactgctgagaagatggccactggcaaattcctttagctctagcttatggctacgaggcaatgtttcttgtagagccagtgccgcggtctcaaagatgaacaacctatgacgaacaaacaaattacaccttgctgccagagtcccttgatgaagtagaagaaagaagagaacaaagccaagctaaagttgcaggcctacgaataaaacgtaccaatccactccaacaaacacgttaagagtagaaaattcttcataggagtcatcgtgcttcgaagagtgttccttaacactaaagactcagtagaaggagtgtttagacctaactggaaggcccttatcaagttatagagataactagtaaggggtaaacgagaacatggagctcgttctcataccaagataatggaatggagagaaccttagcaaatactaccaataactggcttaaagaactctactccaaagtaacggttctatctactcaaaattagtacaaaaagcactagcacccacagcccttttttagcgtggtcttccattgttcttcaatagtggcctcttctttactaggtgagaaagggtagccacatgacatctagaagctaaatttgtttaatacaggcttgtagattcaatgtatgtaagttgcacagtaacaaagaccaattaatgaataatatcaatattctgtttctggtgtctatgagccacttgctcatagagtaactttctaaagttattctcttagttgcacatgcgtactatggtaccctcgcaagacagaacccaggcaaagtctgtgaaacttagtgaatagcaagtgaccaagagacttgtctgcatggtcatttgggggcacccatactgtagaatgcatcgaactagcacaaagaacatatacagagaaattttaactcttagtataagctactaaacctgccgttaagtcgtacatgcatagtagtttttgaaaatagagggcttatggccaaagatattaacatgaaggccctggggctgaaaaataaagtagtgatctaaaaagtccataggccacataggacatgaaagcaatgttctaaaaaggcctcatgccagaaggacatgaaagtaaagtttcaaaaagccataggccacatggaatgcagaagtgagtaatgttcttaagctaaaagggcacaaaccattagaggccacaagctatgcggaacatgaaaacaatgtctatgtgatacaaatataatactgaaaatactaataaaaatgttgtatacatgtgtgtaagggtagcaggagctgaatttggaattgttagatggagatctatagagtccacgctgaccccatcatcacccagttagccagcctggttgttagtatcttggtcggccacctcctccacaggtgggtcagccaactcctcgtcgtgtgtccccgatgattagccctctcgataagtagcaacctagtttgtctccatccatctctcaaatagtgcctttccatgggccaatgttctcttcgcaaaagtcgtactgcccatgtatgacagtttggctcgaggattgtgcaaatgaaactcatgggtaagttcggaggacaagtcgatataatcctccttaatggcttattggccatcaaaatcctcctacaacttcttcttacggtccccaagtttagtttgtaacctagaaatgagggtagcctgggtggtgttctctatattccaggcaccaagcatggtctccaatccaaaaaccattctttgcctctccaccacaacgacctccagctcaaaattggctttgtcttttactacaagggaagcctctaagatcttcacacgatcctgaaaagcatctgaagaccccctagagccatcacaagctgagctcagtttcatcagggcctgaaaacaaagcgaaataacattaaagtcaaacatcctaacttttgccggctagtccccttcttggactgctatggctggctagccccccatataagcttccaagaagatgcaagaaacaccatggtcggccaccctatatagtacgaagaagatgaaccgagctgaaagtataaatcaccagagaaagaccttgaagctcgatagagtaaagcgtgtcaggtccagcgtcacccagctcattcagagcctcatccaagaaaggaaaagccctctctatgcattggttggctgactcagcaaccttttatctagcagctgaccctgctcctttgttctacctctgagtaccttggccggcaagctgtaccataggctgtccacctggtgctggccctagtggagggggaggcagtgatgatccagcaacatcttcaccacgtgaggtcctggccaccttggccctcccccgtctggtagtctcatccaaaggtccaccttcaagacctctcaatctggaagaaatgccaacaaaaagaatgtagcaaagtcaaaaagcattcataaatattcaatacaagaataaaagcatggtgttatcaactatcatataccatcatcagaagaagaggagctatcagagccctaaactatagccttgaccttgcccctagatataagcacgaggcatgtaggcctcttagaaacctggcctctaagcccaatatgaagggaagcatcacctagtggaccctcgcttgccaagcatcggcggagatccttctctctactctccaaatttcgtgcaatacgagagaaaggtacttcatcatcatccacgccagggccctgcccatgtccaggacaggtctcatctgcagttggtacttttgcagctccaagagcagggggatgcaagccatacattcgaaaattgtttgtgctggtcaaccggatgatgtttctctactcagccgataaagaaaggatgtgatttgctctatcccttatttgcaaggtagggatggaacgtctaaaaagtggcacatattgaaatttatggtgctcgattgtgcaaagaccttgtgcaataaaatactttttagcgtacctgccaacctttgacatggctgcatagttggtatcgcccagccattagtgagaaatctagatgaaataaaaatatctacttcggtgcagacttcaaatcaaaatagtacccaatctcataaggggtaggcagaggccaaccgaactccatgtacaatacaaacatcactgagagatactttatgctctttggcatgagctgtgttgggaaaatcccaaagtaagaagcgatgtctagataataatagtgaagcgacacactgccccatgttcaatgtcgtgcccagaccacatgtaataccctagatttaagaaatgaattagcaaaaccctaactagtaaattatgtattattgtggaattatattattatataattcaatatgtgagaatcaatatgattt

SEQ ID NO: 113875 - DNA, 1368 bp, Cannabis sativa
  modified_base (923)..(924): a, c, t, g, unknown or other
caatttatttaccaaacacctaatacatattattcacataataatatatattactacattttaatctacacttattatattataaaataatataacattatggtcacttgaactagcctaaatcacgtaatagttagtatctacgtgcattatgttatatttattgtgccaatagttaaaattaaaatatagtcaagaaatcaacatctttaaatcaacatatttagttcataaatgttagcttaaaaagaaattgtagtccaattaactatgaagaatatagtccacatgaaattgattgtatacatttaagtattcatgcacttgttccattaaaaattcgttcaagctcgcaataaaactctgctctaaaggttgagatgcaaataaatctacaagctcactttatacaaaatgaatggagtaattcttttttttttttcttttttaaagaagaaatagctaaaactatccatagtattgataatttatttgttattttaactcacaagttgtcagtttgttaaaaaaaaaaaaaagaaagaaagaaaaaaaagaagaaaaattcacaaggcggtttgcttgtgaagggaaacacatacaagaacccaaaaaagaaaaacaactatgacttgtatcaattatttccaaaagacaactacaaaattactaataagagagtgacacattaaacttataataaaagagaaataagcaactaatagaaataaggaactgctatgcatgacaccaacttctaatcaaaacttcttctgctacatcaaatattgaccaaactttggttgtataacagtaaatagtatagtgcatgtgcatgcaatctcaaatttcttagtatgcataatccattccatacattaaatagtattgtacacccattatatatttatttatttattttnntatatatatatagatatataaaagctacaaataaaatttaggtttgacaattatttatttttatattgaaatgctataggttatttacggtgattaacgatatttacgaagtatatattattgttgtaatttaatattaaatctcacttattttatttttaataataattatatttaataactatttatatgacaccacctcataataatgctaaatactatagtactaaaaaacaatgcttattttattaatgtaaatttattttcttaattttattagcatttttcttaagaattaagtaaccttaagtctaatttttctacttatcttatacttattttgttaaattttatgtcttatattaaattttataacttctattttattatatatattattaaagacatttttataatttatttagtcttactgtgaaatctttt

SEQ ID NO: 113876 - DNA, 2206 bp, Cannabis sativa
aattatactattttaattattattaaaataaaaaactaaaatattaaataaaactaacactacgtggcttggcacgtaacaatcacctagtattaataatatgtgacatgagaattgttaaaaggaaccactttgtgctgcagtgacagacacacttatagacttgtggggggctatagtaaaagaaattgcattaaaaaaattaaatatttttctttttatttgataattatagcacaaaaaagtaaaaaaaaaaaatcacaaaataaataaattaaataagtaaacataaaaaaaaaaattaataacaattaagtcctcacttaataaaaattttgggtccatcactaattattggtgtaattaagtatcgagtctcatataacttaaaaaaataactttaaaaaattattaaaacaagtgcctttttttttttaagagaatgaatgttgagtatgtaaaatattagattgttttatcatacatttcttactcttatttattattatatgattatgatatatagtaataattttatcattattaaaaattaacatatttcatatagaaaatctctttcatattttaacctcttgatttatttatttaaaataatgaaataacattatattttagtttgtcttcactcttggtatgatcaattccacaatctcttttgcattaaaataatgatcaattccacaatctctcccaaagaaagaaaaaagttcaatccctcaattttttttttaattatttttaatgcaaacaatccctcaatcttacttcaaggattattcgtaaattatgagtaatgctaaccgtctcaaggctagtttctgcgataggaggttcaatcgtagacagaggaacatcgtcgtgaggtcgtgtgtaaaattttatcatgaaagtagtgggcaaaataacttttgataccatatgagaaacagagaataaagtaagaagatttttttttattattattgtgcttgttctactaaagctattatacagtgccatgaatatatagtcaaagagatagatcacggttggttagaaaaactaactgtagttctaacaacctaagaatagtaacctaactaacttatccaagtataactaacttaatcgagattaagtctaataatagtcaaatatgatgattctaagattgtgcaggtacgagactatacatttgaagatgacttaaatagattgattgatattatttatatcaacaaggtgcattttattttctggtagaccgttatgaaaaaacctcacaattattctgtgagtgtaagtgtccaatgaaaatttgaagcgggacgttatagtctactatctttgtttttcttgctaattaaaaaggaattatgtggtgcaaattccttccccctcttttactagcacatccaaccttaatttggtcataaggctaatagtctactatcacttgtatctttagcatttttctctttaaaaaagactgcaaaattaaggtcaacaagatcaacggtcggagagtaacgacaattatcctgtgtctatagatacaggacctctcttaactgctctactactttctcaaaccttcatttcaccttttatatcccactcctttccttatttattttctcatttatacccttaccattctttcaaaattacattaatgcccctgccactctcctcagcctcaccttcaacttcatccatggcttctctcccaacccactacactcttcatcttcaccgccaatgcttctcttcctcactttccccaactctctctatcctttccaaccctcacttttcgctttcccgcaaatttcatctctttgcttcccgccaaaatcttacgcgcagagacaaagtttactctctctgctgcttctgcaaagctggtaccgaggtcactagggttccggtcgatgaggaaattgaaaggcctccgtttgatattaatctcgctgttattctcgctggtttcgcttttgaagcttatactagccctcctgtaagtgtttctcaattgaatttgtatctttttgttcttgttttggagttagggttcgatcaatatattggattgaaagaaagtttggaactttgaagctgtgtgataattatgttgttttgctccattttctcggcaaccaaacagattgagaaagaaaccgaagataatcaatgcttttgttta

SEQ ID NO: 113877 - DNA, 5774 bp, Cannabis sativa
  modified_base (5714)..(5743): a, c, t, g, unknown or other
ttgagctatatataagaacatgggctactcctcctattaccaattggttttaaaatggaacctcatgattctcaacagaggtcaaatctggtgccttcttctcttttacttgttgtttgttttctgtaaactctaaatctcatcttttctagtgttgtgtgtgtgtttgtgcttaatctgatagatcatataaaaactttgtgttagaaaccctaggttgtgtttctttgagagagaaagaggaagagacgaaagagaagactcaaataagtctagatcctgctgattaggtttcttttgggattagtgtgagagttgggtttggctttgagctccacttaggtttagtttgggcctaccatttactctcatgacgcatagactaagtgaaatattgcaaaaaggccaaaatccctatattgggtattaatgaattttgagtggtgttaggcagctgcagatttctaacagtttgtaaacaatttattcctttgctaggatactgagatacagttgtgatcgatattcaaatattagaattagtcttagagacaaaggtatatacttttaggctcaatcctgcgacgtacactttcattaaatatatgtccggtatgtacagaacgcaacattcacggcataattaacacgtcagccaaataacattcaatcataatcaattgcagcattgcatctttagacaaattacacattgaagttgatacttctagctgagctaggctaggccgactcgcagctaatatttaatcaaataaaaagtacctaaaattgacaaaattgtcacattgtgactagcgttaaccacctgtacctttcatcatcaaaaatatctcaaatggagggattaaaaagcaccaaaaggttcgtacattgctataaaaacatcatagtaaagttagtaactaagtaagaagaaatagaaatatatatatgtgagatatatctcacagaattgcagacaatctctcttcatggatgcaccattctactactaccttttcctgttcatttctctttatttcctaaaattttatttgcttcagaagaacaagggactcccaccaagccctgctttttccttaccgattataggtcacctctaccttttaaagaaacctctccaccgaacacttgccaagttaagccaccaatacggtcccgttatacacatccagttcggttcccgtcccgtcgtgctcatatcttccccttcagccgcagaggaatgcttcaccaaaaacgacgtcactttctctaaccgtcctactttgttggcaggaaaacacctcggctataactattctacactgacctgggcctcttatggtccccactggcgaaacttgaggcgcatagcttccatcgagttattgtcgtcgaacagactcaacatgtttagtggggtgcgcttatctgagacaaggtcgtcggttcgccaactctttcgaggctgtcaagacgataaatttcagaacattgaaatgaagtcaacatttttcgagttgactcttaatattgttatgagaatgattgcaggaaagagatactacggggagaatgcagccgaagtggaagggagtcagttcaaagaaattgtgaccgagacgtttcgcttgagcggggccactaacattggagactttgttcctgttttgaactattttggattaagcggactggatacgaagttggtgtcgttacagagtaagagggataagttcatgcaggatttgattgaacatcatagaaaaacaaatacaaattctggttctgaagagagaaccatgattgatgttttattatcactacaagaaactgaacccggatattacactgacgagttcataagaggcatgctgctagtgagtctgttttatttggactttactctgttttttttcttgtccctctattcttgtaatcttactaatatcattagtgtcaggtaatgctatcggcaggtacagatacttctgccggaaccatggaatgggcaatgagcctcttgctcaacaacccagaggcccttctcaaagcccatgccgaaattgaggcgaatatcggtcaaaacaggttgatagaagagtcggatcttctcaaacttccgtacctccggggcgttatatatgagacccttcgactatgcccagctgatccacttttggttccgcacgagtcctcggaggagtgcaccgttgggggatttcgcgtcctacgtggcacgatgctgttggtgaacatgtgggccatacaacatgaccccaaaatttgggacgagccagaaaagtttaagccggagagattccaagtggagggagtggacgggtttcatttcaaatttctgccatttggagcgggaaggaggggttgtcccggcgagagcttggcgatgcgtgtagttggtttggcagtaggatcgtttattcagtgctttcagtgggagagaagtggcgaggagttggttgatatgactgaaggagctgggctcacaatgcctaaagcgcaacccttattcgcaaagtacagaccgcgcccaactatgatgggccttcttttcaagctctagagtccaagatagactctctttccaatataatttataggaatgaaaatgagaattagaatagaaatggaatagaataaaatttaaaatgcataaaaaattgataagaaaaattattaaattttttaaattcttgcattggaatggtctttcctttcatttcaaaatggtatagtcattccaccaaaatggtagaaaggccaatctgttggaatgatattccaattccttaaattgcaaccaaacaaaagaatagaataaaaattgtttcctttcctttttattccattttattgcctccaaccaaacgccaccttaggaaaataaagggcatcaaagttacttaagattttgtgaggtgtactattattattgctgtaatttaatatcaggtctcacttattttaatttaataaagattataaaaaaccgctaactagttatagggtgtcatcttatagtggtactaggcaccttagtgccccattaagagcattaatattaggtactagtggtgcctaacgccttatagagtagtgctttacgattgattagcaatatctctttaatgttattatattatattatattatatatgatccaatacttaattgcaccaatagctattggtgtaatttaatatcaggtttcacttatttttatttaataaaaattatagataattgttaaccaattatagagtgtcatctcataggggtactaggcaccttggtgcccatagcaattgggtatcagtgatgcctagcaccttctacaggtggcgttgtacgagtagttagcgatatcccttcaatgtttttatattaaattatatgtgatctgatacttaattgcatcaatttgatagcaagaacagtactaggcagcactggtgctttttgacatttctcttgctagtaggtactttaaggtgtccaatactataccactatagtctgttaaaagtgattaacaattttttataatatttatttaattaaaatatatgagttctaatgataaattacattaataataatatgtcacatcttgtatacttaataccttaaggtacctagcattccaaagcaccaaatgaatttcaatacaagtttccaacacagtggcgtgtaaaaagtacaattcaagaaagagcattgatattaggtaccagtaatgcacatcaccttctataggtagtaccctatgattggttagcgatattctctaaaaactattttcttaaagtatatgtgaacaatacttaattatatcaataacagtatgatactaatgagagtattaagtatcagtgacgccttttagcaaattctcttcaagaaatcaacaaaactaagttcaaataaagaatttctttttaaaaaataaaatctcctacaaagagttccattattgtatagggtttaataattttattgtgcctcatgccttctctcaattcaataatttaatgtatgccctttttgaaaaaaatataataatcaataaacgtatgctatgacaatttcattttatattacttttaaataagcaaatattattttggagcatgtgttttataaaaattattgattgagctctctaatttattaaatgacaatttataccttgtattttcaaaagtggtacatgttgacctcacttctagccaacgctaatgagtcttaattaaaacaattagattgaataagtagtagaaagaaaagaataatgaataaagaaaataccaggatttgtagaagtttggccccgtgatagtagtaataacctactccccttttagttgtattaacttgtgagacaaagaatgaagtattacttctcgaaagctcttacaaagatctttgagtaatttactcttagatcgtaatttttctcttgagtgtttcgtctgattagtttcgtgtccctgaatagtgcaatgagactactatttatagggtctaattacatagaaatggttttccttaatctataagaaataaaataggaaactagcatatttttataattacaatgaagaaattaggcaaatctaggttaattgccttaattctctgaagatacaaattaatcccacaaaagtatggattgcttcatgatatgcaagtttgaagcgtatcgattactgctggaattagcaactcacatttcatgaccggtgcatgcaagttgatcacacgatcgagctagtcggatgtccaccaacgactctgcttggacatcttgctatttatgtacaacttggactttcatatcaatctttacaggctgctaggagtaaaaccatctgcccaggttgagaattgtaagacatgtgtcatctagtcaggtgccacgtcatagtgtaaaaattagaataacatttgcccccaagtctacaggaccttcttggtcgcacgtggacttcatttaggtaggaagttgtctagatgggtgacgcgtgtcctggttgttgaagttgatccgatgtgacttgaatgagagtctcttcagtgtttgggcattaaatgcctcttggaagttgtaccttgagtcacgcactgacggttgaggggtacaacatgcatgacatctgtcattcataatgagtacttaatgtacacttttgggtggaaaatataaattttgaatattgaatgaatcaattttctcttttaggtgcctgtaaaaggggtttaaaccttcgtgggaaccattttagctttttttattctcggagaactggagcaagaatttttcttcatattttactctcaaatctttaaaaaaagttgctggaaagtatattgatgttaccctccaagcatatcaaaagagcttcgaacagtgaataagttactttccctttactttatgcaatattcatttaatgtatgcattattttctagatttcttgctgcaaatttatatgttcttgaactgttcttgactaattatagcatagatgaaattaaggcttgaaattttgactaaccttcgattataacttctgactctcttaatgcatatcaattttgacctaaaatcattcatttccacctattcacggaattctaaagatttccaggtatctttcaagggtttgaactgttggaattattttannnnnnnnnnnnnnnnnnnnnnnnnnnnnnttattaacatcctaaataagaactttctaaa

SEQ ID NO: 113878 - DNA, 3027 bp, Cannabis sativa
tttaatgttttaaaattaaaaaataacaggaaatcaacatcagagtaactacatgtcaactataaataaattataaaataacaaaaaaaatcaatttcataacaactataaatcaattataaaataactaaaaaaagaataacaaacagttcattgtttttaatgataaatgtattttgtaaataaaaaaattaaaaccataaaaataaaaatttctccgtgtttaacgtatatatttttataatttttttaaaaattttcttctgtgatgtaaaagtttcaaaaattaatatgaaataatgcgctattaacatgtgtcatgcacttttcttatactttatataaatatataaattggtgatttgtgagttttttatagttacaaatcggcaacaaaatttgtaattaatttccctgtaatgttacattttaaaaaaattattgaatctgttcacatcttcgtttatttgacacaatttatttaatgaacattatgttatttttgatagatttgcaatcacacatattatacatgttattattatttttaagagcattatattatttataacttatatgacagtaactgcattatataatatcgtgaaagaaaacaaatttggtacttatctatgtaccaaaaatagtaaaagtactaatgtaaagtagtatgtgattaaaatggatcaattactattctccacctttaaagaaactattttatttattctgagattcagacgagtgtattccttctctttgctaaactaaaaggtcatgcaatggtttgtaatgatttcgctgtcatcaaagaggtccaaaagtattgccgtctcatatatactccaagcactagtaagatgattaataacaattaatgccatattgtcattcttgtcttaaattagacataaaagtgaaaattttgtgtctgtatatgattaaagggagagcaaagctacttataatcagcaatggaaattcacaacaaaaatcaaactagttctccttaattattatacattgaccaaattatgtgtgtgaaaaaacccttagcttaaaaaattctaaatatatcaaggttctccacaacaaaatattgaaggaaaacgtgctatagtgagaatgctgaataattataagagtcaacaattagtgttatgatcataataaaagcaaagttaaaaacttataacatatttagctataatatgatcttcaattaacctttattattaaggctaattgtgtagcataattggcagaagcacctcaagccccacagcctgcgccacatccggcagcacagccaccgccatagagctcggtatctccttgagaggtcttttctttagacacaccgtctgcgcaggagaagattatagttgagagaatacacagagtgaccaaaaaacctaataaaaagattagaaaagcaccacttccagtgcctacacctccatccacattggctacctccctccataatctcaccatctatgagttatatgtaggtgttgttttcactttcgattcctctaaatgggaagtgagccagcagtttccattgacggacacttatatataaattttttatgataaaagtcaatgttccaacatataatatttgcccaagggtccaataatttagtggggggtctttcttgtcctctctttcctcctttaaagactttgtaacatgattctccttgcctacaatagagttggcaggcaaaaaccatcagagtgttgacatgagattagtggtcaacatttcacttaccatagaaaaactgtattcatggcatgcactacaaaaaatttactttaagaacaattttttagtgtaaaaaaattaaattgtgacaaattaaaaactttttttgtagttatatttgtaattaaaagtactacgttcattataaaaaatgtgtatttttaatcacatcaaaatttatgattaaaaaaatttgcatgtgactaaaacttctatagctaaatgtattagtcacaacaattatatttggttaagactaaatatgtttttagttacaatatttatttgtggctaaaactaaactagtaacaactagtatttaatgaataatacattttagctacaagtaaatttttattgtgaatgaaaattatattgcgactaaactaaaagattgtgacaggtaactttttttttgtatttgtttcgtgtaacttttagtcacaatattttgattaaaagttttttttggtatagtgttgggatttttctctctttacatctttatcccactctatttcttgtcatgaaaaatgttgatggtggaagctgcatgagattaagctgtcactttggagagtgacagccaaataggaaatatatgtaatcgatgatggagtgtaaagtcagagcacactttagtagaatgaaacatgatttgggtaccccttttcttaataattcataataattaatttggtttacgatgcacattgggggaggctggaactagtccaaactctttcaaaaattatgcatggtgtcccattaaggatttaaaatgcaattattggtctaagggagattcctcttctaacatgatccgccttatatcaaccacgacaataacaaaataggcgatagtatataggattttatatctaaatatataattatatatatatatttatatataatagttcgatttgaactggattgtggatgccaatttagaaaagaatgtattcctagtaagaatacaccatctgggttttgattctattatttaaaagtgcttattttcttttttcttttatatttagtattatttcaccggtggtgtgggattcaatatcaattttgcaaagggacattactaatatctaattaggcttcttgctcctttctatgagcttctcacatttttatagaacatatcaacacatagcaatccctcattaaaataagaatttagaattgagagatctaagctcaatacctcgtatagtatatagtatatatatatatat

SEQ ID NO: 113879 - DNA, 3834 bp, Cannabis sativa
  modified_base (56)..(63): a, c, t, g, unknown or other
  modified_base (3788)..(3805): a, c, t, g, unknown or other
atttgatccaatggtcaagaataaaatactcataatacccattaagagcatacccnnnnnnnnatatatatatataaatacataattaaaattttaattatatatgtaagcattatagatttaataaattttttttagtatcataaatatttaatattagtaaaattataattttcacctgtctgaaatttgtaagcaaatttagtttttaaaagaaggctataactacatatttttatttaatttagaattttaaacttactaacagatactaatattaaactaaataaaaattaccgttttaattactaatattaaatgcttatactactaaaaaaattattaatttataccaattagaaatttaaaactttaagtatgctacaattatcctttttaaaatttcaaatttcttgtcttgttcctcaaagaaaagtttcttctcttgtgtcatgaccatccaaacgtgtagatatgtataatgtatatattaataatgataattccaatacaaagtttatcctttcatatataatatatatttttatatatatatatatatatatttaaatacttgaagtccaacttcagaggaagttgacagcctaagcctatgtactcaaagaattgtacattgtatcatgaatcgtttatttaatttagatgatccaaataattaaaccaaatcaaatcaaatcagacatgctgttcaagttctcaaagaaataaaaacaataataaaacagtccaaattaattagctgcctctgtaaaagataaatacataataaaaaggatatttttgccacgagaatataatacgtactaagaaaccaggctgtaagttcatataaacaataataatataattttaatattaatatagtaagataaataaataaagaacaccaagatttgcaccctcatagtatcagtaatcaactagctagtctggttagattagatgaacaaagccaataacacgtacgataagcttgtcccctttgattctgccgattatcgcgtgtgatgagttccacgcgtccagcttgagactatttttataaattattttttggtttttttctttgtttcgttttcaaatatttctaatctaatcttcgcattttcgtaagttataggggattgttcttttgggggcatgcacaggccattgcacgtacgacctttgggctttgagttaagttagtttgaggaaacaaccctatatataaataatataaaagtaattaaggaataaaatctagaaataccaagttggagaaaccctaaaaatctgattttattcttgaagggaaacgctggcttaatatcaatccatcgtcagctatataatatacccacgatttgcgttgggagttacggctttctttgtctgttctctcttcctccttttgggtattaacaatgcatttaataacagattctattgcctttaatcaattaaagccaatcagctaaagctattataatttaaacttgccctttttctaatattatacataaaactactgattttatttataaaatactttcagtaaaattatttacacaaataccgatatgtcatatcagcacaaatgccgaaatctaaaataattaccgaaaatgaaaaaaatttaaaaaatctcgcttctaaaaatttcaatgtgttttaaaaaaaaatagcaatcttttaattgcttttgatgtaaataatatatcaattagttactttttattaaaaaaaattgtttcaaggtaagttttttttcatacacatttgattgcttattttgaatctttgatcattcaagtttaaaattaacatatatatatatataataatttttataatgtaactaattctattatgtttaagatactatttggtactttataaattttcatattaacgtatcgaaaatttttattaaataaatttattattagtatactatatcgtaacttttaaatacaacataacaaaaaaatttatagtaatttatgatgtcagttgatatgttaaaatttattaagtttaagattttattactttttgttacaaaatataaaaaagaaacaaaaaaattacttttaatatttgtcgtcctttttcagagagtaaaaaattaatttttaactttaaaattataattttattttttagatttttaagttaaattatgttagataaatataatgattttattgtttaagataccttagtgatacttttaatttctagattttttttttttttttgtggtggtaaaaaaacatatgcttctcacatgttaaaatgatcaccttaaaaaatatgttacaataatgtaatttttgactctaaataataaatgatgtgactaaatttttttttaaaacttttgaaaaaaaaaataaggaaagactataattaatacaatttaaaacttgaataattatcaaattataaagtggagagagatggataacaaatagaaaaaataataatataataaactaataaaaaaagttaagaaaataaaaaaaaaaaaaaatgacaccaacaccaacaaacaacaaatgttaaaaaaaaggagagaggcagtgattaaaaagaaaacatattgctttgaatgtatcaagtataccgattatgaataccaaataaatggtattcggtatatgctcaaatttaataagtgatcatatatctgtaaataaaatgtaatttaggtcttttcgtgtaattaatcctttaaactttgagttttctttgtaattaatttatttagatgatttataatgtgtttgttccttcacaatcaaataataataataataaaaaatatatacattacgttgtgtaatcaaatcgagatcatgatggctaatttctgatggggatcgacatcatctggcagtgcaagtcattggaaaaattagaattctctttgtaaggctaagattcatgggggtttaggctttcggaatttcatacatttcaaccaagctctcctagctaaacaagcctggcttttattggaatcacctaattctctcctaagtcgtattttgcatcacatatattttttaaatggctattttcttacagctggtttgggtgcctgtccttctttaacatggcgaagcattgtttggggaaaggaacttctagtaaaatgcctacgatggagagtgggtactggttcacgaatcaattgcaaaatggattcatggctccctggacacactgatttcacaccattcagtttcataggagctgatagctctctccaggttgctgatctaattgatcaacatagaagttgggattcgacggctattactactaactttggataggctgatattgatcgaatactctccattcctctcagcatttttcctacggaggatgttctcatttggaatggtaacaactcagggaattacacggtgaagtcaggataccactttgctgctttcgttgctgatcttcaagatgcaagcagtaccaataattttgaaaaatggtggacaaaattctggaaattaaagttacctacgaagcttcgcatctttgtttggaaagtgtttcataatgccttaccagtagctgctgaactgaagtgaaaacacattgctgaaactcctttttgtccattatgcaaaatgcagaaagaaaccatcaatcatgcactctttttctgcacaagagccaaagaagtgtggcgcctctctcaactaaatgctaacttcaaacgggctgctacatctgttggatttcatgccctaaataaaacnnnnnnnnnnnnnnnnnnatttacttattaataaagttcagaaataa

SEQ ID NO: 113880 - DNA, 1789 bp, Cannabis sativa
  modified_base (1717)..(1746): a, c, t, g, unknown or other
aaataatccttccatcataaaaactatttccgcattttcaaacttgcttaaccattcttgattctccagtactctgtctatcttggaatgaatctgagattcaattttttgcttgtttgtccatgtaaagaaggaaccagagtatttaatatattctaccttgcaagcttcaacacactccttgaaggttgtagatttgctcatcttaacagctctgccaaccctctcatcctgatgcaaaatgtcattaaaatccgcaagaataatccaggggtcctttatagttgctgcaagtagcttcaaatcctcccataggcttcctcttccagcttcatcattgaaagcatagacaaatgtagccataaaagattctttgtcacctcttgtccacactcttaggtgcataaattgacttgaacatctcaatatatcaacagaaaacatatctggattccaacttattattatcctccctccacggtaccatggattattcattgaaaaacaccaaccagaaaacattgttgtatagactttccccatatttcaagctttcactcgagtttctaggagcccaacaagtcccacatggtatttagagatcaatttcttgacctccatctgtttattgtggctgttgagacccctaacattccaactcattattctatccatttgaaagaggaggtactccccctcgtcctgtgttgacagtaacctcttccccttgatttggctctctctgctcatctcctggttcagctagaatctcaaaagttttagcagttgctatattctctgtattcatcttccccttgaaatcatcacttttatttcctaccttgtttgttcccatttgtccatttttccctttgatctgaacctgacagaatccttcttcatcttcctctagtttggccttctagccaatgttctgtactttctttggaacccatatcgttttcttttcctgcttcctggtgcatacagctgcattgtgtcctatcccagaacaattaccacaagtaattggtaacaattcatatttgacaaaaatagtcacctcctgttgcagctcatttcgaaattctatctgttcaggaaattcttggcccattcgaacttcaatcaggattcgaggaaagttcaatctttctttcttctttgtgatatcatccaacataattggatttccaatttgctctaaaattttgaacaatgccctttcccccaatatctcagttctaacccatggagttgtacccaaatcggtgcagatgtaacatcttccttcttgtagtctatgtatggttcccatggtttcattatgattggatttttatcaaagaataaaaaaccaccacctaagatttcatcccttgtgtttattgcctgaaatctaacaatgaacacccccggtttaagcaatccaaccttgtccactcctttatctttccaaactcttcttgcaaagccttcaaatggtcccaaaggagggttggcacctagcacataacataccattgcagtgttccagtataaaatttcatcctccatatcatccatcaatttgtaccaaagagttttgaccagagctcttctcctttggttcatcaaattttgagcttaaattttgaataatagattcagtatgcagcacgggaggagagaaacttttacctgatctgatgttagccttgttgggttttatgccctnnnnnnnnnnnnnnnnnnnnnnnnnnnnnntcaatttagaattttgaagtgaattatgattacatgtatgtta

SEQ ID NO: 113881 - DNA, 3306 bp, Cannabis sativa
tcgggtagtcaggggactagttctgatattttcttgctgaaattgaggtaattttggagtagaaattgagtttagaactttttatagttaaagtccgaacattagcggtgtttgccaatcaagggctcgattttagtttctattgcgtaagtatattagtatgtatgatatatatgcgccctatgaagtttggggtggtttgggcacgtaccagtagcgtttcggtgagtgcgtaaacttagaaaatcacatttttacccctgaaaaatcggtcaactggttctggccaaccagtttatcgtttcgaacagcctcgagaactcaggaatcgtatttttaccataactttttactcaaatgtccgttttggaggttttatatactgtttcaaagcttgcaatgagctctaccatatggtgtatattttagagccaaaatataagttttattttagtgcatttgaactatagtatttggtaggaaacccaaggttgtcctttacaactgttaagtagtgttttgggatatacttattggtttatcattgttatgacagagggcctgtgatcatcgatcgtactccaagtaggttggccaacatacctgagccagaacttgaggtaagaaaagtatattgttctgcatagtacgttgtattgtaatacaattaatagtgttatgaattgattaatattgagattgagatatagttaatattgttatataataaaaagattgattggttaaacaatgacaatgtaatgatactatgaatgtgatatacgggctcgcttgattaggtgatgtgatactctaggctttcatgttctaaaaactcatgaaattcaaatcagaatcaaacaggggcattttttgtcacaaaatagaaattccttaaggattatgaaattatggaaagagtttgattcaaaaagggaaaggggttacataaaaaatacctaagaataattaccctactgtcttaataaatcaaaatcatgtaaagcaagaacatggaaaataaaaaaaaaaaaagagaaaaaaggttaaaaatagaaactcaacgaattctgggttgctttgatggcattgacgatttctcactcaaaaattttggtaccaagcgttcgggatatagtgtgatcgaggttaggaatgaatgatttcagtaacatgaagataataataaagggacaaatatggcatatgtagagaattgaaaaaggagagaattctaatttttaaagttcttcttctcttggacaataatggtagaaatggtactgagggataaaaatgccagccttttaactgaattgtaaggaccgtttgattaaataggaattgaatcaagggtaattaacttacgagtcagttgaaaagataaatatttattgcaaaactcatgattaaccctttattgggaagacaaaactgccaaaagaagaaattcaataaacttattcggtacacaaaaaaatagatatcatgattaaaaagactttttcaaaaaagaaaaacactttttaaggggtgattgttacgcccatatttcgaacattaaatatgaacatgacatgtggatataagtcttgaagattgaaaaaaactataaatgtgaggaatgaaagtaagtttcccacctcgggatgtgccacaattaatgaggcattgtctcacattgtattatattatggctatcaaataaaagcaataacattataaatacagtgattagcaagaataacaacattataagcaatcacagaacttaaacgaggcaaacagggcgtgtataaaacacgaagaaatgagctgagtgaaaatggtagataacgagttttttaagagcttgcaactcattgatccacatactcataattatgttgaaagactaaggaatatgagcaagagatgacccatctcgggatgttcataaacgatgtgagataattgactctaaagaacacgaaagatttaatcctaagtgctatctagagactcatctcagaagacaagagcgaggaagatacttaaattagcatttcgtaaaatacgcctagccatttttaacatcactaaagaatgcaaagcaaatttttgggtatcctatctcgataaagaaactactttttagataagatcaaatgggcgttattaacagttattctagtttacacatgttgtaaacataaaacgcgaggattgttcatgtttcatgaatacttatctaaataagatcgaaatggcataactgtccctgctaaaaattttataaatagagacagaacctatagagaggagaggatatttggagagaagactttgacagattaagtatagtaaatatttagaaatattatcttatattcagaaacactataagagaataattagaaataatattgactcatggagtatgtaggttattaactacaaaaccacataaaagttccttttatcttatttatatttaatcataattaatattttaattttatttaaaaatgtttcattattgttaacgaatttatgtgttaacaacaagttatcgatatgagtgagaattatttttgttgttgttatgttagttattattgcttgattattgataagttctcgacatgttatcaatagttcaagttttgctaaaaaaatttgagaatttagttattatcgattgattatcagtgggttgttgaaaggttctcgataagagtgaaaattttatttcgttgttgttatgttggttattgttgcttaattatcaacatattgttgacaggttctcgataggatcaattattagttttttagttttcatgtttggtgattgtcaacttactatcgataggtttttggcaggttctcgataggatttagtattgtatttttgttgtcaagtttgcattttatttctgttattattgtattgtttaaattttgttgatatcattgataaggtgtgtttttttttcctctgttgtgctgtgtctatttcttgataggtttttgattagttgtcgatatatttttgataggattctaacatttgttctattttctttctttaacagcagttgattattattagaggtttatttctttgcccatatgaagaagcgtatgccaaaaaaatcacttacaatgatgttgagatagtgattgaaatgggtgtcgatgagatgcatccttaatatgatacccaagaccctaatgttttcaaaagttagactaaaaaagtagtagaataaattaaaataacaacatccttgtattagaaaatatttcgtattattttataca

SEQ ID NO: 113882 - DNA, 1424 bp, Cannabis sativa
agagagagagagagagagacatacacacacacacacacaaaattcccaaaatagaatgtggtcaaacagaaaccaatacataaggcaaacaaaacttttatcaagcacctcagtacaactacaacattttaacaaagacaaaatttaggcctatgcaaagcaggtaattggccagccagtagcataagaaacaaaaactcacaaaaactttcattatattcttgataacatttcatccatgtatatgtacaccgtttaaaaataaaaaggactaattcccacctcccagatagtgaaacagggaaattttccttttgtccttcattcatgtattaacttacacgcttagataaacaagtttgggtgagccccatcacaaaagtagagttgaaaactgaagaggtaaaccactatctttgattacttattgtattctttgttattcatatcaattcaaacaatatttcccattactatagtcttggataaataaactaccttgatagttccatcagctgcagtgacagaactgtgtatgggagaccgaccaactctccatccagcttcctgaagccctttcctaaatgcttgaggcacttttatatgaaaaaggaaccaaatttcacacacaggcccaaaattaaacaaaataaataactaaataaaataaaacccacttacactgactaaaatcttcaacttgtctgatttttctctggtaaattagatgatgcagttgtttccctctgtaaccttgctatacaataacaaaaataaaaataaatttaagctaaaaaagtgattgaattagttcattttttattaaaattactggtaatatttttgttacctgaccaaaatcaagggcgacttgttgaaggtcggcttcggacaagcccaagagaactttggagtcgttgttttggatacgagaggaggaggaagaagaagaagatgatggtttgagtgtgagagtgggtgtgggtgtgggtgtggttgcagcggtggagaggttgttgtgcttttgtgaagatataatggtagtggctactaaagtgcgtgtacgaaaggcatgagtgaaggaagcggagcagacgttgtgaatgaacgccattgatgatgaggtggtcatcgtcgcagttgcagggtcgacaaagctaagctagtacgagagaagagaagagtatctcaaagcctaaaacctcagcttttttgtgaaaaagactatgttagccctggactggcctctcctatccattgtaaatataattgcatctttggcatgtttggtttgtggacatcaatattattgtaatggttcatttttacaataataatacttatttttatttttataacttctttaggtaagtgtctaagtcattatttatgtagggatatgattttgtcccgtgatgtacttt

SEQ ID NO: 113883 - DNA, 4745 bp, Cannabis sativa
gagataaaagacaagtgagggcgctccaatgagccataagttaaaaaattctgcttaacaaagacatctcgaatggcctacaattgagaattggacaagtgggttgtgtactaaaattgagtaactaaagagttaaggcccatgtggacaactcactcaaactagaaaaaacacaagtcaccattggtaataaaattaatgttatctttaaaaccccatgttacaaagataataagcatcgaaataaaataagtaaaaaaatatattcaacttaaaattccaaagtcactaagatatggaataaaataagttatatatgcttaaaaaattccaaagatgtgaaaaagatctgttagttttaactagcaagcactccacaccaagtggacataagtaaacccacccatgtgggcccaagtatcaatatacaaccaagataaatgtatatggtaaaaggagacaaacacaatacactcacataaaagaataaaatgcataaagtaaagcatggagagcactgctacatgacaactgtcgcatgaaatatcattccatggagagcactgccacatggcagcttttgcatgaaataccactccaagggggagcactgccaacatcccaccactctccgatgtcattcctcttctcaagattttggggctggttgagaagtggcctcttttcccttctcctcagtcgcagtcgcctcagtccttgcgacaatgttcctcgaactcacctaaaaatttactcatgaacttgaagtccaagtcatctagcatcaacataatatgagaaattccgcggagttttccttggtataagttttaatgcgattaatctaccttttaatctatcttaagttactcaataatctccaaggcatttatgttctccgaatccagcttaccattggctatgacataattgtcactcaagagttttcactcagcctcaagtttcagaagcttggcattcaaggtaccaagctcatcatttttggctttagccttgtcttcagtagccttctacttggtgcctgcttcttttaacttcttcttagatgcatcttgagaaggagcaagcttttcttcaagctccttaattttcaatgtggcttccgaattatgcttctcaaggtctttacacttctctgcatagattttatgagaaacgttggttcttttggaaaaggctaaagtaataaaaaagaaacgccaaagataaagcaatacaattatctacgtcataagtccccacataacaaaaaaataaaacacacaaaaagactaaagtggtaaagtccaattaccataatgagagagccaaagcattgttgatccaaattattgattgggacgaggtcactatcaaaggccccactggttgaagtgtgtaaggtcgagattcgggtgctaatgttttttaacacttccccactctgggcaacgtaagcatcagaggccttttcctggaatacgagaccctgggctaactcctagaaaatattttggtctgcggcagtactaggtgatggtcccatgactaggtgccgaggctacttaaagggaggagccaccaatggaacagacgacctcgtaggtaatgctacaatagccactaaaggcaacaagctagatcagcccaagcccaatggtgaggcggctgtaggagaggggcctgcagatgtggagacttcatgtgaaggtgcggcagtggcattcagtaagacctttaggaatggagcaactgtagctgaagaaggttacttagccggagggggaggcatggctttttcatcaaaggaaaatgcacatgtcaaccactacaagaattatgaaacagcaagctaagtgcatttcataattatgggaaacaacataaaggcaaaatgcaaccacaagcatatatccaagtcacgtcaagacattaagcaaggaaataaaggaatgaccttttcctaaagctatatgcgctctctccaagggaagcactaaagttttatcttttccaaacataaggtttgagccatttgatccaaccccaatgcatacaataccttaaaagtggggatgctcgcatagagcatctccctaatcatcaacaaatgatcccacctatggactttcccatctacttcgtcatacagaggcaaggtatatttatgatcattatgggtataaatggggagatgcttagagagaagtgtagaggaccaccaagctctacttgaaagcctaagatacaagtcacacactttacctcccggcttgctggtttcacactcattgtgctcagggcacagggcttagacaggggtgttaagagtcaacactagtttggctcgttgtttctgagaaggatgagttggatcacatactctaaggtggttttcatggaggagaaagagaaggtttcacttgtggacatcaatgatctaaagaaaactcactctctcaatcaactagtcctatggttggatgggaatgacccttaaaaaggcaagaatgcaagtaagtacttacaaaaaacaaataataattatcgaatggagccaaagtgcaatgtgtagtacttatgcacttaaagccatggttgccaggtggatcccacatctagaagaactcattcttcttgtcaagtggctgattgggaaggccttctattattattggagttgtcacacaactaagatagtaaaatatgttgccgtgttttctcttcccagtaggataggccctcggttgatacatgtataacaccttcgcatgtgttgggtttccaagctccaacatatggtaaagagacttaagccctaccagaatcctataactattggaagacaactgaaagggagccagtcccaaggctccaagaatgttccaaaagtaggaggccaatggaagcatgcccaccccatgagtagggaggatcctcacacatacaattctcatgtggaggggaacaactgtgctcattggatgcaggagctctaccgaacactttgccaccaaagctaagctcatggactttgacacaatcacaaacctagaacatactttcgaaataagaggcgatacgacttgcttcaaaatatactctcacagctttagtcttagtcctattcctttgtgtaggtttgctggtactaggggaaggatgactactggaaaattcttctacatctacaagcacgttatttgatgacatggcttttgatcccacaatcctctttttgttcctacaaaattaacaaaaacaaaaaaaggaagttagggccccaaaaaagtaattatggcaagaacgagattacttatttttcttggaaaaggtgacatggcctattaaactaagaaaaggcattcaaaaaaggtgtcttccatatgtttggtagagcccatgtgtaattctaaagtcatggaaaaatagactgagttgcctatgcgaccttatgctcgacaatattcaacctccacctacatggtacaatggcgcacccatggagattaccattgacacttgtggttatgtggcaatggtccatcgtaaaggactatgtgcttagagtaaggatgaggtgctataataatgggattttgtcatttagggttctcggccgtgagaactcccacatggtgagatgccacttattcaatcaagataaggataatttgacaacacgagtaatcaaacacagtatttgaaaagttgcatgtgtccgagcacccaaagtgaaaaaaacacatatttttctcacttggtaatttcatcgaacatttggtgggactaattttccatcatccaaacctatacccaaaagtttgtaattcttccccaaatttatatatttgaattctaattactcaaattccatcaccaaaatcaataccaatacaaaataaattcaaatcctatccaaattctattcccacaacacatagccaaatacattcaagaaaatacaaaatcaaacctaatttatatttccacaactattccattcatgcaatttgtaccaaaactaatcactagttatcaagaaagtgaaaggagctagaaattaccttaaagaattcaaaaaagccttgaaattttttgaaaaactcttctcccttcaccaatagatggccacggctatgacaagaatttttgggcttttgtgaattttaaatataattggtggatcagaagagagaatggaaaataatgaagagaaaaaaaataccttgagttggtcgtggatttgctttgcttaaggtgaaacaattgttggctccctttgaatgtttggtttgaatgaatgaagtttgaatgtgttgtttgaaagaaagagtaggtttatttaaaggaaaaaagaggcccttgtgtccatgcaccctaattggccaaggatttccaaaaatacccttggcacaactaacccatgctcttcatttaaaatgctgatggcactcctctccctttgacacttgtcacttgcatagataaaatttgtgatttatacatttaattatgtgaaagaaaaaaagaattatcatccttagacaaattaaatttctattcacatagtaaaatttaaagttcacaaattccgagaaaagttattaaaagacgtaattgacttaggtacgcagaggggtactcaataaaacttcagaatgattgaatggttatgtacttagtgtacaccattactagattcagggatgtcctgatcctgaacttaagaaaagatagaactg

SEQ ID NO: 113884 - DNA, 1597 bp, Cannabis sativa
atattattatatatatatatttaaatcaatctaaaataaataatattaatatttataaaactaaatttactaataccattaaatttaacagaatattcttatattcttacactattccgttaaactaacaaaaaccgttaaataaccactaggtttatatacaaagatatcatttcatttcttttctcattttacttttattaattaaaaaataaaaagacaaatataaagttcaaaaatctataatataaaaaataattatattttttaacaataacaatttaatcaaattaaaatattccaattacattttaaattatgtaaacaaaacaaaataattttaattttctttccgatcaatttaataaataacataataaaatataatttctgattaccttatatttaaaatctatttatttcatctatgtggatatatggaatccgattatagtttaacaaatgtgtcttttttgaatttaaaaaaaaaatgttaataactttattttaccacatccatcaacaaaaacaccatttatgactctttcatattgtatcatatatataagcaaattttttctttgtgttgtcatttcctccctatgacattgggttcgttaaaatttgcaaattggaagcacatattccatatctagatgcattggaacccttttaaaaggtggtaaaattaataatcagaattgattgatcgaacttaaccccatacttctttgctgcccaaaacattataaataaacatggtccaactcttttagtacataaaaagccagaggatgttatcatgttgggacgcaaagctttgaaactatacattaaaacttatgtacttaaatgcataaaaattgaaccagtatattaataggtatacccattatagacacaaataaagtgtacatttactaaaataaagcctaaagaaatgacacgcagcctaattatttcccagtcaaattttgtagagattctactgttctagtgttatttctgatgcttttcatgtatataggctcaattatttgatcacctatatttattttatactacttaatgggtccaccaggatcaacaaaaaaacattagcatgcagcccatttttatggccccatattgtctttgaaatatcaatggctttttcttcttttatgatacaaatacactgcctaataatatacactgctttgggttcaaaattcaattacatgttaccacgtaagagtattagattggcatatttaatttctatttattttacattattattaaccaaaagatatatatttgctgaaccaccaagtaaatcccttgttttgagtcttctctccggcaagtggctacaccggttgacataataattctcattaatataaatcttatcatgtaattggagttgatagaagacactgatattgtgtaattggaaaggattgttttgtgatagtcggtagttctgtgattcgtaagagaagatactggataagcagcagggccgtctcaaggtattgagaggcctagggcgaaatttaaaatgaggcctttctttcataaaaattttaaataaatattatttaaatttgaa

SEQ ID NO: 113885 - DNA, 4434 bp, Cannabis sativa
attatttttttatatatttttgagggccccaaaatttaattcgtcttgggcccatatattttcagggccggccctgctaatcaccactactttctagcatttctcatctaaaagatacatgatattattagctaattaattatatgaatacaaatgtaatcctgcagaccagtacttgatcagaacttgtacaacttgggaatgaagtacacctctgcaacattcggatccgctattgtgaacattttacctgctattaccttcataatggctctcgcctttaggtaattaacttacataataataaaaacctgaaatagctggcaactaatttcttcatttttttatttttcttctttataataataataataataaataagtaaatacataaatacactgtccgaaaaatatagttgctttaaagtgaatgtatatttttagtgatgtgatcaatataaaaaataatgtaattatttattgatgatggtcaggttagaaacggtgaatgtgaaaaagtggcatagccttgcaaaggtgatagggacagtaattacagtgtcaggagcaatggtgatgactctttacaaaggccccatccttgacattatacatagcagcagcagcagcagccatgggcattcgggtcagcagaccacgaccgagtcctccgatcaccactgggtcaccggaaccctcatgctggtcgggagttgcggtggctgggctagcttcttcattgtacaatcttttacgttgaagaagtatccggcggaactgtctctgacagcgtggatttgcttgatgggtgtgttggaaggtggggtggtcactcttgtgttcgaacgtgacatgcatgtttgggttctcggatgggattccaggcttcttgctgctgtctactctgttagtaccctgccccttaattattatttacgtataccattttcattaattatgatcaattcaagatatagtgtaccctacctacctgtcgcccatttccgtaagtctaattaattattattggtggtttaatatatagggtgtggtttgctctggaattgcatattatgtgcaaggaatggtgataagagaacgaggcccagtttttgtgacatctttcagtcctctatgcatgatcataacattcgctcttggtgccattgttttggctgaacaagtccaccttggaaggtacctatgattattatcatatattaattaattagaatagaaaattactagaatatatatatttatatataatttttttttctaactgtgtttgtagtctaattttgtttttcaataatattgtgcagtataattggggcattattcatagtcatgggactctacactgtggtttggggtaaaagcaaagatccaatagaatcatcagcaccgtccaaaaatattgatcaattgccaatcacagacaccattgtcaaaccagttactgtcactcctaacaataacaatggaggaggaccactagagatgtccaagatttctacgtcttctcagctcgcttcataaatatataattaatgaatattatatataaagataattaacaatttggggctatctatatataattatatatcatctctagttataaagagcaaatgaaattattacgtatatctcctcgacgagatcgtaatgtctgaagaaatatgcaacttaatttgcttcgttttttcctctacattagctttttatttttattgataaatgtaacttgagagtaattacgagttacagttatataatatatttggctagctagctcctattgtgttttttttttttttgtctacactcttaatccatattttctatttaaatatttatgatttcattatgtatgtagttattagttatattaattacaatttacatttttatgaatttatatatatatataaaatattatagatattgaagcttaattatacaattatatgtatgttaaaaaagaaaatatactattatggatgaaaaagtgataataatatgcaaagagatgagagaataaaatagaatcgaataactgatcactttttctctctctgtatatatatatacgtactgtgtgcggattctcttgtgtcacatctaaagtggagctagaattttttatttcacgatatctatgaatagaaagattaattgataccttatttataaacaagaatgacaaatatatacctgtaagaataattgataactccttaatttttattcatttatttatttatttattttgtaaggttaatatataactccataattagatactgaaagttgagtttaagcttcagctaactcctcatcattatgtactttgtttaaagaaagatataccatcatcatatgcctatgaaacgaataaaggacaagaatagttcttgggcgctgtctatatttttctagagacacatttattaattacttttataaatatatataatagggcaacgatgcataggcattagtttatcacttaataatttatacatgatccaatggttaagagaatttattgtagctttgaggagtgaatagttgataaaatgactcagaacctactaataggggctatcttttacccttatcagattaaattaaagtcttattttttaaatctcacccttatcttcatttcctttcactatttttttttttttataaatattgtttttttttattgattgataaatattgttttactatttacgtaagatgtcttttttgcttttaatttctccctcaagccaagttttgcatttaattttttttcctaaaaaataattttcaaaatgaattttggttggattcatttaccactactacaaattataatattcatgtcagtcaacgctataatttatagcgttggtcgacgtgaacagtacccaaattattggacgtgtctgtttaaaaatgacactaataatatctaattaatgtcatttggttaaatgacggtaaaagggcaactgacgacataaagccaaaaaaaattggatacttgcttttattttgggtctgttattaatagtcgattattgtgtttgtgagggcttaaaattgacgcgaaattaaattgtgagaaatataaacggatgctaatttaataaatcccctaaaatccaaaaatcaattcgccactgttcacacatccctaaccctaaaactcttcgaaagctctggcgaaaccatcctctcgaccccttcgaattcgcccagtaatctccaaaaccaacctcaactctctcgatcgtcctctctgaaaccagcctctcaaccctttcgatcgtcctcttcgaaaccggccactcgagcccctttccctttcgatcgtcctcttccccacgatggtggtttgaagctctctactccgatgtagctctcaacagaagcttctctccttttcctataccattttttgggtaatggtccatctccatttcagctctaaaacttttatttttaaagcttgatatcgtttatgaatggcagctctctgttttggttactaggtcttaggattgaaccacaaaacactaatgatttgtccttatccacaatatatgttgacctcagatttggccaaccgacaatggagtcgaatttaacattgatgcttgccacgtgttacacaattagcataaaaaaataaatagacataagattttatagaggtgactcttaattagcaagtaacgacctactccctttttaattatattgataccagagataataccacttagatcactatagtaatgggatctagaatggctctttaaagattataatgtgagaaccagagttggcaaatctcgagtgagagtagagcaatgtgcgtgtgagagagagacgagatgagttaccagacttagagcttaatgcatatggtttgatacttagggttttagggtttgactaatgctctttatataggagagcctacatccttaatatcccttaaaaataggtaaataaaaatacaaatgactaaactgcccctcgaaaataggaaagttgctgatattttccctttatttacgtgggttgttaaggccaaattcgtggtttgacttgttgtccacggatgaaagctacccactaaaacctgccaagccaaaggctggttaaccatgcatctctaatgtgcatgctggtcggccatatgatgttcaaaagttgactggtctatgcttgttatagggccggccaagggtggccagccaacccccttgaggtgtttggttcgtcatctcatcgtccctcttaagtacttagacccctcgtcggttgaagtgctgagtagatggcttggccttcttgttgacgagttgtactcccatatggcattgatgttggccacatggacatgctgttggaaattattttacc

SEQ ID NO: 113886 - DNA, 672 bp, Cannabis sativa
  modified_base (629)..(647): a, c, t, g, unknown or other
agagagagagagagagaggcggaaattccgtttttttacatttataaatattaaaaaaagtaaaatgggaagttcatgtaatcaaatgaattattttatataaattagttatagggggacagattttataatatggagtgttttattatacatcaatagtaaaattttctcttgttaaattaattatcatcgatctaacaacctgatgggtttctcatgatcagtgattcatatttcacttcttgagttaaccctattctttgaatttatatatatcaatagaaatatataaatttatttataaactgtactcaattgtattttttactatgtattttagtttacattataattataataataagaacatcctacaagtttttttttattttttttgcttgacataattaatgtaataaaatttaagtatattagagagtaaaaactcctgctataggatcgatggttgttatgggatcgggtatatggctcgaaatgtggcaggttccctggttatcatggtgaaagattttgtggggaaagtagcatcggaagtagcaaaagcttcggggataaaggaggtgttgagttggttaaaattgtaggattttattttaccaggatcttannnnnnnnnnnnnnnnnnnttattaacatcctaaataagaactt

SEQ ID NO: 113887 - DNA, 1128 bp, Cannabis sativa
attattattataataaatcttaacaactcacagtactttgaaatttataatttaccaaacactcagctcaacttttttctacagttttactgtagttacttttttttttacagtacagttacaactgttttttctcacagtacagctacagttgtttttttctataacacaattgtgccaaaatgacactaagtgtttgtttatttgtttttttttttttttctctcttttaaagtttttgtatatggaatataaataaataatgactttcaacacggcacacatttcgtgcacaaccatgtttttccatctcctgcgtttgatacatgacatttaacaaacccaccccattcaactataatgatattatttgacacttgatagtctcataatacatcatttatattcatgagttagtaataatcatatcttatgttccctttcaataaatcaataaatattctttcaaaaaaaaaaaaataaatcaataaataaaattacaaaattaaaaaagtcaaaaattaccatcagattcactgtttttgttaaataataatttcgatccggtatttttataaattatactctgagatcaaattttatcaattaatttttaatataatcaatttaaaatttctaataggagtgtaaccaatttcgtcattagattaaattattattatgttttattttaaataaaattttgttgaagatatcatcatgttttatttgaaaattacaatgtaaattattatttaataaataaaaagttcagttaataatttttccaaaacttttgaaatggtattggaattctatagtacatcccttgaaatgatcgcttgggttaacattctatttgttttagaattcaggagagcgttttagttttcttttaatgagtgtatattttagctatttaaaaatatttgtaaattctttgaaaattttaaaaataagattcaagtatttttatttagggatgcacacccgtccttaatggagcgggaattccacgtctaaatggggaacggggcggggacagagattactttttgtctccaaatgttaaacccgtttagtattttattttatatttttaataatattttataaggctaattagga

SEQ ID NO: 113888 - DNA, 7975 bp, Cannabis sativa
catactgtccatgaccaagctcgaggaggacattggggtggtgaccaagaatgtgaatgctctgaaggattaaaaggaaagtctttatactctcttccaaaaccatgaagccgaggttactaagctgaccgaagagaaaaatgccttgtagtaaacccttgatgttgagcgggtaacttttggtgctgggcaagaggcactccaaaaggaagttgagagctatgaaacagtcgcattggacgttttctatgagttctggaaggagaatccaaacgccaacttcgactatctcaagggagatctttgtactagctttcttggcttttgcaaggcacaaaaagttaaggaagaagcgaggatggctgataaagactcctcttccgcccaagagcacgagaaccttgctaccgaagattcaactatagccgctcaagattcacttgatcaatacaaaaagtttgggagtcatttggcatagaattgctcaactttttttatttgttcggcctacaggcctgtttttcggtacaatatagccgaccaaacaactttcaaacttggaaaatatttttattttgcttaagacaattagctcgccaggtagctttttattccaaacttatcattctttgttatcgtaatatgaatatttacctgtaagtctgaatttaatatttttttattgagcttgttttttaccaattcttgtatgggtatagttgccccccaagtgaccgagcaaacttttgactcttgatcacttgcattgcacaagttttattttgtctgcctggtttttaagtttaggcaaaccctttgtacacatttcagaaaattaaataacttaatagaattgaaaaaaaggtaaaaaaaaattgacacaatttgaataacaattaatatctttattcacttattagtcgatatctgttgttaccgtggtaatgtatatttattgaattataataagctattacatgatctacctgatcttcagctaattaaaatataaaacatttgaacgatataatctttccaaaagacattgctcaagagcaatgattttgaacaatatgtactttgaaaatggtcacctgaccttagtactagttgttttttcaaacctttgagttagtcccgctcagaaggctaccacttaagagtggtgttcgagcatggtgcaacttgtgtgcttggaccttttgcacttattggtagtatttttttaggttttcaccattccagtaccttggtactagaacttcttccatggttttatcataccaaccaaatttatatgctctagattttgtaacttcggttacttggtatggtccttcccaattagacctgagtacacctgctacactgtcctttgtgttcaagaatacccttttgagtaccatgtgtcccacaaaaaatatctttccttaacttgtttgttgaagtatcgagccattttttgctgatgagctagtagctttagatttgttggatctctcttttcttcaacatcatcaagtgattctgttagaagggcatggttaatctcgtgattgtaagtcaaccttctgtgggatgaaggttctaactcaacgggcaacattgcctcatagccataggccatggtaaaaggtgtctacctggttgccgttcctttagttgttctgtacgatcaaagtagctctggtagttcttctagcgtcgaatttaggtgttttgccagcaaaacaccttatgtcgatcaagcatccccaatagcctttgccaaggcataagctcgccggcaaaatattactgaagacttatgcctagtttcgccagcgagaaaaatcgccgacaaaggttaattttcttgtagtgacatcatttttcttgggatacatccaaatataattactagcagcctcacgagtccctctagggaaatgctaagtctagattcaacgatgtcctgattatgaacttaaggctacctatcagtcttgttgtgtccttgtcactttgagaaataatacacgtaagaagtgactgcatatcattatgcatgcatggattacttcctttaggtgttttccgctttaaagctttctaaaacacaaaaactttcaatctttgatgagtcaaaactttgagagactatgtttaagacaatcatatgaaagagatcttaacgaaagagtaccaaatactcaatatatctcaaattttatacatggtatcaagaatcataaaaactttatggataaacgaaataatttaatcagcatgtgtactttctttaactaaggcaaaccttagctttccttatcctttcattttatcatcaattgttcatacttaataagtcattaatatctccatatgagaaattttataacatcaagaatttgataaatttaaaagtgccagaatatagcttagtcaccctcaaaaattaataacaacactaatgtgatatttagtcacacatgcattaacaagttatcgtaaattcatcgtatttacaaatattcttaattaacacgattatctcatcagaatagacaatgacgatcatatatgtattgtcgtattcatccaaaaatatgtccacttatgatctatgtattatcttgagcctcaagcataagtatgtagaaatagaagattcacaagttctcccgaaactatttctatgcacaaaatcaaccgacaagtctctgaaagtcatcattgtgaagtaaatataggaatataactttagatgctcaagaaaattcttaagcaattccaccctcataatatttttcatataaggatcaatggacatatatatatatatacctcattataaccggctgacacccatcataatgctcccattgagcatatgcagtaacatggcatctttaaattcaaatgtgatttgaagatttatcaattttgaagcatagtctaatttttttatgagagatcgatatgacaaagcatatgatagtcccatccgataactaatcggtagaggttttaggattgcttaaagctaaaagaaaatatcttagagctctgttactatgtgaaaacaagagttatgcaatctgctcattttcttatcaatgatctatcaacggaaacgatcatgttatgctagagtcattcaaataaaatatatgactcttacttaagtaaggacaactactctaaattttataaccaaattttagttaatccactaccgatagggtagaaaagattgattggttcatgacatttaatgtgtttccttcaccatctaagtatcctacctaacaataaaatcatagacaagatgactaagttacatgtatgaatcttagtattaattatgattaatacgagagaaaattattaacacgaattataatttttggtaattgacatgtgaaaacttactattacatgtaagtataacacattaatgaataatttaatctcataattatctaataaggtcaattgcgatttttaaatttttaacaaattacattatcgtaaaatattaactaaatattggcaataatttctatcataaatgcacaaatattgtccaatattttatcgcacattatccatagtatatgccctgaatgaatttataaatataatgaaattctcaaaaatatcagacatgtatctaacaaaattatgaaataatgaattggtaaagttgagcttgtatgagattaaactaaataataaaaaaaaatattacaattctcacaattttatgattgacaaaattgagatgcttagacccacgatagatgaatacttaagcactcaattaattattcaccaacatcattatattatcaaaaatgtcaatcttctatcaaataatttttatggcatgaatataatgatgttttaatcgaatcaaatgaaaaaaataaaattgtgagaaaaaataaattaattttgtgattatgtgtcaattaacaatttaaattgacaaacccaaaatataatcacacaaataaataggaaaatcaaaatggagtaaaatggaaaaaaattggtccaaaaacgacaccacacacgccctagttttttttagtaccatgtcaagaaaacgacatgtcgtttgggaagaaacgacttaccccctcttacgctaaaataacccgtcgttatctcctggtatggttgcctcattttgaagtaaacgaagtgtcgttttcctcctaacatgagaaagaaaaacgacacgttgttcaaagacatccctgaccttcatctggtgcttgcaggtctggttatcgggttcgtatgacccggatcgtgacccgactaaaaaacacacctctggtggtccatttttgatgttattttgggggtttcatttgtcatgttctttccatttcgcatacgcatttttcccaaaaacaaccttagtcgtgtaataaatcaaaaacaaatatgtagcaaaaaatgtgttcaagaaccatcttctcccatattcgtgccttatgatcctcaaatcaatcttaaaaaaaattcttagagtatctcaaatacagatacaactcatactccatcctaaacaatcaaaaaacatgaaaaatgattaagggtttaccaatccgtgagtatgaaaaaaaataggaaataagaagaaaagaaaaataaataatttttagccttaaaattagatgacctaagctcttgataccaattataaaaattattgagcatcaaaataataacaattatgcttatctaaaaataatacaatatcttcttatttaaagcatcaaatttcatattataaaaggcattcttactttgtaataatgttcatgaattcttacacctcttgtgctcttcttatttcttcaaaagttttgaaaaacaaagtgtgcaagaatttgatgaacactactcttgtattctctcaacacacttagccacacacccatctctcaccactataaataaaagtcataaactcttattatgagagattatgggccaattagacctagatggccaattaaagagaattagttgtcttggcttaatggtctagccaaagatatttttgagcgtgtctataggtcccgagtattgttagtatgttatgtctatttcattatgccccgatagtaatatcatccattacaaattatatatagttattattatatactaatactgacactgagtgaacaacacttaattatattagtcagctgaaaatattctaacattaaaaatgacttctttaagttagtgttgtactagtaggccattctaaaaggaaattaggtaaaagcttccaacttgtaatatcattaccagcgaagaaaatggaataaatatttacatgggcacaaaaacattatctgaacagtccactatgccagtggatacgctaagcacgtgtgctcagaaatagtctataatcatttccttgaaaaaactaagaagattttcataaaccactgctaacaattggaacaaatggcagaccgtactcacttttattgctgaatcaagttgtatgttgtctttggcacaagctcaaaagcattattcatagtatgacaatcacttcattatactctttcacgtcactcatgggttaaacaaccttctcaccttgtgaacgagccttctacatatgggacataccttgctctctccatccattatccttgaaacaaaaaaaccaccctaatggttaatatctctctgtaaaaattatacatacattttctttgttaatccatttaagtacctctgcgcgcaatcatagcaagtagcacaatgaccacaaggaacaaagaagcaattacgctgatcatcgtaacaaataacacataatttcgcatcatacaactcctccgaagtgctacttgacgcctcagattcatcttcttcatgttcaacagttccgtatgtacatcgaattggtttctctgacagcatagggcgagtctcagcaacttcatctactgcagtgttgtatattgcaggtctttcacttacgtcgccatcacaggatccaaggtatttcagtattagaagtataaaaatcgtaataaaccctgtaaaattgttaaatataagtttttgaaaagagggaatacaaataatatgtatatattattttgtcaaatatgttactttgttttacctaaaattgcgatataggttataacacgagccacgaaagaaagctctaggtaccacccttctagatgaccctgtaaataattagattatgtgattaagagagcaggacaatgatcgagttaaacaagttagagaagattgtttggtgggggaaaagccttacgtcgtttggtgtggttagtatgacataatgagtatatgagagaatagttttgagccggcaagatccctttgatgttgaacacttgttcttggctttagtaatatcatacatcattgatgtaacattcacactaagagctacaactatacttcttgaatttgagtttatgatgtcaaggtagtacctctcatcttcctcaataacatactccatctctttatctacactcattcaaaaaatgcttataatttagatgaacaaactagcatggttagcctctgaatatgaattttcttgagaacatgcataggaaaaaaaaaatgagagttaccttctatagaagatgtacttgacaattgaggctgcaatgttttatggatttgttcacctattgaaacacacaaatacagttttcctcaaaggttaataagaaaatcatgatgttatgattcaggcggtgtagctggtaaaattaaagttatcttaaagttgacataacctttactcataatcgcttcaagttgatttattgaactactctgaccttctaacctcaatcttatcctcgaacccttgtttaaccagaacgaaaatccctgcttttaagaatcaaatgaattaaaattaaaaactcaaatttttaattcaataatacaaatgaatcaaccatttgaatctaaataaagtcagagatatgatattgtttagcaagtgttgctagctacctttataccataggatccaagagccaaatatttagacacagtccaatttgtttgggaggtcaattcaggttttccatcaagagcataaagagaaacacctttattattctcatttcttacttcaacttgctgaacaaaaagagagttcgccttaaccagccttgaagattggggtccaagaaccatacggcattctccataatacccatatcgtagagtagccgaaactggagaagaacaaaaaaaaaaaaagtagaaatgccttgtttgagagtgaaaggatgagagagataacaaaagaaactttcatagaaggtgaaaaattacatgccacaaatccagagagtaagaggagttagaatgcaagtccaggagtcatgccacggctgatgagaacgggtaggaaaggtccaaaccggtcgatgcattggttgttgggagaggctccagagagaagatgggttatcggaatagtagctgactctctaaaactagtagtaatacaaaacgaagagaaaaggcatacaatttttgaagttgggaaatgggattagactagtaaatcaccatttgttggaattggagggttgatgtatattgtaatagtattagtcagtacacttctactaaccgttcttaatgagattggcgggttactcgatggcctagtttttgaatgttaggtgttggttattttagtctttttcctcaccctctacccttctcattcgattcgtttggttcttggaatgtggcttttttgtgtaatttatttatatctactatctagaatttcttagtttgttatgtattttgtcagttcgtaataaattaggagaaatgctaaagggtaccaatggtgcctagcaccctcctatgtgtcaatttcgctattggtctaattaagtatcgggttccatataattta

SEQ ID NO: 113889 - DNA, 2974 bp, Cannabis sativa
taatgtaaaaatgagatatttttttaattagatagaaaaactaagcataaaaactcaaatttttcatgatattacccatgaatgggtaatactcattaaaagtgccccatgtatatatataattaatattttaaaataaaaaaaaaaattaaaaatctaatacatatagtatgatgcaaatacacttcaaaatttatatattaagtgtatattccatacatatatattaataaaatataatctaaaacaaaactaaatatttttttctacatacaatttatttttcacttacttagagtcttctattttttgtttcatttatttttatttgttgatagagatataaaataataataatttgtcttattttgttgttagttatgtgaaaatatatatatgttcataaatattaaataattcaatatttaaaaagtaaccaatctaaaataactgatcgaatctaaaattttaaataattcaatattggattggatttaaattattgtgcggattgaattgaattcaaaatataaaatctacagttagtgcggattgaatgcactataaacaaaatagtgtgaattgaattgaataaacacccctaattataccaacgtttatcctactatgagagtattttctatttttgacaatgcaaaaattataattaatttatttttatatggtaagatatataatagttatagtaagtattctctcaattttcaaaaattccttatgaagcctgcgtattttttatacacatagaacttaatattttgaattttgatttttacatggttaaattattcaaaatatctccatatatagtgagatacttgcataactacaatttgtagggaaaattacattactgcctacactaataactcacgagattaatcaatcataaggtcaattttgacctttctcctttagcaatgttagaaagaaaacgacacaacacacacacaaactatattatgttttgataatacacatacaaaatgcaacactcccacaaaaatgaatctcacaatacaaaccctaaatctagaagattcaaaccctagcagagtgtgttcgagcttgaacacctctgatctaccctacatctaagaatcacacaacacaaaataattactagaaaagagagaaatgaaggaatatgttagagatacaaatagagagtaaaagggcacaagtgattgatcccagagttcaccccaatcaagggctacgtctcagttaagctatccttcaagaagagcttgatttccactatcaataatggtggaatacctagtagccttggatttccaaccacagaggtaagactggtaaaccctaaatttctctcgatttctttccttttcttttgcacagggatttctcattaactctctttttctttcttttacatgaacacactaacacgaaggccctctacctctcctcttctctcaagttaatgcagaataatcttgaggtggaaatctcaatctcgagtttagcttttataggcatctagtggagtagagctcgatctgagctgaagtagacctgtacttgtttttttattgtgtttttgttaattgtaacagaattggtagttgtaaactgtttggatgatctggcgtgtaactgaattcgagaatctttaagtctattgtaaattaactgagctataaaaatgatttggtcttgagttagaatagtttatatgggaattcatcccaaattccacctaaatttccatataaactgttttagttgttgatagtgttagttctccgagggtcttagcttgaataattccttatttatcctccaaatccctaatgagttcaagcacaaattgaacttactaagggtaataatcttagtacccatgtcagttgacttttcagaagtagcaatcttctgaatactcacttctccttgtgtcactttatccctgataaagtgatacttaacctcaatatgttttttctatcatgaaacattagattcttgcataaaatgtaagcaactttgactgtctgaaaaatactgtagggatccttttgtctttagtaatttcagttagtaatccttttagccatattgctttctttatggcttatatagcagcaatgtactatgattctattgttgatagagcaacaactggttataaatggactttccaagttacagaacacccattaatagtgagatagtaggttgttatagacttcctgctgtctttatcccctacatagtctacatcacaatacccttcaattctcaggcttgtgttcaatcttttataggtcaaaccaaccttattagtacctagcaaatatcttagagtccacttcacagctcaccagtgaacctttcttgggttagacatgtatttacttaagatacttatggtgcatgctaattcagatcttgtacacaccattagatacattattgatcccacaatattagaataaggagcttcactcatctcattagcttctttatcaattgatgctgattttttataggtttttagtcaccttagcttctttcatagaaaacttttcaagcgcattctcaatgtagtcttcctcgtttagagttagcttccccttttctctatttctcttgatgttcatgcccaaaatcttagtaacatttcccaaatccttcctggtcaaaatagctcttcttgaacctttgtttcagcatgaaaaagacaaattttttttgtcccattgtctaaatgactgcttcaacccatataatgacttctctagcttgcaaacaatgtgttatgtccttttttttatgaaacctttatgttattccatattaatctcctcttctcactcaacattaaggaaagttgtagtcacatccatctgtttcacttctaagtcaaattgtgtaactagagcaagcatgatccttagagttttatgttgggttttgtgcccta

SEQ ID NO: 113890 - DNA, 1433 bp, Cannabis sativa
caactcagccgaaaagaaagagtttcgagtctctcatttttgtacatgtgtcgtgactatattgctgcttgaattatgaacataacgtatgtatttacattaaattatttaatgcttagaagttataattttaaagttaaagctagaaaattgattttgttagaaaaaaattagattgatttctaatttaatatgagaattaatataatcattaatatttttatttacacttaggtgaattctgaaatcttaaataatttctcaaaataccattaaaaatatttgttacttgtcattttaactgttaaacattttattttgttaccaaaaatctcaccattttcgaaactatgttagaattttaataatttagatttttttttaaaaaaaatattttcttcgatttcacacaatttttatggggtcgacctcgtgcttcacaatctctacactataataaaagatttgtgcgctttcaatctcgtgcttcacaatctttaaaaaaaatgtaccatttttgatccaataaatttttggcactattgccggagaattacaaaaagaaaaactactttatccagtttagtaaaattcttctactaattatatacttataatattactactattattatataataaaagatattaattataacataatataatattaatattataaataagagaaaagtaaggttatcatctcaatattatttgtatatcatagtgtacatacactattatagaaaatgtattttatttcgatttttaagtgacatatagagaattaatttgcgttggttggtgtaacaaatgcttatagttatagacacaaataattttattttttgctttagttcataatcgaagcaaatagtaactcatcaactcaaattattagttttttgctttggttatgaatcgaagcaaaagaataaaaaaataaaaataaaataaaaaatacatgaaccactgccaccaccacaccccattggaccgccagaaaaacccaacaacaataaatactgcccccacaacaacccatcgaacaatcaaaagcatatcggaccacctgcaaaaaaatcagagagagagagcctgagagagagagagagacaccagaggagaaagaaattacctctgagtggatggagcttccacttcgtgcgacgacgataacacttacaatagcgatcaactacggtgtggtagacgaggaggagcttggcgcgtgatgacggtggactcggggctttgaggagtagcaactccaaacgagagagagagagagagagagagagagtttggaggctttgagtgcagttgtagagataatatataggtagagttttttttaaaatgggtagaagcccatatttgttatttttttaaggaaaattatagtaaatggccccaaatcataggagtat

SEQ ID NO: 113891 - DNA, 1808 bp, Cannabis sativa
ttcattcagagacgcaaggcctgcacaagcacaaatagcagaagaaaatacaaaggggtctgcttccaattcaagcacttgagctttgtggaacaaaactagagcttcctcataaagtgcagtctgcacatagcctgccatcattgaactccatgtaacgagactcttattcggcatacactcaaagacacaactggcatcctttataaaaccacatttagcataaacatcaagtaatgcagtcccaacaaacacatttgaatccattgatgccttaacagcaaaagcatgtaactgtttacactcaaacacagcaaatttcccagcacatgcacaaagaacactcgaaacagtgaattcactgaaagggtttccttctctttgcatattcaagaagagtccaagagcttcacgttccttcccactatgggtaagtgatccaatcatcgtattccacgaaaccaaactcctttcagacatttcgtcgaacactttgcgagcacaatcaactaacccacatttggcgtacaaatttattagcatgtttgacgttaaagtgtttgtttgaaacccaatacgaatgatctgggaatggcaggcttgtccttccatgatagcccttgtcgttgagcaagcttgcaagagttcatgtaaaagaggaactgggtcagctctttggccaaccggggaaaagcattcttgtgttttaattccatcaagttcaacaatggatatagctgagaattttctgtaacaaagagcagtatgatgatcaagaaatgtcttcttgtatcgtctcaaaacaatcatgtcatacttgcaacaactcacatgctatgactttggatatagctgagagagaattttctgtaacaaagagcatatgtactgtacacgcccaattaaaagcccatccgctttatgtgactatggagtaaggcccaaatggacttcatttttttctatgctaatcaaccacttgtatccaattagttcaagttgattatcattaccaaataaaaaataaaaacttgtatccaatttattattttagaaattgatgtagtagtaatcattacgatggtaaccggttaatatcttattcaacacttcaatttattttattttttttctatattttttttggtatttttatttttaatatttaaagtttactttatgaaattttatcaataaaatttgtattcagtactttaattattgaagctaacttgttaatattacttttcttagtttaaactacatttaatactataaacatttaaatttatatcaaattttaacatggagaataataaaaaggacgtccaactctctaaaagaaaaataaataaataaataaagaatacgcattcttctacttaaattcttagttcaataaacaatgtgttaagagataatatatatggagttatgacaacggctctttcaattaatatagagttgaaaactctctcgagtcacgactacactattaattcacatgaaacatatatatgtctatcttgacttgagtattacgtacgtgcctactcacggtcaaacctataaatatatattctcaagaaattaataaaataaaaataagtaatcactattaaaacttcttacaaactaatagcacatttattatagagtattaataaaataatagaaaaatgtaatagaatgaataaaaaataatcgaaattaatttttgtaatatattatttactaaaattgtttagaaattgaatgatagtgatttatcttgtttactttaccaaaaaaagtaatcagaatgctta

SEQ ID NO: 113892 - DNA, 3968 bp, Cannabis sativa
  modified_base (42)..(45): a, c, t, g, unknown or other
  modified_base (3899)..(3908): a, c, t, g, unknown or other
ctaaacaaaacaagttggtgttttttatatatatatatatannnntatttatatatatatatactagcagaattttacgtgcgatacacgtatgctaatttttatattagactgtttattatcaatggtaaaagaattaggagaatggtgttagtttgtagattattaatgggaatatatatttaaattaaaatagtgtcttcactattttgatctataaattaaatgactattgttagtgaaactgattacaagtaataataatattgtgatattaaaaaataatgtataaggttttgatgattgttcaaaaaatatagcatgtgcacaagcatgctatatttacactaaaagagttacaagaaagtaattgtactaatagcttgatagggaatgcacaattgtcggcaacattgaaatttttgaatatcaagcagatctctaaattagacgaagcagccactctgcccatgtactaatagcttgatagggaatgccccggagttagttttcaaagatcttttctctaaacatggcatctggcatgatttgacgtgtgtcgaaacacccgaacaaaatgccatggctgagagaaaacgccagcatttattgaatgttgcccgagctttatttttccaagccaagatgccaattaagttttggtccgaatgcatacttacttctgcctatttgataaatatgacaccaactcctctcttgggaaacaaaactccctatgaactcctttttgagaaacaacctgattatcatcatcttagatcctttggttgtctcgcatttgcatctaccttgatggctcataagaccaaattctctcctagatactgaacctgtgtttttataggatacctccaaggtgtcaaagggtacaagctttatgatttaaatactaatcaatgttttatttcaagaaatgttgtgtttcatgagaatatttttccatttcacaaacttaatactaatgacagtaatcttgatccttttactcaaattgttttaccacattctatgattaatgacaccccctatttgtgagtatcccacagattatactgagcacactccaactacttctcatgtgcatgaaacaaatgaaaaggacttagaagagcaaacaggccccacgccttcttcatctgcagaaacttgcaccactgctgctcaaaacactgcagcaacacgaaactcttcccaagatgcaccgagaagatcacagagacaaacaaggccaccatctcatttaagggatttcgagtgttattcacttattcaggacacttcctcaacccctcatcctatcaataaagtcatatcttattcgaatttatctgacacatacaaagtttttatcctttcagtgtcttctgtcaaagaatcgaaatcatattttgaagccattcaaattgttggttggctaaaagctatggaatgtgagcttaaggctcttacagacaacaaaacttggactatcgttccattaccagaaaacaaaagagccataggatgtcgatgggtctacaagactaaatataatagcgacggcagttgcacaagggtatacgcaacaagaagggttggatttctttgatactttttctccagttgctaaaatggttacccttaaattacttttagctgtttccactgtcaaaaactggcatattctacaattagacattaataacgccttccttaatggagacctcaatgaagaggtctgcatgtgtataccacaaggtctaactctcccttctactcttaatgtagaaagtaacctggtatgcaaattgcataagtcgatatacgggctcaaacaatcttctaggcagtggtataagaagttatcagacgctcttatgcaagagggattcaaacaatcataggcagattatacgctcttcaccagaggaactgatgagactttcattgctcttctcatatacgtggatgatattgttattactggacccaatatcaacattctccacgatctacaaagctcattacatcgcaaattcaagctcaaagcactaggaaaactgaaatactttctcggttttgaagttgctcatgctcaagatggactctttctttctcaaagaaaatatacactttaattacttgaagattcaggttatatgagcagtaagcctagcaagaccccaatggaccccaaattgaagctcgacaatgaaaatggagaagccttggacaacccctctcattatcgacaacttgttgggaaacttttgtacttaaccttgtctagactagatattacctttgtcgtgaattcccttagtcaattcatggcaaatcctcacacaacgcatctacaagatgtgcatcatcttcttcgatatcttaagggaagccctggacaaggactcttttactcgaagacatctacacttcacctccgcggattctcagattctgactgggcctcttgcccagttacaagacgatctaccaaaggtttttgtatcttcttaggagattgtctcatatcatggcgtacaaagaaacaacttactatctccaagagtttagccgaagctgaatatcgcgccctggctgcgacaactagtgaagtaacttggttacaataccttctacatgatttccacattcctcaaccacaccctgccttcatttattgtgacaacaactcagctatccacattgcaaacaatccaaccttccatgagagaactaaacacatagaactcgactgccacttcatcagagacaagatcaacaactccactatgaggctaattctcatatccagcaaacttcaactggccgatgctttcaccaagcctcttacctcccctattttgagctcacatgtctccaagatgtccgtttttgacatatacgctccattttgaggaggaggtattaaaaatatagaagaatactctttatattttttttccctgtttctctcttttgtcagttttgcttcttgttttcgaagcattaagaatgatgtcaggttttacttaaagtggttagttagttaaagtagtttagcctttctttctctactgttttgtaaccgcctctagctgagtcttgtatttaagactctcttctcattcatcttgtaatatacaatatttttacaatatagaaataaaatactttttctctgttttctcaatacagaacccttttgtgagtacagtctctcatgttttagagaataaaacagttgcttcattgatgaaagtgggcagtcagagagtgggatgctgagttcatagctgatctgttcaacaccagagatcaacaatgcataatgggcattcctttgagtagcaatgtcgatcatgataggttatactagtgcaaggaacactttgggcattacacggtttaaagtgcgtacaaacttttacaggagcaaaaaagagcttggcacacagctgataatgatagcttttggaataaattatatatggaagatcaagatgccctcaaaactgcttaatttactatggctggtctttctaatatatataataattaataacatgggttgtgtcttgctatgatcaattttttttttttttaaaaaaaatgataatggtaaaattaacaattaaattaacttattagaacgtgttgatttccatgtattgtgctgcatgctttaattaatatttaaaagaaatttcaagtcatctcatcaatatataatatagaaaaataatactataggaggaacacttatttaattatttatggaagacttatatcattaatcaattggaacccaactaattaatttcttttctttttttatatatactaaaaaaaaactagctacggagaaaaactgagggccagtttggcacagctgtgcnnnnnnnnnnagcagctgtagctgtgctgtgagaaaaaacaactacaactgagtgtttggtaaattataa

SEQ ID NO: 113893 - DNA, 5545 bp, Cannabis sativa
  modified_base (5493)..(5501): a, c, t, g, unknown or other
tctctctctctctctctcttactactcacactcaaactattcatacattttttcttattattattattcacattttgtaaaagaatcttaattaattttgttaaacagagtattttattcacaatttttctcatatagttttctagttttaactctctctctttcaaaaaaaaaaaaaaaaaattaggggtactcctcctatatctttttttttttttccttttaaatgattaataaaagtaataatttttggatgttttgtagtttcttcgaagttaatttttagataatttgcatattgttatagggttgatgttttgttgttttgtaattatttttatgtggttttcaagttttttttttcaacagttgtttttaatttatgtaaatttgttatggtgtatatttttaatttattcctgacaattgtttttagatgtgcatttgttgtgttgtagttgttttaaaatagttttcagaatatttttagttgtgcaataatttttgagttatttttaaatttatgtacatttattacggtgtatattgatagtttattcttgacaattttttattgtacgtatgttgctttgtagattgtagatgtacatccatttaatattatttttttttgacatattttgtttaaatacaataataaattttttcgtcataatgtgcactaacatatatttagtctattaaaattatattattgtccagataaatttttattattttaattatatattatctattatagaaagttgtttatgtacagtaactaaaacgatatatctgtacataaaataaaagtaattttttttaataggtgtcactattatattttaaaaggaatatccgatggatgctgtgaatattgttcgtcatttttttgccatggggcagtttgaagaagggtgtggcgatgctaatattgtgcttatttcgaaaaagaaaaatatagaaaccatggcagacctccgccctattactctatgtaacgtgttttataaaataattacaaaggtggtggttaatcgtttgaagttgtttatagactctattgtgtccgattcacaaagtgcttttatcctgggaaggctaatatctgataatattcttgtctctttcgaaattattcttcattatttgaagaggaagcgcaaaggaaaagaaggctacatggcactgaaactggatatgagcaaggcttataacagagctgggtagaatttcctagaagctatgctccgaaaaccgggttttaatggtggttggactcggcttttgattaactgtgttaaacctggtacatatacagttattcacaatggtcatgaaatggggacaataattccgtcttgaggcatccgacaaggcgacccgctctctccttacttatttatcttatgccctgaaggtctatcaacgcttctttgtaagtatgaacagaggggctggatacatggttgtaaagttgcaaacagggcccctagaatttcgcacatgttgtttgctgatgatagttacttgtattgtaaagcaactgagggtgaagctcatcgaattcaagaagtacttgggaagtttgaacttgcttctgggcagaaggtgaattattctaaatcatctatctttcacagctcctatactgaagacagtttgagacttagattgagtcacttgcttggaatgttgttagccacggataacagtttttacttgggtttgcctagcactatgagccgtaacaagacaaccctcatgggtttcttaaaaaaaagagtgaggaagcgcctccaagggtgggaatctaaatttttgtctcgtgcggggcaaataaattctaatcaaaaccgtggctcaatccttaccaagtaatgctatgagtatttttctcttgcccctagaaattacacgagacattgagaagtttatgggaaagttttggtggcaatcatcgaatagcttgacctcggggatccattggatgtcttgggatcgtctatgtaatcacaaagcaaagggaggcatggggtttcgtgatctgcgagactttaacttgtcgcttcttggtaaacaaggctggcggttacttaccaaacctgagtctttggttgcaaaagtgtttaaggctcgttactttcccaacacttcttttctcttggctccacttggctccaatcctagttttgtatggcaaagcgtttgggaggctcaaagtttagtgactaaggggactcattggtctattggggatggctctctaatctcggttagtggggagtcgtggctgcccgatgacactaacccttatattatctctgcacacccaagtcttagtaatgccaaggtctgtaacttgttgtgtcttgaggatatttatcgggataatgaaattcttgaagacttgtttgaccaaagagataaggagttaattagaaagaaatctctccaaattgcccaaggacctggccatatggtatggagcaaagaaattttagggcattataccgttaagagtgcatacaagctgcttcaaaagatgaagggaagctgggatacagaggatacaacagtcacaaaattctagaagaagctttggggtctaaaaaactccctccaaagatgaagaacttgttgtggtgggtgggcaaagagtgtcttccaacaatggtgattcttcgaaccaaaagagttgaggttagttctctatgccctgtttgtagtgtggaggatgagactattttgtatgctttagtttcttgtcctgctgcggcttcatgttgggaaagagaaggaatcggcaccaatttccatccacaaactacattccttgattggtgcattttctgttttcagcttggggatttggataaaaagtgtctaatggtggccatctgttgggccatttggaatgcaaagaatgattgggtgtggcaaaagaaggcggcaaggcccgatagcatagtgtcattagcagaagggtaccttaatcaatggagagttgctcaaaactcagagattgagtcatcatggtctaactttcagttgggtgatggggcggagcaatggatgttactaccgttgaatagtattaaggtcaatgttaatgccgttttgtttgatgaaggtcaaaggtttagggtcggctatgtggcccatgattctaaaggtttatttcttgaaggttgcacaaccctccataattgggtggataccccagaacttgtcgaaggtttgggatttcgtgaggctctaagctggatcaaagagcgtgaatggcagcgggtaattcttgaaactgattgtttgaccgttgtgcaggcttaacgaagtttcgtgcatatgattttgctatttggtcaagttattaatgattgttaaagtttactttctgttttgtgaaatgtttctattgtctttgtgttaaacacgatctcagctaatatggcggctcataattttgctagagcttctatattatatcctggtcgtcagttcagtttggaggatgttccagctgacttgataccttacttggtagctgaatttgttggttaattttaatgcaagaatttattttccattaaaaaaaaaaaaaataaagaaaagaaggaaatccgatggtaacattatggaagattccttttatatttggttactaataaaaatatatttttagaatgttttaattaataatatatcattaatagattaaatatatatacattaatactctcttgtaataataaattgatttggtattgtggtaagacgtataacggttcacgttgaagatataaatttaacacttggttggactctttattttatattattttgcactgaaatttattaaaaaatacagactcagtttcagttgggagtcgaactcagacaggcaagcaaaatctcataataagagactcataccccattaaattaatgtagttttgtgttaatagcagtacaaataaatattcaattattacattaaatatgtaaatatttttttacgacagtcccatcttactttgcctaccccttgaaccagtactatatttttattttcatttatttatgacgtaaatttttaagtttaactctcggttgtaaataaatatctaagtttaatttttgaaattaataatacataagttatattttttgaactttcgtatataggtaactgaccataaagtgtgaagttattacgtgtcatttttttatttgtatatttaaattaatttttaattaaaaaatattaatctaatgaccttgacaaattaaaaactgtgacgtggctattgacttgacacttaagggtcagatacctacaaaaatgttagaaatataatttaggtatttatctgcaaccgaaaattaaacttaagtatttatgccaaaaataactcttctatttttctataaacttttggtaatcaaattatatttttataaaagtatggtatttttgtcaatgtctttataatttttatttttaaaattgcttttattcgctcttattctttttttaatcattatcctttttctagttacatattgttttctttttgagaaaataaactatattattataaattaagaaatgtcatttacaataacagagtgaaaggaaggaggtaggtcctccaaccatgaacaagcttcatccaactctagagaatatcgtgctaatgaatgagcagccatgttgggtgatcttttaacatgattaatagagactctaggaaaaaaagatagaagactagtaatatctacaattaaatcattaaaagatgatatggctgaaaaaggagcatttaaagcattagagaccattagagcgtctgttgcaatctgcccaatcagttgttgtagctgaatagcccagttaagactatagaataaagcatttgcctctatctcatgcgatgtaaagttaccaatgatgggttttgagaaagcggcaacgactcttccatatgcatctcgtataatagctccaatactgataatgtttttagctttgtcacacgttgcatcaacgttgagctttaaaattccaacctctggtggctgccatggttcagatggaagcgcttgtgcattaggtgaagcagtagctgtaggtgattggtattttgctcttgctcgatggtaattctgcagataattggcagtaaaaggaaagactaactttgctggttttgcagctttcccgtgtaccacattgtttctctcataccatattgaccacatagtacaaagaatgaattccatgtaagtttttgtgtagatggatgagaggtgcactaaataatctccttttttcattgatcttgcaagattttgatcaaacacaaagtctgaacaacgccatacggctcgcgcgtattttcaatcaaacatggcatttccaatggattcccatgcttgtttacagatggagcatgtggcatctgtaattgttgggttttatgcccnnnnnnnnnctctatttcaatgtaatccatattattcaatatcaataaagtaa

SEQ ID NO: 113894 - DNA, 5735 bp, Cannabis sativa
  modified_base (5303)..(5305): a, c, t, g, unknown or other
ccccccccaaacaacttgaatacacagctctgaacctaggctctcatactcattaactctcactctattctcctcctcagaactgaaaaggagaagctatttaaatgtatatctctccaccagaaaaccaggtgcaaataacagcacctcataactgaactaactaacttaactgtcaaagttaattaaagttcggtgagttagttgtaggttgatttagaggacaaattaccataaattccaccttgattctctaaagcaaactactagcttccttttcacataagccttgatgatgttgaattctcaaaggtttcaacaattaccaatgttcagcaaactgacacaatgcatcagtttgttgaaggtgagaacctttgttcccatgtctatagggttgtcacttgtgtgcaccttttccagctctaaaaccttgtcaataatcttttctcgaatccagtatagtttgatgtcaatgtatttgcttttctcatgatacagaggattttttacacaaatgaattgatgaaagactatcagattagactattcctttatccttgagcagttgcaattcttgtagcgttccctatagcaagatagcttctttggaagcttagtggtggccatgaattttgatttggttattgaaagtgccaccacttgttgttgttgagacttccagcaaatgcaactcttgttgaccataaacacatatgctgtagtagatcttctgttgtccttgtttgatgcataatcagcagcaacatagccttctaacctcacatttcatgagtctctttgatagattaaaccatacttgagtgttcctttcaagtatcttatcaactatttcattgaattccaatgttctaacctaggatttgccataaacctgctcaatacacatagggggtgagttatatcaggtctagtgctcaccgtgatatacataaggcatccaacagccatagcatatggtaccctcttcatgctttcgctttctattttagtcttaggacactgctcatttgacagcttaaattgcccagcaagtggtactgctgttgtcttggatgaatccaagctgaactttttaatcactttctcaatgtagctattcagagttagcattatctttccttcttgcctattttcttacaacttcaataccaaagattttcttgacagctccaagatcctccattttgaattcaaaacttagtttgtccttagtgacttgaaattctgtcttgtgtttgatgatgatcatcatgtcatcaacatagagcagtaggtagacaaccttaggtgtccctaattccttgtagtagagacaagagtcaaatttggatcttgaaaatctaatactttgaacagacatgttgaacctttaattccactgcctaggtgatttctttaacccatacagtgaccttttcaacaagcataccggttcagttttaccgttttccacctgaaaaccaggtggttgctccatgaatatctcctcatccaaaaaagcatttaggaaagcaattttgacatctaactgctcaacctccaagtcatagtgtgaagtaatagcaagtattatcctaatggttttgtatttcaccactggtgagaaaatatctgtgtagtctatcacttctacctgtgtgaacccctttgctaccaacctagcattgtagctaggtggctcaccttctgtcattccctctttctgattaaacaaccacctgcaagaggcaaccttcttgtcttgtggcctaggaaccaaaatccaggtttcgttcttctttagagattgcatctcttctcccattccagcaagccatttcttccttgatttacttgcagtagcttcttcataagtaattacttctaaattattttttgactgtactacagccaaggcataagcttttaagtcaaccccaccatacctgcttgggggttttatttctcttctagttctttctcttgtcaattggtagttagtcaaactggttgattatcttgaccatttttcaaagtgtccacctcagatgttccctcagcatgttcctctatagtagcctatgtttccacctcaatttctgtctccgctacaagtgtgtgttgtgattcatgtgagaattcaattttgtgaaaatttatctccagctcagctattagtacatgcagcatcggaaactttgcctttctttgctatcaagtgcatgaaatcatgctcattaaagattacatttctagatataataatcttaggttttctatttcaatttgacacaacctatatcctttaacagccttaggatatccaagaatgaagcatttaatgactctaggttccaatttatcaagcttttggtgagcatatgcagtgcaaccaaagattctgaagtgattcagttttggtgtggtgccatgcaatttttcatagggattttttcaggtcaatgactctactaggacttctattgatcaagtaacatgcagtaatgagaacttcccccaatagattttccctagaccagaactaatcagcaagcatcttactttatataataaggtcctattaaatatctcagtaacaccattttactgaggtgtgtgcttaacagtcctatgcctaacaattccaaactcataacacaacaagccaaattcggtgttgataaattctaagccattaatcctaagaactttcaatttcttttcatactgattttctacctcagttttccattctatgaatttttctagacattcttttttggttttaagcaaataaacccatacatgcctaataaaatcttcaacaatagacaggcaatagtgtttaccttagtgtgttacaaccttgtgagatccccacaaatgagcatggacatattctaatggtctttttgaactatgagtgcctgccatgaacttcaacctttgatgctttcccaacacacaatcacagaatggcagtcaagttgtttttaaattgcctagaagtccttgcttggtcaattctttgattctttgctcactcatatgactcatcctcttgtgccatatttctatctcatattcttaatgttgtacaatactggcttctgaagccattactgtttctcttgcaagatgtacaagccattcttcttttcacctttcatgatggtaagagatccctttgtaattctcattattgctggatttgtagctatatccttcatcttcaagggttcctaatgaaaccagattccttctcagtttaggtatatgtctcacctcatgcagcattcaaatagttccatcatagtgctttatggccacttttccaatgctagttaccctacaagattgtcatttcccattagtacagtaccagaattgacttttctataatcaacaaacttttcaagggtaggacagatatggtatgtgcatccagaatcaagaatccattcttcaatgattctttgatctgaaaacatgtacaagtcaccatcagaagaacaatggtctgtgtctttcacatttgaagttgaatcatgcttcttttccctatattctttgaatttattattaaactcaacacaaaatcttttgatgtgtccaaatttcccacaaaaatagcacctcctgtctttgtgatattttcctctaaacattgatcttgactgagatctatgctggcccttgaagtgatctctctagtaatgatctctacccctggtattgtcttttcctcgagcaatgtaagcttcatctttaatcttgtctttttctttggaaatctcctattctttggattttaatgctctaagaacatcattaagggtaagagtatcccttccatacttgattactgccttcagctcttgttatgcagctcgcacggatctaaggagaatgacagcttggctctcctaatcaactttgtaattcaagtttgccaaacctataagaatttgattaaaagcatcaagattattatctagagacaaatgagaaaacattttaaaatcatataaagattctaacaaattaatcttgttagttagtgaaggtttcatgtaaatttcttcaagtttactccacaactctcaagctgtcttcatgctctgaacgtttctcctaactgtgttggacagatacattatgatagtgcaataggttaattctttcatatcctcaacttcttcttcttcaaattgccagtgagttcttctttgggttttaaagccttggtaaccttttgatgaacgagtattctcttcaggctttttgtccacaggcgaaaatcccctgttccattgaacttctcaagttcaaaccttgttgttctagtcatggcttagtacaagtgagttcctgattgaatcttgaacttttacttcctcagtatggatcttgaacctaagctctgtttttttgtaaatttggcatcaacaacaccaagattctagagttaaacctgcaataaaattgttaatatgaacagcaacaaatcacaaacatttgaacaacacaatcgataagaatagaaattaacaagaaagaaaacaccaatttttatcctggtttcggtcctagagatcaagaatgatccctagccatactccagcttagaaacaccatcttgctttcattaatggagaataagagagtttacaaacacaaatgacagagcactaagctcttctgcactcgagaactcccagagaacaatcacagttctcacccctttaccccgagtacaccctcaattcttgacgccataagaacttgaatacacaactctaaacctaggatctcatacttagttcctctcactctattctcctcccaataaatgaaaaggagaagatatttaaatgtatatctctctaccaaaaaccaggtgcaaataacaacacctcataactgaactaactaacttaattgtcagagttagttaaagttaggtgagttagttgtaggttgttttagaggatgagttaccacatatattgtaaattattctgaatttcttaaaattttgtagggtatcttaaataacaataaagtatacaaacatgaaaagcatagattaaaaaatcgtctagatgttgaaataggtaaaggatgcatcagtgcatccctttttgatgaggtgtattgtagaagcacccttaatttattatgattatcataagagaatttctaaaaggcatcgtttgtctaatatctcgataagtctaatggtaaataattagggttttatatttatattatgagttaatcaggtaataagtgggatnnngatcctactaatttatttcagcataaaatttaaattttgctaaaagtaagtaaataatcgtaatttgttaattacagagatttataaagcatgtgtgaatgtaatatgagctataagtggaaaaaaaatttcaggttcggtgactctgaagagtcaataagtggatatataaatgtaatttgttaattacggagatttatttgaaatacgtggaaataatgagttatttgtaaaataaaaatattttcaagttcggtgaccctagagacccgattggaggccaaaaatgtcacaacgattttagttagaattattgataacattattatgacaaattgatggctaattagaaatttttccccccgaactttgacatatacaaaatcatgcctcctgaacttttttggccgttaaaaatcccccctgaact

SEQ ID NO: 113895 - DNA, 1560 bp, Cannabis sativa
aaccacaactttaatcattaattaatcttttaattaattgttgattttcttttctttttccaatattcattatattaatctgtttttcctccttaaattatttacatgatcaccatttaaacattaataaattaatatattgatacataacagaatcaatcaatcaataattgaaaatccaaataataaataaataaaattactaacaacaagagaattagcattaataatcatcaacaagtattattattattattgctattattgttcttgtgattaggtgaggaagatgaagctgttgaggatgaaacttcatagctacaaatagggcaagatttcttgatttgaagccactttgttatgcaatctaaatgataaggatgttcacatggaagctcaaccaaattattattatcatcttcatcttcatgatcatattcaatttggcaaatcacacacttatcaatatcattaccattttctttcttcttcatcaccatttggttactattactaattgtaataggtttcaaacatgaagaaatttcattaggagagagacctctttgctcaactccaatgaactctcccaaagctatcaattcttcatatgtcaacacatctacatccaaatcatcatcgtcgtcctcatattcttccatgttttcatcttcttcttcttcgtcatccagaaaccctagctcaacttcgaatccgctggaatcaaagaaaaactcgtagtcttcttgattgtactcataatttgagtctgcttcgctttcagtggtggagacctcgggctctgtggaagatcgttcttgctcttgcaaagacatggctaagacgaaatttggatcgtctgatgattgacttggctctttggtagcttgatcatggttgtcatccattattgatgaagattttgatatttttagagagagagaagaagaagaagaagaagaagataagaaggatgagagagagagagagaggattagagaaaagggttatagagagaatatagctagggtttttttagtgtttgtttggagtgaaagcaaccttcatatggatagtaatggagaaaagggaaagaaaattctcaagtcttatctaaagttagacttgtagaaaagtcttatatgaagaattattatatataacacttttttttatatattggtggctttgtggagaaggtaaactttgacggaaggcaaaggaggtgtcatgtaaagggttacaacgttattccaattttcaaactttgaaattaagatttctacgttggcctttttgattatttattaattttattaatttatatttagtagtgcttaattacttgcaccatattttaggtaaccaaacacggattggtcaacaaaattccaagtgtttcgtacgtgttcatacttctacgtgggggcccaaatgatatatatgattattcactaaaaaagaattttaattttagtcacaacaaaatttgcggctaaagataaaaaaattgtaactaattataaattatcattattgtgttgtgactaaaaaatctgt

SEQ ID NO: 113896 - DNA, 1961 bp, Cannabis sativa
  modified_base (1212)..(1212): a, c, t, g, unknown or other
taaattaaatattatttatttttgattcatttatttctttccgaactcataatataatacttaatataaaacataacatacgtgcgatgcacgtaatactagtatacatatatttatataaagatttattggcgtgtggtgagggatgcgcgtataagatgcaatctatttttttcttaatgaccaagatcaacatatataaaaacgtacgattaaatggtataatatgtatattatcaatttttatcaaacctaattatcaaaaccctattatatataggattagcttgctagtaatataaatatataatatttggtataatattattacctacctttgatatataatctcactttttttttttttaatttttggaggtgtgttagggtcaatattgtggatcgattaattaacaaataacaacaaaagctactgagatcgacatagactttgtaaacaatcagtaatatatttcaataaaaaaaacagtaataaatagaataaatatgaccaacaaaagttgtgcatattaaaagttccaacaaaataaatatgaccaataattaaaaaaaaaaatcaaatctcaattcttatccaataaataataaattattaagtcacttaaaataacaatattatcatacaatattatacatgcatgaaaaagagtttgtaggaattaatttagggcaacgccacgggtggcaccaccaccgcgggctggtgctggggctggggctggggccggagccacctatcaaaggatgctgcaaccggggctggagtaagaagtgtggctgacggcgacgagttggcaatcgttgcagtatggagggagaattatgataattttgggttgttctattggcttgggtggtccaacacttacaatagtagcacattttccagccttttttatttgtttgactatcataactgggtcaacatctcccaccaccgttactgtccccttttctggatcaaccccaacttcgtttatccctatatataaatttaaattaaattaaacatttatttattttcaaaattatatgtatatatatttatacttaattaccttcaagcttggtgaccgatgttagtacttccttcttgcacttttcacagaagatgtttacattcaacacgattttctgaaaatatattcgaaaaattaaagagacacaaaataattaatatatatatatatntatatatatatacatgtgtgtgtggtttaatttacgtaccttcattatggatattatggagatgtaattgataaaagaaattaggaggaggtacgtgcttataatagtatagtaatgagtttattgaaatttttttgattgggagaaattcaggtaatttgtggattgtaatgatggagggtttctataaataggggaaaaatctatgataacattcattaataataattaaagcataacaattcagttttatttactgggtcccaacccaactatataaatatatatatatatatatatatattattacatatatattgtgatctgctccctaatctctatacgaaccttaccagaagctggacttgtcaatttatactagtatttttatacgttgcatgttgacattcaaaataacgtacgttgacgtacgtaaataaatttatacaaatcatctttatttttgagaaatgcaataaatattaaattattaaggaaaattgctacatataggattatcacttttgctcttattgtatagggatatttttattttgtatataaagagttttctatcagttttcttttatatgatgatatatatatatatatatattatagatattgttgtgtttgtttttcaaaaataatttaattatgatgctaaaaataatatttaaatagttaattgcacacttacttattttagaggaaattatactccatatcctttttatattgtcctcttt

SEQ ID NO: 113897 - DNA, 4558 bp, Cannabis sativa
  modified_base (842)..(842): a, c, t, g, unknown or other
aaaattgatttctcaattttactataaataagatttattatttattttaactaataaataataattgattaattctcattaatcttttatttcacaaggattaaaataaatgtcattttctctaccataatatatttctctctttaatattattaagaaataatattatatttaactaattaatatagctttatctaataaagctaaatggttaaatactattaattacacaattcataattgtcataattaatcaaaacaatcatttcacaaattattatttttctcttaagaatttatttcccatagaaattatttctcactcgaaatccattcatcaaataaaacatttccctatacagttttgtatagaggtgattcggggaccatgaacttatatttcaaagctccaagaaacacttgattattatcgatcttatcaatagaataatttggtttattaattccattattactccactataaaggttgaattgcactctttgacaatatagaattctgtttatagaattcttacttataatccattaatataatcaatataagcagtttgccctccaattattagttcataattagagttggtcaaaataccgttttacccttctaattatctcttgattccttatgtaccattaattcaatgtgaacaattaatctataacttattatagatttagatccaactattagcactcttagaattaacacaataagaaaactaatattcgatccattaggaaagtctggattccactatcgtataacatgttcccatcctctcatgttattcagctaccaaaatagaagttgtaagaatnatcttctctgagaaactttaacaagtgaatcaaagaactcaatgaacacaaataagaattcatgtatactcaagatttagactgatctattaatgatcatcattgtgatacgaataactctttcatggtaagcaacacgttaatgaaagatgtttatcacatatcgacctagtcatacataatcaaattatacacaacacctttactacatgtctatccacatatgtgatccgaatcaaaatcacacacactagaagtatagtgtatactataccgtacttagcatatccatattaaagattcccattactttaatacgttaccgacttattttattcatatcgtataatcttaattctattgtacatccttacaagattataccttcttcatataaataaggaatttttagatatttaataattatatactattataattaatgtatcatttatcttataattgtatttcatatattctctaatatataatccattaactacttgcttttagggcacaaatcccaaaaatctcccagttgcactaaaagtaagtgctacttattctataactcttatagacgttgtatctcatttgattgttcaagctaagtcatatgaacaagacctttcacataatgtagttccagactccaaagttaatgaactcaatagatcccttggctaatcaagttggatgtttagaatgaactattttatttcacatccttgtcttgtcacatttaagtgattcttttatttaagattacataattaataaaaatatttatttctcatttctgaaacgataatataatgtgtatattcttaaattaattatctctctttaatcttaaattctaataaatcttttaaatggattcacctcttgaatgatcttttaaatataatcccaacatacttaatacccccactcaattagatagttccttatttgtctattgttttttatcatttaattaagactgttcttgcaaagaagaaatcactcctacacaagatctgaacatgcatttcaatactagagcaataatcaacagtgcaaaggaggggagaatacttacttgaaggagaaggagatggtgaggtggtaagattggtggcaccgtaacctcaggagtagaatctccggcacgacaacgaagtgaggcctaaaaattgtacacccaagcaagtatttcaccgattcctgcttgaatgttcaaaggctttgacgaacttgaatgactgatcaataaatttggtggaaattctccttgattttctcttgttcaaattcgaaaaagaaggttaaggacgtcgtcaaactaggggcgagaatggggttttttttgctctctttctcttggtttcaactcaagatgcaaaatgaaaaaaatggtgaagtgtgtttcttcccctatttataagtggaagacgtcaatccgagtgcttccccaatcaacagtttagatgacatctcagaaaatacaatagcaattagacagttggggagtggaaaagtcagcatttaatgcttgtcattagaaccgaggtgtttttcatcataacatttgtctcgatacgtacactgacataaattagccgtcaacacaccatcctaagcatcatgtgctttttcaatgtgcatggattccccgaaccaagaggctaatgccacgtgtatgacattagccgtactccaagagtccccaaccttccacatccaagaaacgtaaaaatggagaaggtctcttcttttctccaaattacccacgtgtccatgacaattcggaaggaagactgcaagcttcggccactctcaagtcccgaaagcttgtgggtaaatattatatgtgtttcccgaagggtgatacgtgtcgatcctgactttacagggtagcccaatatggtctaactaatagtctctctgtgaggataggtttgacccatattgaaggatgggcccaagcccatctagagcccaaaagacttgccttccaagacgaggtttattagggtctaggaaggcctcttggcttccttgtatggaataaggttattcaaaaaaatttacaaaccgtccaacctgaataaactgcccaaacaaaccgaataaaccatcaaaaaatacaatcagaataactttacaaaaaattcaaatcgcccaaagaatatattgggcgggctgaatattattctaacccgcccaaataacccgaacaaatcgaataaaacaatttaaatatttttcaataaaattatttataatatataatatataaattacattcaataattaaaatattttacatttaaagtttgtattttatagtgtttaatttaaaatttaaaatttatagttgattattttaattgtatttgaatattgaagttgaaatttagaatttacatatgagtatatttttttattctattttttgaaaaatattgtttaatacgttaatgtttattcaatttatatatatttttaacattaatttaaactataaatattttaatcttgaaaggcctatactatacatttaatttttcaaatcaattatttgaacacaaaaaactaacaataatgaaaaaaaataaaaaataaagatcgatttaaacatgttaacccgaccaaactgacgaaaattattgggcgggttacacttttttttttttaatttttcattagacgagttataattagatatttgcaacccaacatttatataggcttggtaaaaatacattataacccgaccaaatcgactgatgtacacccctagtatggaacagtcgaagccttccgaatgagagatgggacacgtccagaaagagtactctaagaggtgcctcaaagcctagtataggatgatgtggttgcactctgacacccgatcccacaaaatcaggggcttgtcccccgtgtcaaagcataagtgtgtgcgcaccacaataaggagactaccctccttgtccaacgccacaaatttgacataacattacatacatgcgacgcacacaaaacatttgtcaaggatctcgtggtcctcaggcgtacacaacaccttcgccccacgaattggacatgagccagtgggcccatagtcacttatttaatgtatttaccccattagtgggctaagttgatacaaaaatcctagcgggtcgcgggtaaacctagatatgattcctagcctataaatattgtactatactctcatgcaaagggggaacttccagagtgtgaaatgaaagtgagaaaacactatagcaagaaactagggttcttgaacttgtaacccaattgtataagtgactcgtggattaggattagttaatgccgaactatgtaaaaaatttctattatgtcagactaataatatagacaatgttagggtggatggcagggctggccctgggcataagcgggctaggcctgtgcctagggcccacctagtctaagggcccaaaaaaaatcttttccttttaaaattatacaatttttttttgttgattttgaaaaatactactttttttctttctaaataagggcccaaaaataatttttttcctatggcccacaaaatttctgggctggccctggatggtgaactaatttggatggattcttcatctttttttcatgatgtactattcttgtatagtttttcaatgaaatgtttgttcattgataaaaaaaaaaaaaaaaaa

SEQ ID NO: 113898 - DNA, 2172 bp, Cannabis sativa
acaacataacagaaactaaccaacttaactaactgaaaataattgtctaactgtacaactaacagacataacaaactcattctttaacatggagaggctgggttgatgatataaaaagcacttcaggttatattttctctcttggctctggtgtattttcttggttgtccaaaaagcaacaatgagttgctcaatcctcaaatgtataagaatatatttcagcttcaattgcaacttctcaagttatttggcttaaaaggattttggaagacatagcgaaaaaacaagaaaaagctactgagctattttgtgacaagaagtcagtattgcaatggccaaaattccttgctttcattagaaaacaaggcatattgcaattaagtaccactttattagagaagcaattgaaaatagagaagtgcaaatcaaatattgtagctatgaagaataagtggcagacattttgacaaaggcacttccactagcaaagtttcagttactaatatcagcccttggagttaaagacagcaaaattaatggggagcatattagttaatgtgttgttatgttattaattttacttatattttgtattttttggaaaacccgattaaggacttatatttaaacaagagtagggctgagatttgaagtaaaaaaagaaagtgttggagaagcttatttcttttgtatcaaaaaacatcaatagaacacacatattttgcccatttttcctctgtttttcctctgcattttcgtttcattttgcttgtgaaagtattgaactaggtaggaatttcttctcctgtttcattgctgaaacaacagccaacataaactacaacaaaacatggacagaagatatttttgctgctaagaaaataagtactactaatgtattaacttggatattttgggctcaaatatctctgttaaaaatagtgaagagtataagtggttaatattttttataaaatatatatattatatattatgacttactgatctctcttttggtcaccccagtcactccatccttgaggaataacaatgttatccataaaagtgtaagagaagacaaccctggaatagtcaccccaagctcttccaaggtacaagtgcccactcccagtgaccacactgtctttaaaggaaaacccactttctaaggatgtaatgctcctcttctgggctgtcgcccaggccactttcttggcggttgagttgagataacagccgtcgtataaggatctgccgtacccaaaaatgaagtcgacggagccttggatgaagcagttgtggaagtagtgaaggcccttgtgatcgtacagagtgtcttggcttccataaaagctgcagttgtaaaatgcagccttcgttcctgatatcctcatcgccaccgcttgtcctttccgcgacccaacctcatgtggagccgtgttctgataaatcatattataaattattaattctatccaatttttttctttcagttaactatagttacaattttaatgttaactagttataattacacgatctcttctactgctctacattatcttgtcatggctaattggtagatttttcttattaatttcttcactagttgctagcttggaggttggttgcctcgtggcaatatatataatatatatattaaataccataaactcgcaaataataattactaatagagctcttgctgacttgttttggcagaggccaaaacggttattttcatcaacaaaaggtcacatacttttcccacgcattataaagtcgggaaagtcagctaaggtacaatagtaagtaacttttgcggtggcatttcgtttagtacggacgaaagtattctttctgggccactgataatgcctatggccactaaaaacttcttcaagcaattatatcgtggtactacttttgtttgagataaaatgcactaactacttacgtgtttagcagacaggactctcacaaaacgctttcgtaaagtttccctcactcccaaaaaaaaaaccttggcaccagagcgaaacctttagccgacactctttggtgatacttgcccctaagggggcgtttggtacgaggtgttcaaaataatttgattatagggaatattatgaaggagaatatgattatagggaaatgtgtaaactgtgtttg

SEQ ID NO: 113899 - DNA, 2691 bp, Cannabis sativa
ttatagaataagtcctccagccaagggttgagatcctacataattaataaaattaaaataaagtacattcccgaaaattcgggaaagtagtacgattagaaaactaaaatctagatgcatgtttttattaacatccatacaacgtaaaataaaaacaactaatcatgaatatagagtatttaatacgtaaataaaaattatagaactacttacgtgatgcgtaacagaacaataactcattcatttagaattttttacctttgagtccaaatagtagcaagaaattgtcaagaatctaaacctcatttatctctgatcaagcttgatttcgggtggatttgctctcagcacatgagttagaatattcgagggagaaagagcctgtaatgcgtgatcaagcaaagggagagattgtaatcgtcaaatatacatggaaaactatacctttaaggtagacttttgtggtgtgtttgcatattataatgagttcaatgagtcaccatacctgaatatcctacgtttctcttatcaagcttttgatgatgatgagctacttactactaatggcggtgatatagctctagactcttagtctagaccagtaagttttgatgtatcatgaatagtgggacatgatgtttagttctgtgatattatttagtatgtgtgagaaacttatagactttgcttaacttaccttgcttactttgaatattgttattctctttttcaatcacatcttgcttaatgaattcatcggattgggtgaatttatcgaactgatgatggcctgagagtataaaggtctaacacaacaaattgaccttatgtaacattaatacattttcttttacattcattaaaaaaaaacaaattgaccttatgtaacaggaccattaatacattttttttacattcattaaaaaaaaaaattgaccttatgtaacattcattatgttatttataaggaaaataatgtctttaaaaaggaaaacaagattgaccctaatttaataaagacaaaattgtttccctcggtctgctagagttatctcaaaaaaacctagccaccagtcttagttcgtcttctgaccaggcctgctaaccatttccaagcttgggtgtggctctgattgggttccttatttggcacgttgggataagtagatggttcacctcaatctcgtctctcatagtttctctctatttctcctaggattgttatgcgttttccaaacctagtgtgctatggggcaatggtgatcagtccagatccggcagggcctagtagaggtttggtggttctaggttgggttggttatggattctagtaggaaaggagatcatgtttggtttgtagggtgtgggaggacaatgcggtcaggtttgggcttcgtttcaaaccatgggtctctttatggattgttcgaatctggtgtgtggcagcttgagggtgtgagggatccttaaaagattgaagttgattggtagattggtatctttcgtttgccctttttggtgtcttgttttagttttttttattatttcttgtattttatttttataataatgttttttcatcgccattctagattagtagggattgatattggcctggtgcaagatgcaagccttgcctcctattgtttttttgtgtctcattgataattcaaatcgttttggcaaggacatctctgtctctttccttggtcgtcagatttggaggatctccaaatctatattggtcatttattatgtgctccaatcttttgtgattaaccatatcacaacatggttggtcgtgttatttctcttatttataatttaaataatgagcttattatgtctctaatttttattgaaagattattggctaataatttttgataggtgaattctgttatatgttcatttgatttggaagcctaatatactccaccctttcttgatgtttgacaactagtggcttattggttcccaaattgaggttccaggcaccacttgtctccatgtggtcccacatcgtcagtactcgtccaatcaacatcaactgcgtggctccgttagtcttcccttccaagagcgtgccaagcggcctgtgagaaggaaattaaaagaagaaaagaaaattttttttttttttttgataaattcccatccaaaaattacacccacaagcttacaaaaattaaaataaatgggacactttatattaatacccataatactcttcttttttctattctcttctaacttcactatccatacttcatattctcatccgtaccgatggtggtccgatagtagcccaatgcttttttattttatgtttttgtacataaaaaaatggtaaaatcaggcttcgaaccatattctacatttatatttatattaagctccatacattaagctcgtcaggaaggtatcaaaccactatcaaactatcatcgaaccttcatcttgaacctttactcattttaacaacaggaagacatcgagccaccattaggcctggcaaaaagaccaattttctacccaaaactcaacttcgaccgttttcaactataaatctaacatcaactcacatagaacaaacattaattatacaatttattctcaaattaataaacatataattaaaatcatacatttcaatcctaaatcacgcaaaatacaataaaatgaaatgga

SEQ ID NO: 113900 - DNA, 1400 bp, Cannabis sativa
agttctaccccaaaaaagacttataagagaattgaggtttaattatagacagcgccgcttatatcaatggaggaaaatacagcttcgactcacaaataaagcttttgttatgcacatgatgatccacccatctttcatacggacttctaataaacatagcgcacatgagtgtgttgtatgtaccacaaaatatcgattggcaataataacataaagtatagataataatattataattatttcattaattttaaataataactgaaaaaatataaaaattgaaagagagtgccaagtggacaactttgtcacataatttagaaacaatactacaaccattacaatgagcaaaacaaagaaatgttgactcatacaagtgaaagtctaataaagttccagatataaacgtaacttataatatcatcatcactaattatactttctattagtattagctagtaaaccgtacgtagaccattttggagaagattttccaatactttgttatttattttcttacaacctttttagtaaaacatatcttttgattttttatacttttaataagtatatatataatatataaagatgtaaatgtaaatattaatacatgtagtttgaacttaattgttgaaaagaaatacagcggagcagaagggaagggacaaaagttagaataaaggaatccacaggcgtggttgattgagtggaacacaagagaagagattatactataaagattaatgggacaccgtcccatttcgtgtgtagctaactttcccagctatttatttcaattcatactggtcaacctctccaattattaatgaccaattattcaatctcaagttctcaacccaactaatagtgatctattacaaaaataaataaatgaataaataaaatctcaagtattgatcttggaagcttcgttccttaaaaataattacatatttatataccttttgtacagtactgacagtattgttaattgaaagaatttggttctgtagtggagctagtgaagtaatgattaggtaaataggtccaaaaacatgtttctaccacgcattaattaaatataaccaaaagaagtataaggaggcataaagtggagattatattcaattcattatgatttttgtttcaaaagttttcaaatatgtgacttattttaatgacgattcaaatatatggctttaaatccacagtatatacgtcaacaaataagaatcgtagccttacatataatgaatgtaaaatttagagtgcctttgacatgtaattattaggtaaggtaattattagggtggtaattacacagtatagtaattaaactatatattaaaatacaaggtgtgtttgaatacaatgttgtaattatatatgaattcctaata

SEQ ID NO: 113901 - DNA, 2032 bp, Cannabis sativa
atgaggttgtacatgtcatggcggcgcgacctggagtattcggtctcgggacatctgggtttattattttgtagtcgttgtgcgacctggttatgcattttgtgtcttttgtataaaagtttaaaatcagaatcacagtacttgtaaatgattttgtaaagttataaagtttaatatttagtataaagtgttaatttgacacgattttcgattaagttctttgattagcaaagataacactgtaattgaaaaattattgtagcatgtcttagcattagggcgttacacgactcgtctggactgtaggggtacattattatgaatattaaattaataaacaaatgtagaagaaaaaaattaaacaaatgacttctatatttaatgaagtaacttttataattattaataaccacatgttaataacttcatttaattcattaaaaaatatgtgttatgttacataaaaaaaaataaatgtatagtaagttatgtaattatttcatttaatatattagataatttaaatgttatatatgtatatatatattttttttaataaatgttatatattttgtaaatgtgtttttgaattttaataactttttataattaagtgtgttttttttcacattttttataatataaatttttgttgtacactaataaaaaaactccttatttatatatgtataaatgactatggtacaaaaatatcagaatatataaccaaaaaaaaaagttacattgtgtttatttaatcaattattctacacctacacatgctctatctttatagaacatatgctctcatatatacataaacaaatcattccccgtattaaaaaagaagaaaaatcccaacatatttacattaattaagtacatttggatccaataatcaacctccaccgcagccgccgccaccgcaaccaccgccaccacaatcaccaccgccgccaaaatcgcctccaccatcatccataacagcagcagctgctatagcactaaaagcaactaccgcagccgctgacattacaaccatgccaccatctttaccaccaccgccatcaccgctgttgccgccgccataaccatattcgcctccgtcctccgtacatccagtgccataagaattataacctcttttgtttttcttgcttgaattatatggctttgatgagtttcttctatctttctttttactcttcttctcatctactaacacttcttctctgctcaaaaagcaacccataatagtctcccaaaaatcgtctcttatatttccttgtgatctgctcctttgtgtttgtgtaactatctataagaaacacacatatatatatatatatatattatatgctaatgttgagaaaggagctaggtagctagtagtatatataatatgtgaacacactaattaaattagattagttttattgatgatccaattaattgaacataagtaatggtgacgattagattagtgagaacattaggcacatgagtaggaatatttatataagtaatacagaagtacaatattattgactgacttttttcctaccaagtaggtgcttgacacgaattcacctatggcgactttgactatttcaaactacgaatatatctctttcccacaataattgctttattcttttaagacttacttatcttttggactaaggtcctcaatctcaaattttcgtatttaaaaccccaacctatttaaaaaaactataaaattgtgcgtctttttttacattttaattcaatttttctattaaaataataacatgataaggacaaaattcctaacatattcttctcactttttgcacttatacgtctcaaattttaatgtttattttcttgataaaaaattatatctttaaaaataaaatctatattatacaaaaatttgagggaaatttacatggtatattaacttttgttatttttttacaaaaatattgttaggcggtattttttacttttttattgtatttttttataagtttcatactgtagtata

SEQ ID NO: 113902 - DNA, 3803 bp, Cannabis sativa
ttattgtttcttgcaagtgatcatttgttgcttcatgttttagttttatataatattatcatttattttttttatttttatttttgggtacggctataatacacactagtgaatgtttaaattaaaatttaaatcatatgatgtctaatgttggttatttaactattaatgcttttatttttctcaaaaagtaaaataaaatattttttttttatatctaaaaagaatatacgtctagatgattgcataattagttattatcattattgttgttattattattgttgttgttgttattgttgtttgttgttgttgttattattgtttgttgttgttgttttgccctctaaaggagacatcacaacactaattaattgaatgagaataacaccaatctaaaaagagcattgatattatgcatgtatttgaaagtgtttaatactaatgtatcgcgttataagtacccaataacaaaccaaaaaaccttacaggtaccaacaatccacacaaacaaacagtcaaaaattataagtaaactaaaaatcaaaatgtaaatcaaaagtccattcctcactctcactccgaagtcctaactcaaaatgttaggatgcaattactaacatgttactaattagtaacatgttaccattctgaaattgaaaaaaaaagtaattaaccacttctaaaattgagatatgtaaatttcatatttacgttccatgcttatttattatcatatcagtgaaatcattgcaattgcataattttcagcattaagtttgttatcactcatattaatataggagtcaaagtgagttgtattcatggacttttcattacgttcaattataacttttcttacatttgagacaaaataaaataaacacaaaattaagtagaaagcgataatagtccatcatttttgctaaacacctcgatgacttttccttttgtggaggcgtttcaacaattctttgcgctccatgtttaggctattgtagaagttcttgatgaaagcttccgctaaatcatcaatattcttctcctcgcgatcgagttgtcgtctactaatcacttcctttcttgtagttcccttgatcttgttgttgtgaattgttgttcttcacaactgctttaaatctattctcactctattcgaaagttataaggtttagaaaaagagaaagaattatgttcaaatttgcttcttattagttggagaaatcttaactttaatctttgttttattatctctatcaatatgtgaatagtacaagatataagaggccttagttagttagagactatcattacaattaatctaaccgaaggttatataaccataaactaactgtaggactacttatcctaataggcccatttaagatggagtgtaaaagttttttatacctattttggatataatgtctttgaaatgtgcagggaagaggggtttagtgaaattatcagcaaggttggtctttgaagtcacatgattcattttgaaggtgtcgtttgcaatttcttctcgaacaatgtaacaatctatatctatttccatgtgctttgtgcatggaagactgtatttttaaatatgtgcagtgcaactctgttgtcacaaatcatagtgacaggtagagaaatatcaattttgaagtctttaatgatggagatgagccatatgatttcgcatgtagtattggccaaggctcggtactctgctttagcagaggaacgagagatagtttgctattttgtaaactttcaggaaatgagggatcaattgaggaaaacacaatattcagagatggatttcctagtgttaggataggcaccccagttcgcatcagcaaatgcttgtaatgtcagaggtgatggagcttcagcatagaaaacaagaccttggccaggggagcctttcaaatgctgtaggatatgataggcaacatctaagtgtggttgtcttggagtttgaatgtatttgctaagcttgttgacaacataattgatttcaggtcgagttattgtgagatatgtgatcttatatgtgtttccaacaagggatacatagattccaaatagaagtcaaggcctatcagttggcccaaatgacatgaactatcaaagcccaacacacacctagccttctgagaaagcaatcacgcttcttgctcaagcgagcttccgccaaggctagttcgtattcagaaggatcctagctcttcatatccggaagaactctttagtgtgtatctagaagccagttttagtttcccgtttactgttacgtgcagactaaggaaatcactttcctcaaatctcggacatagaataaatatcaagttaaaataggaaactatataattgaagatcaaataattgatatcgtattaattatccacaatcaagggacacaatataaatagctatgaccttgatcaacatgcttaagcatacagtcattgcctcatgggttggacttcacttgataagcccgaagtgatgtattatttgtacactccccattagagggaaatggtaactaagtatgacttatattactctataaatacacattgaatccttcatgcaaagggtaaaaatttcttaactcacaagattgagaagagaatagggtgctcatattcattgtaatctgttagacttttttagcctatctcataataatacagactcatagactaagactcattaacacctcaaccacataaaaattatgagtgttctcttcatatttgatatgtttaatcacattttctttagttccaatattaaataattcgttttctgaaaacatcagtaaacacatacataatagtttctttaatttctccgtaagaatctaataaagaatttaagatgatgattgcttagcttttatcacttaacgattcattctctccataattggccaactcaatatgcatccttagtaattcatcaaggttctgttcaagattgttcgatctattcatcttgaattcaaagattctctcattgagaaaaatcttattagttagagacttctactggaatcgctcttccaattttctccaaattcttgatggagtctctttatccaccaatctaatgattacatcacttagattgaaaatgaggattccacttacaatttctacgtattcttcctgttgaatcatagttgtattctcaagccattcaatgggttcctctagcatccttaatagtttatgttgtgctaacaatgacctgatcttcttcctccatattctgtagtcacctaaaccatcaaatttatcaatgtcagttttaatactactcatattgaatctttcaaaattcaaatcagaattagggttctggttgatcattcaatggcacatccaccagattacatagatcaaggccatcttcttgatccaagcttcctagtacttgagtattaacctcgtcttgatcttaagtatcaattgcttcttgttcttgattattgatttcttccagtcttgcttgtcacttaaatcaatttgtatcttaatcttgcgaaaaaccaattctgatacctctgttagaatctacagctcctaagacttttacaaattacttaaaagattgattttatggtgtttttaaaactttgttatgcatatatccactacaaaaaatcttacttttagtcacaacaaaatttgtgaataaaagtaaaagatttgttactaattataaatcatgattcatatgttgtgactaaaaggtccgtagataaaagtattagtcacaaaaattgcaatttgttgtga

SEQ ID NO: 113903 - DNA, 3547 bp, Cannabis sativa
ttttactaaaattaaaaaaaagtccttaaatccaacaatctcaatagttcatgaggcattttaaatggccttaaaagttcagaggcatagttaatggttatggtgtattgattgggcctctgatatttgttattgggcctcagctgttgtaaaactgattaggcttttttaggaaagtttctccagttggtcgaacacttgggccaattacacgtgtcaacaatagttctccactgaattcactgtgtttgtgcgatgatcttgcttctactttcatttcaatggcctattgagattgaaatcagtagtcttacgtttcattcatcctatttaactagattttgttttttgaagactatgaattcagcaagtaaagaccttcaatcttttgctctaacctagcaaatgaaacttccaataaacgaatcaaactcaactcaaatttttgcacaactgtgtttgattacactaacaattacttataaatttctaatatcttaaaataattaataattacaaaaaatttattgcaaatttccattttctcattaagattggcgctaatataagaatagttggcacaacagacatctcatttgcattttctataagtagtatcattgaattgtttttttagtactaataatgtcttttaacaattctcattttgaagttattgattactaaaattgaaagtttttagtaattattatgagtataaccatataattactttcaattagacacaattccaattccctcccacccttacaaattttttaaaataagaacatgagcaacgaattttaagacaaatctagttgagaagattttggacaagtgatcatttaccatagttgattttaagaatttgagattgtttgattatgcaggtgaataattagtgatttcaaaaacaatctctctactactcaacaatacaaaaattatcttatgccattaaaacaaaattgtatttagaataatagtattcaaaatataattaaaactaacaagaattcgaaacctcttaagtttttaactacttaacaaaacatttccattggtagtccagaaaacaaaaccagaaaccacagagaaaagcattgagaaaaaaaatatataaacgatctaataaccacctttaaggtcattgaccacatcatatggaatgggggtaactgtctccaattgagcaccttcaaccatgaacccgggtttggggccctctggttggcgcttggtactgataacagcacccttggcctttgcctcggccttgagcttgtcatttctcaactttctgttcctgaattcctcggtgcatcttgagggctggacatgctccacacgaacatgaatcctcttcttgatgatacggttgccaacctatgttcaacaaaaatagggttaatttaacagagcaatcattaagatatcaatttagctcactaaaacaagattttaaagttaacttgatactatttagggcatgagacaaaagcacacaacagaaatcagacatagcaactaagtaatgagtctaaagctagaagtttgaaacaaccataagcagcaatataaacatctattggtagtttaaataaagctcaaattattttacctataaacaaaaccaaaagtaagtaaatttaagaactaaaacataagctaaactttaacagacactaaatacttcgatacgtactgagctaaatgatatatgataaagaagtaaatgatattttcgatgactacagctaaaattattttacctacgactaaaaccaaactctataatttttagagctaaaacaaaagttaaattttaacaggcaacaaatattttcataattactgatgttaaaacttaaaacataaacagatataagccattgaatcaattaaagcttgatattatgataaacagagaatttatattttagatgaaaacagctcaaaatattttgtttatgaacaaaaccagattcagtagaaacttaagtgctgataaaagaatatatatacacatatcaaaacaaacctacccataataattagataaaaaaaaccactttagtcaatgatatataatctaacagtaatcaaaatttcataactacgaaaaaaagcttagcctttttcagtcatttccagtaaaaataacaaaccctaagcaataatcattatacagtaaaagtaaccctaaagaaacagatcagaagctgaatgagaaataaatatacctgtttgttaacttcaacaccaatagcgcgcttggtgatgttccagacacgtccagttcggccatggtagaacttgtggggcatacctttgtgaatggcgccgttcaccttgatatcgacatactcaccggtcttgtaagtcttgaggtaggttgagagaggaatgtaacccttcttcctgaatggacgtgagaagagatcacgtgtacgggacctgagaccgtgtccggcaggcattttcttctacctctctttctacataatatcaacaaaatttcacatatcattaataaaacaaatgtaaaattgtaattgacagaacgattaacagtggaattgaaagaaatgatgagagatcggagaagagaagtaggtcttaccgccgaagagaaatgttgcagaaaccctagagtggtgtgtcgaacaaggggtgaaaccctagagtgcttctaatctatttatataacatttaggcctcttataatatacacagttgaaatgggctttttcctctgacctgatccaaagcccaaatgtccaatacaagcccaatcagaagcccaggtctaatttaaggaattatttcataaatatccaagaggaaagttttttaaaattttgttacaaaagtatggtacttttaggttttattattttttatggcatattttagtttttaaattattttatgatattttttatgccataggaggaaaacttaatttttaaagcttatatttagataaattatttttaaaaaaaataaaaatctcagagctatttattctccttcattcaagtaccttacctgcatcacccctcaagagtctacttaccaacttccattcactagtgatacatccggcaactcgtgacccacacattcggcaaccgatgactcaaacggatcatcaatatgagatctctaccaccaaaaccctaaaggatcaaacgggtgttgctgcagttggagctcaaagtttggttgggtatttgtagcaaaaaaatgaacaaattagaatttaaaattaaaattagtactacaatccatgcacgaacacggctgtatataattagttgtgtatacttttcagatggatttagtaatgatttttcattttttctttaaattgtatagtttgttagcttgtaagatattatttagtttttaatgatatttataaaaaaaaaaaaaaaattaatttctatagtaaattatagtagttagacccacatttggttatttggaacctttggccaattcgaaaggaaaatttacatagtatgctaacttttgtgtg

SEQ ID NO: 113904 - DNA, 4892 bp, Cannabis sativa
  modified_base (1221)..(1223): a, c, t, g, unknown or other
  modified_base (4815)..(4853): a, c, t, g, unknown or other
gagcaagaaaattgatgtgtattcgaatcataggagctagtaatcgacgatatgctcatattggtgacgttattgttgctataatcaaataagcaataccaaatacagttagccactacttggtttataacatctggacctcccaaaaataatggaggtgtctgcttatggacctttcatacagtggttccatccggttaccaataacaaccgaccccacctgcataacaagggaaggagcaacttgcacctcaggagcaggcattgtaggagcactctactgcctcaaacgttgaatatcttcgtcttactcattaattctatcttgaattacagaaagcctaatctcccagtcttaggcaacctgcagtgggttaacatcaccccgactgcgtgccctacctcttgggcctctgcctcagccataaatattctggggaaactgaactccctgaccgccactagattcgaccaaattaccctggcttctcccgtttcgcctagcatccattctattagaatagcttacaaaacaatgatctagcctggtgaaatcgcaatcaagaacaaatttctaattaccgcttacttaagaaattgaagcatgcgcctactcatctatcaagctactaacatgcttcctatttgacatatcttatatcatactaataaaacaaactactaaagcaataaaggcttattgaaccgtgagttgagcataactctaatgatgattgtacatatcgtgacgatttttaaaaagtaacctggtggctctgataccaaattgtgacaccctactaggttaggcttgttatcgtgatttaaagctaattgtgttatccattgataatcaatgagcttgttggaaaacttaattaattaaaactttacttaattaacttttaattaaaacaaataaacttgacataaattgggatcccgtatttgaaaagttacaaccataataaaaaaaaatattagttacaaaaattatcacctagtgactaatcaaaatacaccatgttgtcccgaagattgaacactttgggtctaactgccccgacatgtacaatcttcatctgctcgcactcactgttgctcagcattagctttacccttacctacacatgtaaacagtaactgtgagtctacagactcaataagaaaagcataatcataacataatcttaaagcggattataactaggcgcccatacnnncaatcataaccctatcccacatcccacacatactgagtctagaacgtttgtacaacagtattattaatatcagcctatactcggtactctactcgtactaatgcgatagcgtcaatcaaaacttatgccaaacatacattcatcagtatccaatataactctatgtatattgatattactatttcaatatattacaggcattcataaacatgcacgctaagcatgtaatcacatatgcacatcattatactaatctttccttgatcccaaatttaggtgtgttggtcaacctgagtggaactactgctcgacgatttacaggcccctaagtcacaacattcataaagttgataagtggcacgctaaatcactttttggggactaaaaatcaaaaccaaaagttttcatatcgatggatagcatgacaataccctaagtatcgctaaaatatgaaaaactaggattctaaaaccgccagaactggtaaaccgaattcccaaaatggaaaactgattctcagggttctgcttggagaaacgattaaccagttctacagtaaaccctaaaaaccccaccatcaactctattctatcctaaatcaaatcaaaccttctaggacacctaattaagccacgatgacatattttaagtaataaacacaggtataaccctctaaaatagaagtcactattaaagagccaagtttgagctctaaagctcaaactttgtcaaaactcaaccactagcaacaattcatgcttaaaatagctcaaaaatctttaaactaacatcaaaaatcactctctaacatcaatacaacgaacaatagctgaatttccaaaaacaactaacaaacctagcttaatttatgagaaaatcaaagagatgaaagtaaatgatcttacctagggttaaatcataaaatccctatagaactcttactaaaacacccagaaattatgaattaaaagcttgattcctgctagttctaggagaggccgaaagagagagggtttgaagaaagagaaagttttttgtgatgttaatcttgatttttccttaattatctaactaatacttaacctattacatactcacaaaagataaactatggattattactaaaaagaaatgtccatcttattccacaaattaaactaaaaccaaaatgactttaataatctttacttcattaagaagtaaccttgaaacctagaggtattatgatacaactctataactccgaatacacccaacattccaaatgtctatctataatgccccgctatttctaaaatactaaatcataataaaatgactctataggccaaacgtcgtattccactggggtcggtcataaaatatgaaaatcataatatttcacatataacacaattagtacacctagaattcaaatatatctccacaattgcataaataataattaaaagtctaattctgaaattaagtcctaattctcatataaaaactaagcggtcattataatttagacttcaaggtccttgattacacgaacacaacacaagctactgaaaaataatagaggtaccaatcgactcctttaatatggtctgaattctgcttgagatcatgtatcatcatttgaatatagaccctgatgtgcgaggagtatgacaaaagttccgcaaaatggaccctacgaggtaccaaacaccgaaagaggaagtggattgcttacttgcatgcggctttattgaggattcattcttcccaaattggttagccaatcccgtcctagttcgaaagcctaatggttcatggcacacttgcgtcaattttataaacttaagtgaagcttattcaaaagacaactatcccttacctagcattgaccaacttgtcaatgcgaccgcaagtcatgagattctcagcttcatggatgcatacttgggataccataaaatcctaatgtacaagccagaccaagagcataccccttcataaacgattgatgtttgtattgcaacatatcaatggttagataacatgatgttcgcagatttgttaggaaaaatgatggaagtatatgttgagaatatgctcataaaatattaacatgagactaatcacgtcactcatctgaactcgattttcaaaatcctgtgccaatataagatgcaactcaacctgcttaaatgcgtctttggtgaggatctggaaaatttttgggcttcatggtgaaccaacaaggaattgaagccaacctcacaaaaatttaagctttagtagagatgtgatctcctattaagcccaaggaagtacaaagtcttacaggtaaggtcgttgccttaaatcgctttgtttcacgttcttctgataaatgtaaagagtttttttagattttgaaaggtaacaaaaagttttagtggactgacaagtgtgaagaggcttttcagcctctaaaaatgcatctggggaaaccccaatactctccaagccgatgcctggagaagtactctcacctcgcagtgtctgattatgcgattagcttagtgctcattcccgaagaccaaggtagacaatatcccctctattacgtaaccaagtgcttattggatgcagaatcaccttatccacagatggagcgattggccttttcctaagtcgtagcttcccgaaagttgtgaccttattttcaagcccatacaattgaggtattaactaattatcctcttcaacaagtattggccaagcctgatacatctagacgtcttttcaagtggtcgattgaactcagctaatttgatatgcggtacaagccgtgatcagcgattaaaggtcaagcctttgctgactttatccttgaatttccgcatgaacaggtggataccataaccaaagaacgaattgacccagatgttccagagggcataggttggaccttatatgttgatggagcctcgaacaatgaagggtgaggaggaagaattatgttaatcatcccaaataaattcaaagttcatgtagttttaaggtttgaatttgatgcctctaacaacggagctgaatatgaagctttgattctaggtttaaagcttgctcttgaaatgaaggtcaaatatcttgaagcatttaccgactcccaaattgttgtttaccattttaatggagaatatctagctcgaggtgggcgattagccaaataccttgcctacacttgtgagttgttatcaaaatttaaaaagctattgttagttgaataccccgtgcttacaactcctatgcaggtgctttggcccgattggcctcaacttgagaagttgaattactcgacataattttcatcgacatactcgacaaactcactattgatcgagaagaagttatgaaaatagaagttgttgaacaagtcacctggatgactccaatcattaactatctaaaaactggcaaacctcctgacaacaagcttgaagccaaaaaattatgatatcaagcagctcgatacgttacctatgacaataaactataccgtagaagttttaatcaaccactcttaaagtacatcggtggtgatgaatgcgactactgttgagttttatgccctaannnnnnnnnnnnnnnnnnnnnnnnnnnnnnnnnnnnnnnaaagatcagaaataaaattttatgctgcatggttcacat

SEQ ID NO: 113905 - DNA, 1814 bp, Cannabis sativa
gtgttgtacatgtagtttgcaaaaggaagatgaagattggtaccatgctatttggggttatgttcaaatcaaaattctttagaaagtttttggtttggggaaggttgttcgaaggtgtggtggtgaagatcctatagtttttttaagccgcaatgaaaagttggtgccaaaagacaggtttgatttctttattttcttaacttgacaagtttgttatatgtgaaattatgtcttacataattcttttgagccttctatggatcaggctttggattgggtagttgattatttgcatgagttttgggataggaaacatggtggacacttttacgaggctaggttgaaatgtaaatggcagcctcctatggtgggtgagttgataattaatattgatactgcgattgatgaggctattgggtgttgtagtacatgtggggtggttcagaatcatttgggaaaggttattgcgacacaaggtattttttgaataggtatttttctcctattgttgctgagttgttagttataaaacatgggattgagttgattggtatattatctttagagtattgtatgattttttatgactgtagtttggcggtggccatgttggggaggtcgcttgtgctgtgtggggaatgggatctactggttgtggatatatgtcgactgattatggagactggtatttagggctatttggaccacatctaatatttttaggcctatatacctagattcaatccaattatatattatataagattttaccatccgatctaatctaattaatttcagtcatccaattgatttaacatccaattgattttggattggctgggttctatccattatgtattttatgtatatttattggtttaatttaggtttatccaatatttcaacctagttattttgggaatcaggatcgaatccatccaatattttagatcaagtatctattggattgaattggatccatccgatccaaaaaaaaaatttaattttaattttaattttaattttcatatatacatatacattttttacatataacaacataaaatctaactactcattcaaactaaataaaaaattaattagtttgattggatgttggatgtattggttctttagacacctcgtttaatatccgacctaatccaattagatattcaaaaataatatcaaatctaattcaagcacaattggatcatatccattatttggcggtcgattataattttatcggtcagttgtcattagattggatcaatttatgcacacccttactagtattgtgggtgtgtctttccaaccacgttctgcgagtaacactacaacatttatcattaaaaacggtgaaggagtttgccgctaataaaggaaaattttgttgctattggccattagcggcgagaatccgctgctaataattagacactattgatggttattaacggcaaattttgagtctgtcgctaataaccaccaatagcgacgggtaatagtggtagatgcccactgctagtaattaaatatttcaaaaattaaaaaaaaataaatgaaaataaattaattatgttaaaattaaatataaatataaaaattaataataaatcataaatattataaatatataaataataaattatataaaaattaaatataatttaactaatttttaatattatatattataccactaaataataaatataatattcattcttattataagggaaatttgcggcaaaagtccccaaaaagttcacgttgatacagattagtccccaagttccaaaaatagcggc

SEQ ID NO: 113906 - DNA, 4428 bp, Cannabis sativa
aggccacctagtattttactgcttgtaaactctttgtaaatgtctggttttacagtgtggttaatatggggtttacttcaacaggtatagtgcttaagcttcagaaaccgcacctaattcccaccattaactcacacaagtctatgaccatgatgcaagccaaagatcttgtatgatccacattacataccacatttctctcacaaagatttaaatatcttgtctctcactcagtactatacttattctttttcttcctctctacccatcttcatttaaaataaattattaataataataaataaactttctattcttatttaacaaatcaagttgaaaactttagttttggtttagacagttgtgggttttgattatcttcctagttccttcctactataagaaaggtccattttgtttcattcctctactttctcataaattaaccacaaaaattcttcaaatgaataattagaccaactcctaagcccaaactcagaagtttctaaaaaaaatcaaaccgatattattacaagttgcactccctccacgtttttcttaatcttcatttttcagcgcgccttatatacatatttacacacagtgggcttaataataatagtaataacttatagaaagggaaagcactattggatgtgattcagagagagagagagagaagtgagcaatgaagaagaagtgtgaactctgtgattcaccagcaaagatgtactgtgactcggatcgggctagcctatgctgggattgcgatggccgagtccacagtgcaaatttcctggtagctaagcatatgaggactctactctgccgtgtttgtcaatctttgactccttggagcggctcagggcccaaactcagccccactgtttcggtctgccacaactgtgttaatggctgctatcaaaacgagaccggaatccaacaaaacgatgacgaagaagacgacgactacgaagaagatgaagatgacagtgaagaagacaacgatgaggatgataataatgatggtgatggtgatggtggtagggatgacgaagacgatgaagagaatcaagtagttccatggtcaaataatccacctccaccagtgtcaagcaattcaagttcaagtggcgagtcttcaaagtccaacggcttgtttagtagacaaagaaatctttctgagtcaaaaacgacattttcctggaaagtacgtatgttaatgatttgatcctgatccaggtctttctggtttgtttttgttttgcttaatttatggccttaatttcattttctgaaaatgttcaaactttgatgtaaaacagaggagcttttcaaaaacagggttttcctcatgagagctgcttgccattattctcagccagaaaacaaaatacacaaatgatgagggaattttgaagctggggggggctagctagacccaaaggatcttggtttgtgtcagcctggtttggtacatgatctgccatattgctcaaatgtgacaactatttttcttttactaactaatagaacctttaatcactttcacatgtaaatttttcttttttctttttctttttttttcttttttatttacatgtaatcattattaatgtaaatcaattttaagggcacattacgattgaccatgtggaatgtgaaaaccgttgttttaggctttgacaaatgaccctcttgaaaccagattacaaaaaccatcaactctcgtttaagggtggtaatatatcgttgtattcgacgtctctatactctttctctccatctgccacgacttttttattttacttttcaaatacaacaaacttgacaaacaagtaaatcttgagtgccttgacatggagctaagattattgacggcttcacttttagaggttattattttttacatgtgttcaaagattaaaaacatggttagcaccataaagtagaaactactactactttatatcatacatataaatgtcttgagattctaatcacacacagtacttagcataaattacattaataaagttgaaaggtattattattattcaaccagcgatgcatacaactttgaaattagaacgaggatactggcgctattggctaagaaagagagagagaaatagagaaaggaaacaaaattgtattatattaattagtcattacagatcaaaatatagtatagaaaatatgaaggaggagaagagaagggatggaggtggggtcaatcttttggacatgcccacgtgctcaccataactcattaattagtagtttaattgcaagttgattagagattgatcagaaagtcgattatatatattagagaagtgaaagagataaagaaggaatcaaataaaaaaggaaaaaaaaatactggggcctgcaggtccctaatttagtcctctttttttattcgtctatatctttttgtggtgggaaattgttgcttgtagagagaggcaattatgaggctatggcatggcgtagtttgaatttttcatcacccatggagttggagatttttatttttatttttttgcctttaaattgttttgtggattctgtttttcttgactgttcatctttttcatttgtaaagagtgacatccacaaagtatgactgactcatattcgtgtaagtgtacaaagctttgtaataaaaaccttggccactactttcacatcatttgtgtatggagaatgaaaatatctacattttcattatcttttttaattttcttttaactcccatattaattgtacaagcataactgagttggaaaaccttcacatgtaacaacagtaatcagttgatgtctctcttgacagctttccaaattcaattacaatttatgtagctctgttacggtgtttaaaatgagtttgagacattcttaagaatatcccttgatatttttacaataatgagatcagagaaactgccaagggaaataaataggttcatatttagacctaatttttttttctcatgaaattatttagacctatttggttagaaagaaaaaattaaaaaaaaacaggttcgttggttcagagtacatgtgttggctccttgtaaaggacaaagatcggtagtgactgttagtgaaaaaacgacaaaaactgaattgtatgagattaagataagaggaatctgtgatgctaaagtccaataaccacgggcttgttgtaatcacatgacgtgtccaaatattttgtctttgtcaggttcttgatctcctaggtgtttcttaaccccacattttattttgacttcaaaaactaatcaacttcttatttctttatttattataatatctaattcttttaaaatataaatatatcgattttctgcattgtgagtaatacaatgataaaatataatttattccttcgcacgcacaatttttatgaaatatttataagtatgaaacttaaattagggacaaaactataatctaaaacaatgaaggttaagctattcactcagattgatcaaacataaatttgctttctaaaaatatgcaccccaaatatacctcccatggactttgaaatttggcttacactatgtgtaggtttattagaccactattatattatattttttggttccaatcacaatacactaaaattaaatattatttttaaataaatatagtactctatttattattattatgtaattatattattataatacataatgatgagaaaattgtagtgcactcctcgaaaggctgttttagtatattccattttggaatcggcattttagttcaattattttttgtgtatattgtaattatttaatattatttataaattttcagaaaactttaaagatagtttatgatgttgaaaaaaaaaattcaaataattacttaccacatctaaaaaaaaattattatgcacgtaatgttaactctataggatagatttatttttattattttttttcatgggattttgattaatattagtatgttttagatttaatttctttaatctttattgttaatatttaattgagtgtttgtattgaaaaacttgaggaaagatataaaattgaggtcgacttaatgattcttccacaagttagcatgattcggatttagtttacgaaatattgaaacttcaagctttaatttaactgttttttgttcaaattctaaaaaactttgtagctctttttctcagctttctgtatcatcttaaatcatttcatttggaattcggataagaaagttatggatattttactgaatgggtcaaataaaaaaaaatcaagtacagcaagtgcactaaagtagcagactgttgcgatatttagcacacgcaagtgtacgtaccgtttcaagtagtaaactcactaggagtgaggtcgatcccacaggaagtgtagttaagtacgtt

SEQ ID NO: 113907 - DNA, 1548 bp, Cannabis sativa
  modified_base (232)..(232): a, c, t, g, unknown or other
tgtaaccacttttgtttttcaattttaaaaacagagagcaaaagtgtgttatgtaaagttcatttttattttcatttttttgattttatttaagtcgggtctagatccagtgtcgaattcgggttcgggttagaggtcgggttcagtgctaaggccgtggagggatttgggtccgggtatggtcggagtctaaaatattgattaagaaaaaaatgtttaaaaaaatattganagtgatttttttttgtttttaaaattttgattctcaattaaaaaaattaaaaggtgaaaacagttttatagaacatgttgtttaaaaaatattttcacttttccaattttaaaaacagaaaactgtttaaaaaaatattaccaaacgccatctaaccaaatgcgacttgtgttttgaaaatttcaaaaacaggtttttactctcatttcaaaacacaatttttgaataaaaaatagaaaataatgtcaaacatgctcttaatgtttttgtacaactaccagaatatataaattaatttctcccattttgaaaaaaataaaaaaaaaataataataataagcatattttagtgtcataattgggagaaaattgtaaaaaaaaaaattatgtccaaatttattcgaaatatatattagtatcgtaactaaatatttttttgaggcaaaaaaaatttttagaaaataaaaaaggttggttgtcatgggtagagtagggttggcaattcgtgacatgatacgataacacaattcaaaaacgatacaaaataaatagatttgggttacacatttaattgttgtgccaaaatcgaatcgaaacgtttaacaagtttattaaacgtgccacttcgggtcaacatatttaatccgaaaataatatgatgaccaacgcgtataaaaatatataaggactttaatcttttatattatgtgaactgaaaaaaaaatctttgaaaagctctataaaaacacttttcaactttttgttatcaaaaaagtaataatgaattaaatctataattttatgagtaatatttgtgttttatataagtatgttagtggtgttaatttcacgtcataatatatttaattgtgttaaacatattgttttgggtttctgccataacacgttcactacacgtattatcgtgtcgtatcgtgtgacttaataaaaacttttgtcgtgtttgtattttggatcttgacacgataataatcgtttcatttgtgtattctccataatgtatcaacacaataatacgaattgagaaacgtaaaaaagaaagcgaaaataaaaataagcaataagaaaattatgggagtaatatttcgaaaaaaaataaaaagcgtaaattttttatttggagattaaggaaaactatttttttttaagactcttctttgttatggcccgaacgaacttcgaataataataaatactcaaacactcctttctaaatcaaatattgttaagactaattaggatttttgtcccctgaactttaacatgtaccaagtcatgccccctgaacttttaag

SEQ ID NO: 113908 - DNA, 1763 bp, Cannabis sativa
  modified_base (37)..(44): a, c, t, g, unknown or other
tcctatttgtaatattttagaaaatacagggtccatnnnnnnnnttaacaaaacacaaggtccaattggtaacttttgcaaaacaaagggtccaagcaaagtgacatgctgattcaagagtttactaaagtactgtttccaagcaatcacaatctttcccccgggatgccaagcaatattagacgaaaaacaccaaccttcaaaaacatttgagtacaagaccccaagctttgaggcctttactcttctctcaagaagcccaacaaaatcaactttctatacatgaagaaattgctttattaagtattgtttctgctgattgttggctcctcggacattccaacaaagcatcttatccatttaggaaagagggttctcccccctcttctgtgttgtcattgttcaccctgttattcccttctgcattttcctcaacttctagtgcctggaaggagttcttgacctttgttccgcgttctttagtcattgttttctcaggttttcgagcagtcataacttttgtaaagccatcctcatccacctgctcttttttcctatgatctttcttgacaatccactctttcccaccattattctttctacactcagctgcaacatgtcccaaactagagtattgagtacaaatggaaggtttccactcatactttactccaatggaggtattccatccatgttcatcctcgaattctaacatgtctgggagtttctgatccatattcacctaaaaaaggattcgaggataactcagtcgttccctctccctagttatggcatccaccattattggttttcccatttggccaactatcttaaacaaggacttctctccccagtactttaattctaggtcttctaactgaatccatattggtacactatgcacatcttccttcctaaaatttgtattaggatcccatggtttcataatgatcgaccttcgattaaagaagataaaacctccattgagcacttgatctctatactccataatgtcaaaactgattatgaatatgacatacgaaagcgtctttaccctatcaactttatccctttaaactctcttggcaaatccctcaataatctgcagtggagggtttgaacccaagacatagcagaaaattgatggtttccaaaataacacatattcttctatatcctctaaggttattttcaccttagatttctgttctttattcttaaaagtactttccagattacgcacaactgaaccagaacaaagaacagggggaattgtggtcttaccttatcgaatatcactgttacattgctcattcaccttgaggaagtgtgcgaagtcacttctgatttcttcttgcctgtgaatctccttcaaggaagctccaggggacaatggaagttgaaaaataccagcaagaacagggtctttgtcgaacacctcttcctctgatatctccagttcctgcatctcatccatctcagccaccgtacaggcctcggcctcatcagtttcgactcgtcctgctttcttcttccctttcctgctagcagatcgtgatttcccttgaatctttgatctcgtttttgccatagctccagcttctcagctgcgagagcaagaacacgagagaaatctttttaatatgaaaaaacttatattttatattaatatcaacaaacaatatcaacctagaatttttcttatatacttgagtttttttttttttttacatttaatgaaacataatataaaaatactataa

SEQ ID NO: 113909 - DNA, 2559 bp, Cannabis sativa
  modified_base (1886)..(1887): a, c, t, g, unknown or other
taataaattgtgtaaaatggatttttcatgtaaaaatttcttaaaacaaacactgattttaaaaaaaattataataaattcgaaactcacctttctcaactactttctagaactttgagtgatcttattttctgtgtccgaactccaaataaatacaaataagaatattattcttctataattttttttatttcatgacaacggaccatacatattagatatttacttgtgattagattgaatatcattttttataatatgtaattggataaatattgaatagagattatagtattttcatttagttttagtataattaaatattttattattatagataaatatatatataaaattaacattaaaaattaatttttttatttaaattgaatggatctaatcaaatcaaatctaataaaatactcgatttaaaatattaaataaatttgatgcgatccaaaaaatactagatctaaaatatttaataagcgcgaattagatatacatcaaatgaataaaatcaatctaattggatcaattggatgatttaaattaatttgatccgatcagatcggatggtaaaatttaacatattatacataattggatcacatatggataggcctaaaagtattagatatagtccaatgaacacccctaattattcacacttacattacaccatacaccaccttctccatatatttctctatatcatttaaaaattatatcttaatatatattttaatataattaaaattacaaaaatggccaaacaaagttctacaaaaaaaaggtatattggtggaaaaactaccaaaattatatgattagtgacacttaaccatataaatcgctttttggtaataaaattcttcaaacctcacttctactcctttcgctcaaaaggctctgttaagtatcactgtggacatgctacagtgtacacaagtgtacacgtgacaaatttttaatgggagatattagcggtaaaactccttgaactctatgattagtgtcacttaaccacttaaactaattttttagtggtaaaaccctccaaatctaacttttgctagctattcaccctttctgttcaaaaggctttgttaagcgactgaaacaatcagatctcctcttccccagttccttcttcttctgtgacgtacccaccaaaccacgacgaatccagggacaaaccagcaaatccctccaactacagtagtatcggcgaagagtttcgagatagggagaattagatctagcgaggctagaaagagaacaaggaagtatgaaattttccaatgttcgactaatcagggcttaaagggaggttgaaaggttgggtttgtaaggtcgggaagtcagttttgaggttcgtttgggttgaaggtgaccaaaggtaacttgccggagctatgcgagaaggagaacaaaagagagagggagtgcagctagaaatttgggttatagggagaaaaatataaaagaaagagaagaaaagaaagagaagaagaggaagaagaagaggaaaaaaagaagaggaaaaaagaaaaaaaaaaaaaaaaagaaagtattttcaattatttttataagagttttttgtggttaaacccactcaattatcattccacttgtattaacccctcaatcttaaattttgatggtaaaatctttcaaactactgaactaatacaaatttaaggtgctatatatttttcacagttaacaaccaatatagattgcttatgtgtacactcttgtgacacgtttatatttatacacttaatattattatttaaataaaaaattatttcaaaatttatgatatattttattttttatttttacaatttatttaattttaaaatgaattttgaaataannatattaggtgtaccaatataaacaagctctgtgtacatgagtgtgcacataagcagtctatagtagtagacaacaccttaaatttgctaatagtttagtagtttagaagattttactaccaaaatttaatcttggaggattaagtgcaagtgaaacgatagttgtgagcgtttagtcgccaatatttttttttttatcattttaagttatttttaaaatatttaatcaattaaaattatgtggagcactaaaaatttgtcacaagtataattgtgtatactatgacataaatagctaataaaagttaggcttagaaggttttgacacaaacaaatcaatttatgtggttaagtgtcactaatcatagagttcaagtagttttgccgtcaatatttcccactaaaaatttgtcacgtgtacactgtggcatgtctactgtggtacttaacagagcattttgaagaaaagagtaaatagctaacataagtgaggtttggagaattttatcacaaaaaaatgatttatgtgtttaagtgtcactaatcataaaatttacatagttttgccttaaaaataattaattaaagaacaagagagagaaaaaatataaaatatattaggacttataaaaatactgtcacatagaaatcttttcaaaaatactgtgttttt

SEQ ID NO: 113910 - DNA, 1889 bp, Cannabis sativa
  modified_base (127)..(127): a, c, t, g, unknown or other
  modified_base (1007)..(1032): a, c, t, g, unknown or other
gtacatatcaaagtttaaaagacatgatttggtagatatcaaaatctagagagtatggtttagtacataaacaatctctgaaacagtaaaattgaatggttttagacaaaagttcttaaatttaacnatctcaatagttcggggggaatttttaactaccaaaaaaattcaggagttacgatttactacatgtcaaagttcagggaaaaaaaattactaattaaagactatatagttttctgtggagaatattacaaagactaaattgataataaaatatatgtatttcaattattattattataaaaaataaaataaaataaaataagaaaaagctaaagttattcctttctacatatatatagttcttggaactttcctttttaagttttttcctttttaaggaacaaaagaaattatgagagaaattaatgttgttctttaggttaattaagcaatgcttatttttaattttaaaaagtgattatattaataaattccatgacaactagacatataaatatatatataaagagtcaactgttccataattggtataattaatatattataattgatcaattaatttggatcagatttaatctcttcattatcgatcatgagctgggtttattaacaaactcaataattaaaatgacatcatcaaagatttgttaattataaagcttcatatactaaatagtaaattagtagctttgagttgatataaaatgaacaaataataattgattgattttcctttaaataaagctgagctagctagctttgaaaagatataatgatagaataaattggttaagtgtgacataaattatagaaattaaaataaataaataaaaggaataagatccaatctctatttaattgaaatatggccttaaattaatatctttatataattaccccttgattaaagccttagaaataatataaaatctcaagattgtatccaatatcatgtgcatgcaataataataataataatnnnnnnnnnnnnnnnnnnnnnnnnnntaataataataataataattcatgtgcaattaatatatgcacaacaaatagatccaagaatactatcattctatatttttatttacaaaaaaaaaaagtagtaattaagaaaaataaatcccatgagcacgttgtggcatgtgtttatgatttgtaatcgtggtttaaaaaccttaattagaagcaaataatttatacttatatatattataaataaatgaatatttatattcatatgattctttggtattccgtacaaaaaaaaaatgtaatagtactacttaactataataataaagattaaagacacaaaagaaccatagtttattaccacaaattgtggtccacattgaagtaatctaaccccaaaaaaagtgtaattaaattaatcaccacaaaaatatatattcttttttggtgtattattgttgaagcaatcttgataattgtgcaacactcttgttagttatatataataattaaaattaatttattagggattatactattaatcataagaaattaaccatctacctaagttttattcatgaagttagttaattgatgaagacaatttttataattaggtgattaatgattatcattttgttcaaagtgtttagttaattaacttaattatttgttagaactaatcttgatcttgttatgtacttggttatatgatataatatatatatatatatttataatatactatagttgtacttttgtttgtttatatgatataactagtgaatggtaccgcgcttcgcgcggtttttacaacaattgagaattacatatgttaaaatcattttttattcatagtaaactttgtatgttttatgatttaaatt

SEQ ID NO: 113911 - DNA, 1872 bp, Cannabis sativa
  modified_base (30)..(43): a, c, t, g, unknown or other
atatctaagagagacatattgtattttaannnnnnnnnnnnnnttaataatatattttgaattatctgtcacttaatttataatatagtttggcccccattgaatttcgactctagctctgcccctgctcattagtgatataattactatttatgttatatatgtacattagttcaaattaagacctgttgtctgaaataggtatttgtgatataatttctcaaatatagaaattttattatattttaggtgtgtcatgcatcttaattatgaattttaacttttttatattttatgctcgatgatagtggaatttgacaaatttgtcattagagtcacatagatacggttgagtattttggaattagcagagcaagttattttgacatttagaatgtcgcgattgagcggagctatagattttgatcattttaccctaggttctaaggctacttcttggtgaagaaaggactttttagtattttttgcctaagattaattttagttatttgagttggatttctagaattcttttaagtgtataagcataatattaagacaaaaacaaaccattaaaggataattgcaaagttagaaggaaataaaaaatcaaaacctcattcttttttctctttctctttctcttggctaccttagaccgcaaagaacctaggctttttcagacccaaaatcaacatttatgtaaggaattgcagcaagattttcaaggttattcattagcaagagctaggtaagccctagctattctcttttctttgattttctaagtttaagcatggttttggtacaagattttgtgatttcgttctgttagggtttaaagagtttgagattagctttgggggtgtaatttctgattgtttgaggtattttcttgtgggttttgatggttgtagtaaggttgagctgagtttgagtttatgaactcaaactcagctcaacaattgaaattttttgtttcaaaagcttgatattatgcttattgcttgaattatattcttaatggcgtttttaggtgctctggaatgtttagtgaagtttgggttagaattgaattagaaaactcgagttttggtttttctgcagtgaaacggtccaccatttcctgtagaaatgatgaattgtttccccaggaagaaccccaagaaacggtggaccgtttaaggatccaattcatcgaatggattattttttggatgcctaggtttttatgttttattgatatttagggtattgtcatgatatttattaataggaaaacttctagttataagtttaagtctctaaaagtgagttactgggtcgcctgcctgttttgcataattgtgacctagggcctcaaaatttttgagtagtaatttcactcgtgttggttggcacacttgattacaaaagtgaggtaagattaatataaatgatgcacatatatatatacatattgtatgcatgcattatgaaatataagctagttctaccaacactagtacgttagaggtattgagtgcatgtggtatagagactaagctagttctaccaacactagtatgttactgatgctgagtgcatgtggtatagtgactcgaactaatcctaccgacatcagaacgttagaggttcgaactaaacctaccaagactagtacgttgaggtactaagtgcatgtggtaaagaagttagtagagcttcaacggggtacaagctatttgtactcttgttaagaatgtttgagacttgtacacgttggatgcgtgataattactctatattggtgttggggataattttatcaggatctagatttactaccatgtatggtgtttaacatcctaaatatagatttctaaaacaata

SEQ ID NO: 113912 - DNA, 5205 bp, Cannabis sativa
  modified_base (28)..(65): a, c, t, g, unknown or other
ttcatatcattttagaagttcatatttnnnnnnnnnnnnnnnnnnnnnnnnnnnnnnnnnnnnnntggtaaaataattccaacaacacattctttaggtgtcaactttttgcaaagttctcattgtggcattcctgaaacattcggcaaatcaacctcatgccgaggaattgtaaactttgttcttggatcgctataggagtcgtggagcttacatttttgctacatttttccaaattaattaccttaggcagattactatagcaattttatgtcatttacattaatcagggaagggaactaagggtgtaataaaatcacgacaaggttccttttcgggagacaaggctaggtttatgctaacacttagataatccttcctcggtccaaagtaacaaagctggcttagaattagaaaggcttttcgcatacatgtgttaagagagttgctgggaatgcgatggctccgacgtgtgcttctttaaaacacttctcataagaaatctgtcagcgtggtcaatcagacaagggtcactgcaatagtattcaaacaatattccctttttagggatagtgctaaaaatacattagatgtgcctttcgtgacaaccaagttggacatgcaatacccccttctaggaaagatggttaaagacgtatcgaaatctaagcgacatttctgacaagtagtacgaaagttgaaaattttcaaggtaaagtacaattacaaaattagatgaaaataaaggataaaaaagaagaaataagtaggtctctatgtatgtttttgtgggcgcataaataggtatactacccctaagtgatctaggaaatttggacgtctccaaactcatggtcacctatttaaaacatagcatgtgcgagaaaaaaaacatgtgaattcttatgaaaatttcttctattttcatttcattatactcgatggttgacattaagagagaaagtttacaaagaaatacaaacaactgtaagggatgttaaacccagataaccgcagcctatttgtaatagtgacataattggtctatattccaagcatgagggattttctatccctctattatcaagagttgaaatgttccatttcctactttatgatgtatctcatagaatccttctcaattaggtcctaagacccccactttcagttcttgcgaagctaggaagactcttcacaacacgagatctcctacgtcaaatgtatgacttttgtctttagaatcaaaatgcctggctatcttgccctggtacatcttgagttgaacttgtgactgttcttggagctcttccaataaatgtaacgattcctagagaaaagaatgattttaggttgggtcataagtgtcttgtctatgagaagggactattgtttccactaggatgaccgtttcacatccataagtaattgaatattatatgccctgttgaagttatttccatcatttagtatgcccataggactcgcaaaagttcctccgaccattacaagcttggagtttcttctttaacattgtctccaggatcttattcatggcttcaacttgtccattttcttgcgctctacccacagctaagaagcttttcacaattcaatgtttattaaaattaatttgtgaaaagatcgctattaaattgatttccattatctgagacaatcttgtgtgcaagtccaaagtggcatactatattttttatgacaaagtctatggccttcatggaggtggttgtatcatgggcttcacttctgcccatttggtgaattagtcgacaacgactatagcgtacttgactcatccttttccaatgggaagggatctcactaaatcgattccccaaatggtgaagggccatggattgttcgtgagtgtgattttcattggtgttgctcgtagatacttagagtatctctgacattgctcacacttccagacatattataggcaatcctgcttcattatgggccataaatatccctgacgaaggatctttttagataggctttgtctagaagtatgatcttcatagaagcttccatgaatcccatgtatgatagaacttatctcaatcccagccacgcacctcaggtataacaaagataaccccctatgataaagcttcccatctagtatcacatatcgaggagcctggtactggaccttccaggaagcagctttgtccagcaaaagttctccaaaacataagaacttgtagatggaccatatccagaagttggaatgattagtgatggaatttaccccctatactttaatgcttgaagtttcaaggtgggcaacaggcaccatctccttattgaatgatctccgagtttgtagcaagtttagcgagcatatatgcgaacaaattatggtcctaagggacttgacagatgttgtagccattgaacccttgcaacaactcctaggacatcatcacgtaggtagccatcctttcgcctttagttagatattccccagatatctgtttcactactaactgagagtcactatgtacttcaacatgtagggctctaacttctttagcaaattgtagtcctgctagcatgtctttgtgttcagcttcagtgttagaggcagtaattcaaactagagagcactttggagaagatgtccttgcggagcatcaaatgattcatgctctggctcccttttcagaatgatttgttaacatagactttcaaagtaggtgactccgagactgacttgtccaggaggtcacccaaccccgaaaattccatcacgaagtcagctaatgcttgacctttgattcacatgtgtggctaatactagatgtcaaaatggctaagttccattgcccattttaatagcctaccaaatccgtctaacttcttaagcacttggctgaaaggatagttcgtgaataccttagtgacatgggcttgaaagtagggtctgaccttttaagagctgaattgtaagaaaaatatcaatctttcaatctagggatacctggattctgcatccagtaatcttttgttgacatagtacacatgtagctggaccttttcttcttctagcactagggcagcatttatggtgtaaacagatactgccaagtaaatatacaaattctccccttccactggcattggaaaaataagagctttagtcaaatgaatcttatgatttctagaaggcctcttcgcactctttagtcaattcaaacatcttgttttagcacgtaaaagaacgggatacatttgtctattgattttaagatttacttactaaaggttgtgatttttccagtaaaactctacacatccttgtgcttttagggacatggcatatcagtgaaggctttgaccttctctaggtttgctttaatcccccaagagctaatgatgacacctagaaaattcttggagaagacaccaaatgtacattttttgggattcagtttcatctcgtaccttcaatgaatcgaaaaggctactttaaggtatgtattgtgttctccagatgtcttagattttaccagcatatcgtcgatgtagacctccatattcctccccaatttgttattgaatattctgttgactagtcgttgagacattgctatgatattatttagaccaaatgaaattactttgtagcaatacaaacatttttctgtctagaaggtggtatgttcttcataggctatgtgcatttttatcttattgtacctgaagtaagcatccataaagctaagcaactggtacttggacattgcgtccactatctaatctatctgcgggatagggaagtagtcctttgaataaaccttgttaaggtttgtgaagtcgatgcacattctccatgtgccatttggcttacagaccgaaactggatttgctaaccaaataagataaactgtttcttagaggaagtcatttgtagtcagcttatctacttttgttttcactgctttccctctcactggatctaatggccttcacttttggcaaactggtgtcacatctttgttaatgttcaaggcatggtaaatggtattgtaattaatccctgtcatatcagaatggctccatgcaatagatcccaattccccttaacaatacttatgatgctttccttcattgttggaggcaggtttcttcccactttaatggcctctgtggggtctttatcacatatcctaacctcttccatgtccttcatttggtcaatcattcttgtctttccaaaagggaagtcaagctcatctttaatgtcctccagacagtttcagcttatgcttgaatttcaattcaaaagcagaaggtgtctcttcctagaccatgaatactatctgaaaagagacattgtaacaactccttgcactttttcggtcacctctgacaaccctaaggcatccaatgttgcatgggaacttcatacataaatgtcgtattgaagttacttctccaaaatctaataagactaggcgtctcagtattgcgttatatgttgtgggacaatataccacaaaaaaattacaatgtttaaaggcgcaaacattgttgcacccttaagaatgacatgtacttggatattccccttttgcatcagagcgtcccaactaaagccttccaactggatgggacaaggtgacaagtccaccttggtgagcccaattacctgaaaggcagactcgaacagcacagagcttccattaactaccaagaccatagaaactcacttatttgctatttgggctttaatgaccaacatgttgttactaggaaaatatacatgtcaagcattttcctctatgaaagtgataggtagattcattggtcgaggatgttaggctagtgactccactacaacacacgtctccccttctctgtctaactccttcaacatttactggaagttcctagtgcttactacaaggtgcggtccatcagagattgctgccacatgtccatcaacaggtggtggagctaagcccgtgagatatgggtttccatatcctcaagccacgacaattaccaagacttaagctagtagagcagggagtgtcaaaagtttcattcctggcacttgagggtgacctaccccatacgaaggatttatggtagactattatctaagaataagaatttgtccatgaacaaccctctgtttgggatatatgatgggaatttggacccattgtccca

SEQ ID NO: 113913 - DNA, 1021 bp, Cannabis sativa
agatgttaaaagaagaagtcttaaatttttttcaaagaagaagaagaagaaatcattaattattttagctagaatctaactaattaacaaagcaatattattcttcaactatcttacgtacattaacttcttcagtaggaaaaccaagcttccagggcaacggcattaatgcatgtacatgtactagaggagcctgctctgcttaataaaaatgaaagtaacaatataattatgtatagatggatagatagtattagatatagatatagatagatataaagtaacttaaataatcctcttcagtgaaaatagatgaatatatgtaccttgtttatgtgaggattgagtgtgaattattggtaaggaagcacagggagttaaaaaagccgagaggaaaatacatgataaagtaatgagtgccattattaccagctccattaaggatgtataaatcttaagagattttaatacatttgctttgtattggcatacatttatatatatatgaatcttgaattagagaaaacccggagagagagagagagaaagatagaattatacacaaagcacaaaaaccagtgttccaaatccaagacaagtggatgtaaatttcaaaacttctccttttaaggtgggcttcacgacacatttcttgtttcttccatactactttttacgcgcttattcatttttacacttaaaatatttttttttttttacaattttacggaatttcacatagaaatcctattgcaactagcgctgcaacttaaattgcgacaaaaaatcgtatggaaatctctattgcaactagcgctgcaaccactttagaaactcgaaccgtaaatttataaaaaaaaaaaattaaaaaaacaatatatgtggtacttcccctacttttaattgcgttcttatttggcacattaaaatacagtacatcatcatattttatagggaaaaaaacaaaaaaatacaaaaaaggaaaaaatattacaaaaatactatgggccggcccattaaa

SEQ ID NO: 113914 - DNA, 1231 bp, Cannabis sativa
  modified_base (1175)..(1185): a, c, t, g, unknown or other
agtacttgtgctgtttaaaaaattgagtttatatggtgattataaatttaattttttttttatttattataacaattaaggagaaaagtaaaactaatatactgatattaaatttaattgttattgtatatgagtaagatgagaactacaaatcaagatcttttgcctaaaaatcttgtactaatttacgtgagactttattaattaatatggacaatttatctcagagaactgagaagttttgcaaataataattaataatatgacaacatctctcttatttggtgtattaatgaatataataagttgccataattaagtaatattaatgtctgtgtttgtgaacttatatatagatgcatgattttaaccaagaaactttttatggctaaaatgtacgtcaaagtcctaacataaatattatataatcccatttatatatataattaaacttggtgatcaagtcatcatcttcattgtcactacgtatatatatggtgttccaattatgcattaaataccaaacacagcgtagtaatggaaatgatagatcagaaagggaaatgtattatttgaaacgctctatggtagttacatatagtgaatcagcagaatgtgatatgctcctttttatttattattacaaataaaaagaaataataattaaagttggttttggtacagttagaaaggagaataagaaggggctgatcacctcacgtgaaatcctgtcccggtaagtagagttgtacctatattattaggggcctaaaatgaccttttctttttattattattattattattattattattttcacattcttttaattaattttttactaagctcaaataaaaataacataaaaataatgtttaaactatatattataaatataaaataacataaaattaaatgtgtaaacaacatattataatgtctatttttgtaaaataaaaaattaaatttgtaaaattattgaacaattatacattcatatattgtaataattgtctttttgggtatttacaaaaaattagtgcatcaattttactttaaccgttaaccgataagtgtatttaacttttcacttaaaaaaaattataatttaattcttgtttatttttatataattgtatatacagtagaacatctatttaagaatactctattnnnnnnnnnnntctaatttgttataaaaaaatcaagtcccaatttgggccaattata

SEQ ID NO: 113915 - DNA, 1102 bp, Cannabis sativa
aattcaggatcctatttgtactattttagaaaatacagggtctgttttatcatttaacaaaacacatggtccaattagtaacttttgtaaaataaaaggtccaaaatattatacattaaaaagttccagatttttgggagacaaaggaatctatttggtattttgcatttcagtctaaatcaatgataataagctaccaatagtgaccccacgcattcatgaatcttcaccagtcatttggactccaacaaattttgtttcaaacttttgttaaaaacaaaaaacaaaaattacttactttgtaaaaagttgtttaataatgtgttaaaaatttatctaaatttatcaaatagtaaaagttgatttaaatttgaataataatgtgtgttatttttatgccatttttattatttttattaaatttagctattaaattaaattataaatattttacacgtttttttttattttttatataaaaaaatatatgaaaaaattattattattttatattttttaataaaaatattaattagattaagttttacaattgtgtattagagcacaatgttaaaaatttatgataaaattatcacaaagttactttttgtattaaatataacataattttatatcttttattaaaaatagtctaatacatacaataatattttaagatgtaaattaggataaaaagtaaaatgtcactaacaatatcaataataaattaaatagttaataacaatattataaaaaaaatgtagattgattattaatgtctatgattaataattaatagtaaaactataattaaaaaaattagagtatcaggtttggcactgtattatatcttgagctaaatttagtgaattttgaatgtgtgtcaaattcagtataagatttagcacattattagagatctatttttttaaaaaaagtgttaaaatataatattttagcattttattggagatgctctaagatcatctctaatgagagatgtaaaagttgaactatatatgacacaaagggctcgtttggaacgccgtattagatcgtattgtattgtattgtattatattgaattggattatatatcata

SEQ ID NO: 113916 - DNA, 2013 bp, Cannabis sativa
aaaactgttttcaataccagtttcattattccgcatttaattaatcacttaattaaataattaaactgagaatattaaaatacagaatttcaaactctaactcacaaaggttcgactctaaagagtctttgagagaagtttgtatttcaaaagtgaatagtgaagaatgaagaaaagaatgaggcttatatagtttctggaaaattttctcccaaaaaacttaatggggagttaatgccacaaaaataggcatctatgggaaagagaaggccaagagttgcaatataggaagatgtacaaccaacacacaataacttcccacattgatcaacataacacatagcatgacacattactctcctccctttcaaggagatatattttacattcaaatataaacttaaaattcacatatcaaaatatctgacatatctacattaaaaaatattaaaatattgctttgaatattaagaaattataaataatcctcaagtcgcgaagtttgttatcctttagaatctttctaaaagcttatgtgattttgatgaatcccgagaacctagtgattttttatggactagaacaagattaaggctttcaccttgcttgagtgaaccaccttcttactcttgaaagttgccttgaggtatctcattctaccctgttcatattccactcaaattgtgtcccaatagggtttatgatgatactttgctcgaatcttgggacttggtacaagtttgatttgtgttagactcccaaatggtgctaaacccctaactttacttgcattagtcgaataaggttaaccctattaccttgttcaagcaactaggatttaagcatctcccttttgcttcatgttacttgaacagagttggtcatgccaccctgttcgagtggctcttcttcaaaccctagactttgtctttacatactcgaacaaggttgaacaatataccttcttcgagatttctttctccaatttccaacatatactcgaacaaagtaaagcatgatgccttgttcgagttgaagtcttcaactattcacaccacactcgaataggctagtcttgacactctgttcgagtttgtctcttgatcttgcatttattgagtcattccacgtattttatgtgatactcgaacaaagatagcctattaccatgttcgagtacttcattgtgtactccatcctcttactcgaacaaggttaggcttgctaccctgttcgagtatgtacatgtgtcatgacacgtgtcactcgaacaagggttcacccaacactctgttcgagtgttttagcactatagcattagtgttttggtccctgctttatgtcacttggtcaaagcattttgtgttgacttttctaattttcaaaaattgggtacaacatattgttaaaagaaagtttttctttagaaaataagtaaaaattcaaaatgtgaaaaaagtttattttagaaaataagtttaaatttatttatggtgttatcgtctttttgggtatatatttgctatatcattagactctcattaataaattggtcattatattaaaaaatatatatttataataataaaatcaaagtattaatatattataggaaaattctatcatgcatccctttagaaagttgcactgatatatctctatctgttttagtatccgaaataattttttggtcaaatttttttctcatggtcatgtaaattatatttatttaagacatcttgtagaattttaagaaattcgaaaaaatttaacacgccgaaaactgcattcaaacaatgtattgcactcgtgtaaaatagactgtttgaatattgttttctatattgtaaagggaaatttgattttttatgcttacatttgcttaaaaaaaatttctacacaaataataactaatatttgtaggatatgacaatttttataatatccctaaaatacctccatttacatcacccccatttacaccatcggaccacccatcggaccacctatcgg

SEQ ID NO: 113917 - DNA, 1916 bp, Cannabis sativa
  modified_base (1713)..(1714): a, c, t, g, unknown or other
atgtaggtatgtcaaaagtagaagcgatcgccaactcttacatggactaggctacaatggcactagttcctgtcagcctgaagagttaagtaatggccttccggttgtaccttgtggtctaatagcttggagtttgtttaacgacacatatacatttcttcgtgggggatcaaaagtaaaggtcaacaggaagaacattgcatggaagagtgatcaagaacacaaattcgggaagcatgtatacccctacaattttcagaacggaaccttgattggtggtggaactttagatgcaaatgtacctgtaagtataagtataatgtgttaaattcttccttagaaagaagcacattagctttgatttgttctttcatggaagtaggatgactttgttgggtctgatagatcggtatgagtatgatcatacaaaggataggagtattgagcattgctacattgtttaggcctctattttactgtacttttcattggtttccttatggtaaaactgatatctaacaatttctatttcgggtgtattccgatataattattatttatcagctaagtaagcaagaagatcttatagtatggatgcgtactgctgcgcttcccagcttcagaaaattgtatggtaaaattgaagaggatttggaagctggtgatgttgtggtagtgaaactaatgaataattacaacatatacagcttcgggggtaaaaagaagctcgtcttttcgacatcaaactggttaggaggaaaaaatgatttcctcggaacatggtacattatccttggttcatgctgcatattcgtcgctcttgtctttctgttgctacacatgaaaatttcaacttcaaggtaaattactaaatcttatctcactacaatgctcatgcatgatcttggtatttgtcatttcacacatgaaagtagggcagtcgtttacaaattaagcaaataatctaagttgaaagatttattagttggtcatatgggtcctgtccagctgttattgacctatgacatgtcttcaaatacactcattctctagatgttaaagtgtaagagcattgctattagacactagtgatgtctagtacctctagacatatcgctttgcgattggctagcgatatttaattggaccaataataatattgacacataggagggtgctaggtaccactggtgtcttttagcaaacaactcttaaatttgattgcctctccattatcaccttccaatgctagaaatgaatgaatcaaatgatttatgttctttctttatcctttgttcaaattgagcttttctttgtattagacacaaatagtccctggagataaagtatctagaatttggtccttaagtttccaatttttgcaattaagtccttaactatcttgtttccttgaaatttgtagacaaaaggtagtttagcttttgcattaaccactattttgcccatatgaactcaaccaaatatgcattttaagaacccttgaaataggtcaccatagcctcatagtcataggcataacgtcctcacaattaggaggagtttccaagtttgaatccctccaatcctcttgatcaagtttactttttttaaagagcattgctattaggtaccacctaacaccatctacaggtagcgcgccttgcaatttagtagtgatatttttaaaaattattttattaaattatatgaganncgatacttaattacactaataacgctattacatcttagaggatgctaaacactattagtgtctttcagcatttctcttcctaaaagaccattttaaatgctggatttttcacatggggagtttaaaagttgcatggaaacaaaaagagcattgctattaggcaccagtggtgcctaacaccttctcgacatgtcacgttgcg

SEQ ID NO: 113918 - DNA, 1892 bp, Cannabis sativa
aaatttaatgtaagcccaaataaaagtctaacatcttcttcattatactcaagtttaggatgaatattactattttcatcttctcaccaagcatgcaagcaaagtatagtacatgacacaaaacaaaacaaaaattatatagtacaagtggtagtacagttgacaattcaagcatttcttatatataaataatacaaaaattttgatcgaatattttacttaaataaaaaaagaaaaggaataattgaagggcaaatggtggtagtagtagtacacatgcctccagcgacatgttatctaaatttattaatactataaactcactaacccaaaagttgagtcaatgacattaacattataaaatggcctccttagtagaaataacataaaccataaagaaaataaaaataacatttctctttaagacgaaagacataaactaatcactaagagagatgggttttcaggtcaatttagcttctttggttgcttgtttggccctatgtttcctggtggctgctgcacacgaaggtcacaatcacacccctggcatggacatgactccttcgcctcagcctcatgatcatggtgccaaccatggcagcatcgcgtatccctctttcatggtcggagtttttgctcttgctttcccctttcttgcattctggcaaagagcctgagctcttttctttctttctttcttctcttccagaagtttattctgtttttcatcttaccatacatttctcggaataataatacttatacatgtacatgtacatgccttcttattatgtcattgtttatgttacatgttatcttttttatgttctttcctttctaaacttatgagttcgtatatattttaatgaattcttttgatgaactttccatgacatgatcaatgtctaatagtacagctgtaattgtttaatgaaatattggaatttatgaacagggccggcatttattaacacaacaacatttagtaaactagtatatagcatgactttgagagaaatatacgtgtctaattttacaataaacgagtattataagtttaactttgtgggttaaatctgagagtaatgaaacagaaaaagctgaatgtactggtactgctgtccaaatgggatgcacatccccatctaatactataattaaagtacggatcacgtgaaaaataaatagctcctatcgtttaattttgtgcttaaaaacaagaataaagcaaaattttcccataaagatcaaatgacgattcacatttcctttacctcaacatatatataaatatagattgtctaccttacactgtttttccaattatttctgctgatgcgtgtggatgtgatttttcatcaactaatctaagaagattataaactataaggattagactcagattatatgatagtgatttttataatggttcaccctttagatgtgagagtaatgggctagtccacttgttatttttattgattaatactcaaatacaccagatttatgttctcacaagtctgtttgagtgattacaacagacgagatctctactctagtagagatctctttagtgtctctgtaaatgatatcagaagacttaaagtaaaactattgcttcggtaaggactaaaaattttggaaatgtgaggaagtcgtcctctcaattgttaatttttatggtctatattagagttataaaagcggaagcaaaattttgataaaataatttttatccaatatgaaccataattccaaaataacataatgtatatagattaaatccaacttattgaaagaaatttaattacctcttgatgcctattagagtatccttgattcttttcgtataacaatcgaacattcaatccaagaacttgattgaagaa

SEQ ID NO: 113919 - DNA, 2023 bp, Cannabis sativa
tgtgtaaaacactccatagccaaatagctcaataatattgacttgtggataaacactcattaataccttaaccacataaaaaatcttgtctcatttactttctaaacacattttctttagattaatctatttttaaatcagttttcaaaaaatgcgataaacaagcataattatcacttttctcccttaaaatttttgcactaccaagttgtgccacctatagtttacgacttgataataataactctaaaatataacttttagagtaacatatatagtcattccatcacattttattcatttttatcataaaataagtaaagtggtggatgatagttgataaatgaatataaattaaatactcttcactctttttatgttaatggataatataataaaatacattttctttttcataataatttatacttttgattttagtttttcaattattaaagtaaaaagggtgaaagatatttattttgcatctatttatcaattactatccaacttactcgtttcacagttattttgaataaaatatgataaaaggaccacattactgtaaagttatattttgaagagtattattaacgagtcatataccacagggacacaacttgatagtgtaaaaagttcaagaaaacaaaattactaattattcgagaatttatttagtatggatgagtaaaataaataaaataaaatatttatttgaattgtttaatatttaataatacctagtcatagatattttttttttaccacaattcaattctcacaattcattagaatctatataatttactaaactcactattcttttaccagtttttaatactgcacttgtaacaaaaaatatctataagtatccgagtcaaaaaaaaaaaaaactacaactggtctaaaaagatgaggtaaaaagaaaattgcttgtgattcgttgtgagctaaaactgtccttagtctaaaaaagacgagccaaaaatagtcgcttgtgatttgttgtgagccgccaaaagtatcactttgcgaacgagctgtccaagattggtgagcgaaaactagccactatcttaaggggggatgtcagggtcccacattattaaggtgtaaaaatataacatcgtatgtaacatgtatgagctacttctcattttcaattaattttgaaatagaacctcataaaatgacaaaaggagaaattgtacatattctgggagagcaaattgtgagaaagttagtttaggggggctaattgttcatgcctacatgtaattttttttgctgcatttattatacatgacaaatatataaaaataaaaatttgagggagggctacaatcccccatagtttccatgcgcctccgtcaatgatcatatgcaccttataaaattctaccacggtatcaaagtaaaaaaaaaaactctaacaagtatccaatcgaaaaggaaataaaatagtcgatcgaaaaaagtagattaaagaaaagccacaaaaaaattcaaaaaaaccgatccaaaaaatagaaccaaaagagtcacttgtgattaagagataatgaactaaaaagagcctcttgtgaccgagctattcaagattggtgggcaaaaaaaagccaccatcttgagaggctagggtatgttagagattcttacattgataatgtgtggaaatatatttagcatatataagatccaatgactactcctctcattaccaattagtttttagagtttttagcgactaaatcctcccaactatcgtttctcttgcacttaacctttcaagttcaaattttgacagtaaatccttccaaactattaaactgttagcaaatttacggtgtcattcagttaactgccaccataaactacttatgtgtacactcttgtacactggtacatttattttgatgcacctaatattattatttcaaaattcattttaaaattaaataaaattataaaaattaaaaaatattataaattttaaaatattcttttataatttttaaataat

SEQ ID NO: 113920 - DNA, 3462 bp, Cannabis sativa
  modified_base (2019)..(2022): a, c, t, g, unknown or other
ggttgtgaaagagagaccgacaattttaatatgtcgggatatttttaatttaaaaaacccgcgttacacacttaaaaaccgtcaaggataacctcacaagtgttatttatcgtcaagaatatccaattttttttcgataattttaaaacactcgtttaattttattaacaacggttcggaaatagtaataattttttagtagtgattaaatcatattatactatattttctcacaattctatggtgttcatatataaagcaatgagattgagagatatgatgcctcaaaattaatagagggactatagaattctctcctgtatatcattataaatattaaacaaaagtgtttttatcattattattttgttttaataataatgtcagaagaaacatgagtacttatgacaatgaaaaagccaaaatattcttgctgggcaggctcttgaaaatcagaatgatggtggtctcaattgatggggagcagcatgtccctcaaaagtgaagagcaggttgagttatcataaccacacacagctcgcaaaggcacaaactttgggcgtggaaaaaaactctgttctttatattagtggaaacacctcattatgtttttatatatataacaaaataagttaaagaccctttaatttattcatttgatctttaataaaatagaaatcaatagtcaacatattgagataaccatacatgttatagtatcctcatccaaaagaatatcccttaattaatcttaaccatttgtagttgtttctttctttttgtttcccacgaaaaatattaattaacgtaattatcctcttaataattaaatttcaaactaaaatccaaatgcaaaaaagtctgaatgtcatgttaagtagtatatattttactttaatgcaatatttcaattatattctacagttttggtcaataaatcaagtagaaaagaagaagaaagaaagtactatatatatagagactaaaaatatattcaatacccccgttttgagatgtattaaattcgaaaacaacaaacttttatggataaatatttatatattataagatacactactgtgactttgcctatatatgaccttgggagagttttgtagattaacatagatcatgagtatactgtatagctatatatataactttgtatataaaattaatcatgattacatcagaaaaaattcatgtgtgagtactgtccacaagcagatataaaagattttaatacaatacacacactcctagagtaatatttatataaatatatatatatatatatatatcgctttatgcagagaaataattatacaagttgaagaagaatatatatataataatattaaaacatatatataggaaaaaaagtagtaaggtcataattaagtgctgtgtagcaaattagaatatacaaactacaaagtatagttcatcaacataaaataatggtcgatgcagataatatatatatataatatataaatatattcaataatggaaaaaatacacaaaaatacaagttaaagccgatccaaggtagggtcaggtgaaaaggcatgcatgggggtacctaccagaaccaccccaatccccttcgtgcgcgctatatctatcaatggcggctccctcctatacccccttactcttaccaactagcatcattaatcgcatgctctctaacagaagtataaatttatcaaatattaattgcactgtttgcacattattggttggatttattaaaatcactaattgaaaattccaaaaattaaagaaatttaaaatactacacttgaacaacctgagtaattttttaggacattttctactataataaaaggcattctcatcggtcaaaacattgatcattttttagagccgacgctattaagatagtgtgtctatcaaaaatagatgttattggacactcaatagcgtccatttataatatacactaggtactaccattaattataggagtaaaaatcagtcagttatggtcgnnnnttacaattttataaccgaccggtcggttacggttttgatttaaattatgtgtcgatattcatgttaaatttgttgaagagtgtttcgtggctagatctagctgcttttgttgaaaattattctaccaagatttaatatttacaatatatgttgattataaatctataatataacaaactaaatatgcatatttctaaaacgataaaataaatgcatataaagttttaaaatctcacaataatggcaacaaaataaattgtctccttccttctaatcctcgatccattctgttgtaatgtatgattaagaattgaacatgaatcttctcctccttcgattgtgttcatctcagtcttccacaaagacctaattatcaacttaaatagtgtgggcagtgcagatactcaaatcacatttggaacaatttagaggttgagaataaagcataatgaatttcgaaaattaaagagaagagaaagatgagacattaggtttttcaattctcttctctttcttcatatagacattcacttagggttatgtttagatgagataggcttaaaataaagacttgggctgaaatctaactcttagagccgaatatacacatggcactactaatataggctttttatcttgatttttaggggtattttataccggtttttgctaaaatgaaaactgagatatatgtcagtgggataaagactcttataaaaactgagataaaaaatcacttttaatctcgattattatagaaaaactggataaaagaccattttaatcccagttttcttttaaagaccatttttatcctgcttttgctataataatcgggattaaagataaataaaaaaatcatactaaaattgacaagcaacgaaccactacagagacaaatattttccttaccaatattttatgtaaaatatacaatcagtacagatttaaatcacaaataaccagtacaacaaaagccacgaaccaccttcgacaaccacgaatagcggcaaaccaccttcgacaatcgtgagtcatcatcaacgaccacaaatagtgaccacgaagctttgtccaccatgaaaaaccacgaacccgtcgactacgaaccttcacaactgaggaaagagagaaggagagagagttgatcggcgtttcaataaaattaaaaaaagaaaaaaaaagtagaacgagattagaggacgtggagcatagatctctcaagaacaaaaaagaaaaagaagacgaatggtatctgaaagttttaaagggcatgtagctttgatctaaactccattgactcatcctttgtcagaaaaaggccgctcgcttaggatgatgcacggaaatagaagagtagggaaggactgcagctgagagacaccatgccagagcccatttgatctccatgtgggcctcctagagagagagagagagaga

SEQ ID NO: 113921 - DNA, 2277 bp, Cannabis sativa
atgtcacgatgagttcgtgtacaaaccgtttcctttttcgtatatggtatttcgtgagagaataacaaaaccttccaaagttattataaataataaaaagaaaaacaatttttatatattaaaaggaacaaaagcagcatttgataatgattcagacaaattgcaaaaaagaaaggacaaggaaaaaagaaaacaaaaaagtctttaattaattaattcatatatatagtgacaaactccaactgtccattcacaaatgaatgaccccatttttagatgctttgtctaatacctcctaatattaatgaatcaaatcataataataataataacaaaatatatttactagatttttttaactatgcttttaaaatattctcactttctatatacgtttataattaaaaaacaactttatatattggtcacatggaatggccataagtaagtactaattaaacattttacgccatggttgtatgttattaattaggatgatatacatgtatattatttgtgaatttagtatatgatattatgatgatgagatatatatatataaatgggatccacgcatatacacacacggtcatatataaatatatattcaattcaaaacattcacggcacacaaaacaaatagtatatagttgtggatctaatctaacccccaattaataaaggtggcaactttaattaattgggaccccttaggtaaaggccggtaattagcctaaccatataccataattcatagtaataaaaataaaaaaaacaaattaattatgggttgggttgggtacctacaaaactcacttggacataatttcatgatcatgaatatatgcttataaagagaaacagacttgtacgtaagcataaccccactcaaatcaaaattaaactaaacaattaatacatatattactataacttaattagctacttaactagctagaactagaaggggttttatgtatataactacttataaagttcccttttattttaccagaaattgacgtcataaatatgtaaacatagatattttagaaaaatctgaaactcgtgaccactgccacctatatatattcatgcatagttttttcataattaattgttaaaaaaattaagaaattgttaattgttgggtttagaaaactacatttaatataattatatatttaaatacatagctttaatttgaatcagattacactaaaatataagtggtgtgctctgtactcgccggagaatcagaattagaaacggatgagtaattaataaataaaattaaatccaaaagaagaagtaaaaatataattaattaattaattatgattgcgtacgtacctgaatcaagtcagttttatggtgttcagaattatagacgttattagctgatgaaactaatttgttggtgagaaatcgaatggggtcgaaaatggatcgaccaaaatagtaattactattgttgttatgatcatcatggcactcattaatattaatattcttttgagttgattttagaaccttaatcttcttcacttgcttcttcagatgccaataatttacaaaagcttccctccattctggtattagctgagcttcaagctcttttgagaacttaaccattcttaattaattaataacaacaaattaaattaatttgttatatattattaattaagaacgatttgaaagccaaaagccaaaaggcaaaggccagagaaagagagagagagagggaactatataataaggagatagaaagatatggagcttaccaaagggactcccaacctttatatttatacacctacccacctacactacacacacctcttatattattaatttatatataaaaagaaagaaaaacaaaaacaaaacaaatttatttaatttatatttttttatttttattttcttataaagtataaggaagcaataagaagaattaaagaaagaaaaaccggaatgagaattgctatttcacatcttaaggtctccaattacacgcgtatagtaatattttataattggcaattaatttcttatatcatttattaaagtataaataacggccataagtacttaaagttttgagtttgtaagtgtcacaaactcaatgtttattttagcagcattagtacctaatatttttctaatttcgtcaatacaaactctgttactatcttaaataggacacacaaaaacatgtagtatatcagtttgtaacgtcctcgcttcaagcctccattgggtccttacacc

SEQ ID NO: 113922 - DNA, 3416 bp, Cannabis sativa
  modified_base (3371)..(3372): a, c, t, g, unknown or other
ataaatagatttgacatttaaaggattaaaattaaaatatggtatttgtgaaaggaaaagataagttgttaaataaatggcaaaattaaaaatagtggggcccataacatggccagccacttaaatgaatttttagcaattattttattttttttaattctatataatttaaaccctaaccctagatgaaatcctataaatagataatgataggctcctattttcataagctcctcagactattttgtcagacaactgaaaaagagcctctctattgattttgaattctctctctcttgtctcttcataatttgaagtgccctacagtgaagagtaccttgcccacacaattcaagtcaatactcaatcatagttcaaaagattatgaagaattccatcacctaagaagatccaagttcagatcttgtcaatactctgcgacagaaaggaataagagttagagatctgaacggaaggaaccataatattctgctaccaccaatgtaaggttttctagaaatttatatgtgtttaattcattgtctcaagaaatttatgttaagaatgttagattatagaatataatcaaatatacatgttagtaaatctagattctggtaaaacaacttccatcacatgcatgggtgagggtatacccttcaccaacctagggctttgtactcaacgcgtttctttagctagtgattacaacttggcgatcacatcgttggtggctagggaacctcttaatcgtgtggtgtacaactgcggtatcccaatttgtaggacttgctacacgtgtcgcccaaaggttttaccttacaaagttggtgtataaacaaattgttgggcaaaaaggagctgcagaacacgtacgtgcaataccaaggtcttacgtaggggacaagatttgatttggtgttagaagatatgcaaccttcgggtttagctctggattaagttttagggagttccacaaaggtctggcttaggccttcctagatcaactgattcgctaccatcttagagtgtgtgtaacttttatgtactttcagtagcaagagcattcgctgagaatcccgaagttctttccggattcactgacggggagagcctttgggtattacagcgtctttcgtaaccctggtaaggggaagacataggataacaatatgaaatattgtgtggcacccttccttgactgccatgtacaaatcatccggaaacaaggataacagacaagtaaaccaaattgttttttaacaagagctttgaatctaatgaacacctcaaaggtttgagatttttgtgctaaggggaaaatccaagtatacttgctaaaatcatcaataaagtaaacataatatctaaatccatccttagagggactgtaggaaggtccccataaatcagtatgcaacaattccaagggttgattagcacaagttggagacaaggaaaaggaaagtttatgactttttcctttttgacatacttcatagaattttaagtgcttaattgagcctgatttaggaagtttagacaatatttttcttaaaatttgagatgaagggtgaccaaatttgcaatgccatacattagaaatagaggctgaaaaagcttgaggattgcaagaaaatttagaaattgagtttttattactttgagtttattacaatcatttgacattgaacatttactcctcgtattagtaaagtggcaaaaaatcaaatgattgaagagaactagtgagggactcagaggaggtggcaaggtgacattgcaaatcaatggatgaaggtgaataagagtcatctccaagcattcaaaggccatttttatgctaccctttcagtaagaccctctttcattgtttgtccttgacaaaacaacaagatttgtgaaactcaagaaatactcattgttatctgttagcttgaagacactaactagatttttggcgataagaaggacaattaggaaagaatttaattgtaaggaagaattagatggagatgggagaagagcatgaccaatatgacagattaccaacttcttaccatttcctatagccaaagattttgaaccagtacaaggggtaacattatctagatgttccatgccaaaagcaacatggtttgtagcaccaatatctgcataccacatgaagtcatctgcaaaatctgacattgtggatgatgagtacgcttgaggatcaagatcagcttcaaattcattcaaataagcacgaggttaattggaggaaggtttagggtggtgaaagcttcgtaaaaccgataatgatatatagcaatagtatgacccattttgagacaaacttgacacagaggtcttgaaccatgtgaagaaaagaaacgagtatatggcttaacactaggtcttgaagcagatttagatgttgagtctcgagtaaatggagatctgtatgggctagggtgattagttcttaaagaaccaattgtgagattggctgccatcttggaagacagatcaacaacattgtgatggcgcttaagttgacactcataagccattaacagggcttgaatttcttccaaggacttatattcactactggatgttattcctgaaacaactaagtcatattctggtccaagactatttagcaattgaagctcaagatctttatcgcttacaacacatccagcaatagacaaactgtcactgagaaattttaccttgtcaaaagagtcagagacggaaaattgttgtttcacaattgacctttgagctgtaaaagtcgagcctttggttgacctgggaatccttgttcaagagccttccacaacgaagaagaaattgtatgtgaaacaagagaagccaagacagcttcagtcattgaagatcctagccagaaaagtagcaggtgatctttgcgcttccattgactgaagagaagattctagtcaccattgatcaagaattaggaaggtttatcagtgctgaacaaaagatcatcaaaatcatgaccgataataataggaactacttaagacttccaacacaagaagttcccacgatcaagcttgatcatcaatgaggagctcagcgacttttagaaagaagtccacactcgatttggaaaactagaggccatcgtggctggagcaaaaagcattgttgttggagcatcattatcattagatttagattgaggatcatttaaagaattaatcatggacgttagccagttggctctaataccatgaagaagttttcaagagagaaaaaaaatctatgaggaaacttaagaaaagattcacattgagatggaaaaaaccttagtgataactgaggagttatcatattggaaaattctacaatgcacnnccttaaaatggatatattgatgcaaccctatctgttttagcatc

SEQ ID NO: 113923 - DNA, 6737 bp, Cannabis sativa
gagtgttcgaaaggaaagaagaacactgatactacgtacaaatctcttgtgtcaagtgatctaattttctactattaattgatttcgtatttattattggcatttgcaaaaactctgtttttttcactgtgtttggtagaaatcttgagaatcttttcaaacacatccataagtatacatacctcaagtatattctctatttattaacaatcccctttgtatgaactaccatgcaaacttatagtgagttccccattgatgatgctaatttatcaatatctaagactctcatgtacttttctcttcattaccactaaggttttactccctggttcacatgctaccattgctcccttcaatcatcactaccctcatacttggttaaccactataaaagttattttacactcaactatatagtttgttgttgaataaacaacttactttatgatccaacattcaccaactacatgaattcatgcccattaaattggatcatagtttacaagcttttcgctcattctaggtgagcataccttttcatttttacttagtaagacaatcttttcttgaaatttcaatggccacctaatatacaagattgaccacccgatcaaatacaaaagtattctccatcattactgtatcactatgagtaattcaggtaatctttttttccttagtgataccgctactttccataccattttgttatatgttacatttgtaacatccctgcttcaagcttatattgggactttccccacggactaatagctcttatacataggttttccactcttgccatttcttagaatgaagagtgacccttcaggtcaactcgagtgttcctaacgtggtttgttctgactcgcatacttcatgggcaaaacttcctgaatgaaatcatcccaggtcaaggacattgaccatggacttctttttggatgggctactaaaactaagattcgccttgttaatataggtagtcacaatcaatccattcaattccttaactatgtagtcccaaacatagtctcagaatcatcacatacgactttcccctaggcatgtgggattatacaactcttagtcttttccttgcaaatcacgaggctctaatatttcacagtttaactcatgcccctgtttgatctcactatcttttgtgtcatgaatagatacccgcacataattgtcgccttcaattcatctaggattccagacaatactcataaattgtcccgcctttactaaaattttctattctaagcaaaaatattttgctctccaaattaattaaatggatgcctccattagctactcttgtcctatattttgcttaggaatattagcaaatctaacccatattattatttctctaatatgtccaccctgtcaaatgagttaccattaaataacatacatgcacgattcattcaaattattgatgtctctaattgaatgcacaatgggcaacataaatatcaatagcaattataatattgctaataaaattctaactagagtcgatcaaaggactgatacatgagtccccttgagtcataatcgataattgggcaagaaccatacactcttctcctttaacaccagtctttcttaattgtaggcatgttcttttcaaatgacccactaccctacaataaaattagatttggctgtaaattagctcaaatggtgcctttttgcatcttaaacactcaggatagggttgccatttcttattctcactttgaccgctatcctgggcaccctataagcttttgttcaataccacaattggtggtttatttagtttttgccttctaatttgctcgtaagctggttccatgagtctcaccacatccagttatacaacaggaagtgtcggtggtatatgaatattcacaagatgagcctgttgttctctcagatctcagatttatttctcctttgttgtctaatcatatcctgcatagcagaatttacatgttcctagagagctcgctaatcaggctatttgatttcccttactacataatttatcacacatttagtccacatcttctaaccatttagaactcagacagatatcaatatcaatttcttattctcactttgaccgctatcctggtcaccctataagcttttgttcaataccacaattggtggtttatttagtttttgccttctaatttgctcgtaagtttgttccatgactctcaccacatctagttatacaacaggaagtgtcggtggtataggaatattcacaagatgagcgtgttgttctctcagatctcagatttatttctcctttgttgtctaatcatgtcctgcatagcagaatttccatgttcctagagagctcgctaatcaggctatttgattgcccttactacataatttatcacacatttagtccacatcttctaaccatttagaactcagacagatattaatatcaatatgcctataccatacacatattctcatcgtaattattactacagtacctttcccaacatacgttatgatagtctaggcatgtaatttaataacaattaatataaacacttactataccatgagtcaacctttcttcacaccaattgtacatattctacctgtcttcacgacctttaagaccatggatgctctgataccaagttgtatcatcctatagggacgctacttgtgttattttataaattagtttaatactaatagattaactaattattaaaaactgtgatcatattaaaaacttgactgaaacaaaacacataaaataggcatcatagcgacatcaaaaacgtgtcctgggatccttattataaaaaattcacaaaagactatatacaaaaataattcgaaacatataatcaaaatgcacagtaaatatagcctaaagcaactcctagcaactcgacacactggccaatggggtcaatatgtatattgctagagaatactgtcacctcatggttgatctagtgtttcttttcctttacctgcaccacataggacacgtgagtcacaagaactcagcaaaaaaagtaataaccatcatcatatagtttattatttggatattatcatttatacttagacaatcaaaattaaacaatcgcgcattactcataagatgaaatctaaataacttctggcatctaccacaaataacatccgtatacagatatttggtaatacaaaattattataccaataacaaaaatcatattcatttaataatataaattatatatatgttacctcataagtaaccatcttaattatatcacatttcttaattatatatgagtgttgcattgcctaattaggtcctaattaggtaagcccgtgccatagcctggcacccacatatcatgtaattgcatcacctaattaggtgagctcgtgccaaaagcctacactcgtatatcacataattacatcacctaatcaggtgagcacgtgttgcaacttggcaccaatatatcgcatcgcttaatcagatgaagtcgtacttatgctcagtactcaaatatcactgctgcccgtacctaatagggtacgctgccaggaagaaacccaacaacgatttcaatctatgccatagcttgccattctcatatcactgctgctcgtgcctaaaaacgtacgacgcttggtatatcacatctcctaatcaagtgagcctgtatatcacattgatggtatcattacattgacatttcttaatcaatcaattttttttcattttatgacaatattaaccatatctcaatctcaatatgaatcgattcacaataaatttaattgtattacgatataacgtactaggcaatacaatatacttttttttgacctttgatccagattcatgcatgtcggccaaccctagtggagaaaccttcatgatgatcttggccctatatcataacaacggtaaaccaataagtgtttatcccaaaaaactgcttaacactcgcataagataatctaaggttttctatcaaaccccgcggtataaatacaatataataaatcttatattttggctctaaaacatacaccatattgtagagctcgttgcaagctttgaaacagtatatagaacgtctaaaatggacacctgagtaaaaagttatgacaaaaatatgatttctaatctcctaggaatttccaaaaacagtgaaacatgaaaatcccaaatttcaaactcattgatacacctccgacatctaggcaaatcattccaaacttcacagacacatatataccataaatattacagtcccgacgtaactaaaattaaaacctagcccttaaacggaaaataccattaacgttcagagtaagctttaaaaagttttaaactcacctcaaattcaacaagtaaacatcgaaactagttacatagctaccaaaaaataattctacgaagtcagaatctccataaccagtgtaaatcacaaaggcaccatataaaactaatcgtatttaacttaaaacaaaactaatccttaccttaagctcttcatcttcaatgatttactttcccactactactagagcttgaattagtaggtttcgagttgaaatttaaagaaaatttgatagtggaggtgagggtttcattacagcgacaggaatttttgttcgttcgttcttctgttatgttttttttaaaacataatatatataatctgataagatttcgtttatatataataataatattaatataatattataataataataatataataattataataacaataacagtaataatcgaaatgttaataaaattttattattaatagttatggtattatttcttagctagtaagaaatctctacttctagggtattttgtcaacttcgagtatcccaaaatatttggtatatctaaaattaacttatctcaataatcccatcaatatttctaacttatcctattgtgatacttttggcctccaatcgggtctttggggtttccaaacctaaaaatatttttttctcacaaataacttacattatatccacatatttcaaataaatctctgtaattattaaattacacttatttatccacttatcaaaaaaatttagaatttatgccaattaggtcgtaggatcatagtcctactcattagtaccttattaatccataatatataatatatatcataattattaataattatatttttgggatatttaatagcttcattatgtggatagatatttagagtaggttaagaacaagagattgacttcatagatttggggtcattgacagccctacatgtttgttatgtaatcaagtaaatgaaactaacaatcacatcatgtttgaatgtggcttgcccgctcattaattggacgagataaagtcatggttgcaatggggagcattgtctacttctcttcctagattatttaggttcataggaatgtctaaaggtagcaggtttaggattttttttttttggctactgcattggcgagtcttttgtaacatatttggaggacttgaaatgataaactttggaatcaaaaaagagaagatgatgctagcgtagtgtgcaaagttaaagaatttgttaaacagagaattttccttgtttggcctaaaaaggtcaatataagtgacaaaaatttgttcaattccttgtaattttaaaaaaatatacttgtatagaattcagtttttaggcctttcctttttggtaaaggtacttataggttgtacaaagtatagtttggagaaattaaaaatcataattgattcattaaagaaaaaataagtcagcattccctgatatctctatagttgaaaatggagagaagctctacatgggcatctcggcaacctccgagataaaaggggaagaaactatgttcttgaagatgcatctagaaataattctaagctacaaaatgtatagtatgtgcttgatattcataagaatcaaatatctggaactttgctgagtgtacatgggttcaagatgatgtttgaatttaaaaaaattgtactcactaaagttggtgtttctatttggaagggttatgtaaaagagggcatatgaaagatgagtgtaatggttgttaagacaagtgctattactgataataataaagttagtacttcttctgtttaccttcttgagacttctaatttatggcatggtatactaggtcatgttaattataattcttttcgtagattaattaacttattaaatcatacacccacatttactattgattcgaaacgtaagtgcgaaacttgcgtagaaaattaacctggtcatcgttcaaagtagttgaaagagatattgaacccattgatttaattcatagtgacttttgtgatttaaaatttattcaaacaagaggtggtaacaaataatttatttgtttcatttatgatagtacagagtattgttatgtgtacttgctaaaaagcaaagatgaggctatagagaaatttactctctataagcaagagattgaaagtcaaattataaaaaaattaaggtgataagaagtgatcgtgatggtgaatatgtggaaccatttagtgattttgtgcacaaaatagaatcattcacgaggtaactgtaacgcccatatttgaaatatactaaatttgaaaactaactttaatatattataattacttaactataaagaccgggatcccgagttataaaaca

SEQ ID NO: 113924 - DNA, 2084 bp, Cannabis sativa
ttgacaaaaaattagtttagggtcctatttgtacaattttagaaaatacatgatccattttatcatttaacaaatcagataatccatttagtaacttttgaaaaacacagtgtctaaaatagtatttacccttattataaaaattaatttatatatcaaaaaacaataaagataataaattatgctttatctttgataaatgtaaatattattaaaaaaatatatagtttgataattaaaactagtaaattaaatttataaattatttattttatcggttagaaatcagatatagtcatcataagttttaatacaaagattttaatttctaaaaaaaaaaaaaatcaatccaaatatttagatttaacattggatttgatttgatccgaaaaagtaactcagcagagcggagcgggtcgacccgatctatttacactcctacttatagctaaaagtataagttaagtaatgttttaagttattttttatatttggataactattatatataaaagtgtttttttaatgaaaagttcttctaaagtgtaatattattttagaccatgtattttataaaaattactgaatggattttttgtgttgtttaatgaaaaattggaccatgtatattttaaaatattactaaatagtactatgaattgattttttgtcaaaataaaacttaataacaatctgatgaagagatgttatgataaaactgattatattttctatgatgttcgtgctaggaattatcttcaagttggttatattaaagaaaaaaattatcaaaaaaatgagcttatgatcctatttatactattttgaaaaatgaaatatctaatttatcatttaacaaaataaaaaattaaatctataatttttgtaaaatataaaatttaaaatagtattaagctaagacaaaataaagcaaataaacataataaatctacaaaagacaaaatggataatatatatataatgtgaaattgaaaattaaggactaaaagtagatgagcaaatataaaataaaacagatttaaataagattccacactagaattagtgagaggagagcaaaaacagcacatgtagatttcatgataatcttcacaaaatatatgctttggttttttattttgaaaatgaccaaagatttgtctttatttataagcaaaatgttgtacatgcatttcttgaaataatttaatcaatacatatccaattatagtactgattttcatgttttgattattttttagattaatttcaattggttcatagaaggaaccaaaatatgtaacacaatcttatcaactcttccaccatgaatgaaataataataataagaaatatcattatgcatcatcactctttgtctttaatacttattaattaagatcatttgagaaacatgccagataatttttattttattaagtaggataatatctaaagtagaccactctcaacagctagtctattttatcattcaaaataatcactaaaaaatccaacttctttctacttcacatacatcacacaaatacaacaatttttataaaattagaaatagcttgcacatgcaaaagcacatgctgggctttgataaataattaacaaaaaatagttctatattaaatcatattatttattttgaaaaatagctattattaatctatatataaaataaaaattgaaaaatggtattttctttttgtaaatgtcaatatatttactaaattttagtaattaaaaaataacagtaatgatttgcagtagaaatatacatcgggtgagttttattgagttttaggttttcgagtttcaaagttttttgtcttaatttagtttcaatcttttacatttaatatataaacatatgagtgatcttcactacaaatagtttataaaaaaaaaaaataataaataatcaatactcattgtataaaattttattttcaacatgcgattgttaataaaaatattatgtaagataatttttttatgggtaaataccattttagactctctgttttacaaaagttatcaattggaccccgtgttttgttaaatgacaaaat

SEQ ID NO: 113925 - DNA, 4454 bp, Cannabis sativa
  modified_base (283)..(290): a, c, t, g, unknown or other
  modified_base (475)..(485): a, c, t, g, unknown or other
ccactaggtgttatttttgctctatttttatcattttttttattccaaataaatcaaccctaaccctaggtgaaattagtataaaaggaaaagaaagtctcataatccaactaatgtttctaaagctaaaaacctagttttctttctctctaggtttatgagacttcttcctttcttcttctaatttcgaaacctatagctttcttcacaaaccaaattcaagcctttagtgattgagtgtgtgccaacccatagcaagtaagtcctcaatcatagtgtgtannnnnnnnaagaatccaaacaactgaaggaatttcaggctcagatcttggtgatactctgcaacagaaaggatacacgggttagatatctgagcggaaggagtctatttaattccgctgcaaccaatgtacgatttctcataccttttatgtgtttattttcatcgttttaaatattcatatttaggatgttnnnnnnnnnnntgttagtaaatctagatcctgctaaaatatattccagcaagaggcagctctctaaagaaagttatttaccttgggagggatttacaaatgccatactcaatgccaaaaactagaagtgttcgtatccttatgtgtatgcttctgatcttggagaagtttataagcgctttttacagaaaacacacctgagctttctcctacccaagaccatgtgtcgctggtagcatttggactgaggggaattcctaaaatcatagcagcttcatggttgttaaacgtatcgtggactagatccgtatcccaagtccggttatcaatgtgaaagagtgagctgacttgttaattcactaatttaggatgattagttgacacataagggttttgtgaactagacaaccaagaatgttgtaaaatacttacactataattaaacaattacactataattaaggtagttaaatacttagacgtagttcatggtctcatcaaaaatctaaaaaatgaacaaaatgaaacatatttataatgattattatagtttaggaaatttttttaataaacataataataagttagaaggcaatactcttaaaagcaaggagacatagataattttaagtttaggtatgaaaaaaataataaataaatttgtaaaatttatcgggaattatgttaaaaaaatatgataacttttagcgcaacaaaataataataaagcaaaataaataaatttattcggtttggtaaaattaccaaactcacgaaaaagatatattttcacttattacttatactctctattttaatcttttcaccaaaatctcaatacaccatttacttcttcctcactctcaccacacaataacaaattcacactcacttctcttttcaaaactcactctttttctcacaccccacaagaacacacgtacatatgcatagaaaaaatgaactttggacggcttaaggatcaagtcattctaaaacttccttaagaatgttattcaaaacttagccaataaaaatattttacacattaattatccaaaattaataaaataaaactaatttgaatcaaatatctccaacaaattatttgtatacaatttgatagttaaattctttatataaaaatattctaaccttgagggattagtgacattgctagttaacataattcacttgaaactgagagatttttagagtgggaaagttaatgactcaggcgtagtattgttttagaatatatgcacaaactcatatttcttaagatccattcttatggaggcttgctagtttagaaattgaccttttgtcatttatggaaagaagaagataaatcaaatgcgggtgtaaacaatatcattgttttttaagattacttatgcaacaactcatcataagaaccatccacaacattactcatcacataatcacagctttgtgttatcttaaattgtagatttacataagtcaaattctcctcacttggagattaaccccatgttctgattcgatgaccaacctgaaagctgcagaatggcggtaagccggtgagactgagaaacaaaacttggacagaataagagataatactactttcagttctgtcatggccatgtgctgcccaatacaaattcgagtccctataccaaagggcatgtaagcctgaggaaacttggaagctccaagaattccatgctcaaatcttcctggattgaattgttgggcatcaggaccccacagattagtgtcttgttgcatcatagagattggaatttgaatatttattccttttggaactagaatgtctttaaattgaacatcctgcaaggcattccttacgacataaactccaggcgggtaaaggcgcaaagtctcttgaatcaccatagtgagctgacaagaaacttaaacagttagggggaaaagtaaaaaaaaaaaaaacattcattgtactgaattaagcaggggtttttagtaacataaaagtgactgactgaacattgtgtgaacttacaactttcatgcttcggagcatattggcatgaggacttccattcttccaaacttcttccacctctgcacgaacgcgagtttgccaagctggataagcagccagcagcaacaaggcccaagatgctgtagtagcagtcgtttcatggccagcaaaatatatactcttgcagttatctacaatgaatttgtcatgagtaaggccaactgatgggctatctataccgccacaagctttcgccccctcaactatcatctgcaaaaggtccttttcatcagcagcctcagttctttgcttcaccacctctaaaatcatagcattgatttgtttctctagtctccacacatgaatgttgttcattgttggaatgaatctgatttaaatacatttgtatattacaccaattaagaatgttgctgctcacataagatgaaaatattaaacaatgatgacaagaaaaaaaggaaaactaaacagataatcttaccttatgccaggaatcccaatagttcttttggacatcaacttttgaagagttctaagctttgagaaaatttgctccccttgtgaataactgcttccaaaacaggcttttgagattatatcagcagacaagcttctcaaatcatcatcaaccttaatatcagaaactcctccctcatcttcaattttcttctcccaagatcttatcaaggaatttgtagagttcaccataagttccaccatacccttgacaaagacacataacagaaattaattttaattgaatttaaatgcaaatctccttttccaaggttaacttttagagaaacatcattactctaaagtcaaatccttaccaaacagtaatgaaaaatttgagggaaaatggctcaaagtataattaaaacaaacaaaaagctaaaaaaacctgacttggtaagctaacattatattgattataccttgaccttgtcaatgtagagttcaggagcaataatctttttctggtgagcccaaatttgaccactagaggatataataccctggccaaacaggggtccatgattcttggagagataagaaggttttccaagacttaaagaagtgcatagactaacttctttcaccaactctatatctgttatgcacaagaattgaatatttcctactgcataactaaaaattggccctgcataattattttcaattcaagtgatacacaagttaattcccagttcacaccatataactatatacatatataaatgatgtttaaaggagggtttaccatggtcaactctccactgtatcaaatggggaaagatggtggaaggccaatcatgaccaatcgaaacgacatcgtaaagtttgtcgtttgtattacaagtagtagtagtcctttttgagcttaactcaagcttgatttttttcatttcagatatatttcccaacagaaaagaaggtaaaggccctccaatcccttgcttttgaagctttgatcttagccttataggttccaacacaaaagaattataaagatataagaacaataatacaaacccaccaactaaaacaccgatgaccacgtttaacatctccattgctcgactctctgtaaatctgtcttttgggtttctggcttcaaaaaacttgaaaacctttgaattgtttaatcatattgtacgatattatcatactattttactcgtactatttaatatttaagagttcggtttggaatctgaagtcatttactcgtactattttaatacaacctttgaattgtttaatcatattgtattttcttacaataaaaaaattaaattgatattgtagtaagagcgtcgttatagctaaccatcagatattaattagaataattatcttttttacccctgtacttgtgacactatactattatgccccttaatctattcagcttgttacaaatagtccttgtataattttat

SEQ ID NO: 113926 - DNA, 1928 bp, Cannabis sativa
  modified_base (32)..(53): a, c, t, g, unknown or other
tctgatctatattaataagcaaatctgattannnnnnnnnnnnnnnnnnnnnnggcataaaacccaacaataagttccatgtggggtgaatgaccaatagattcgatcttggccgggtggatttaggagtggaataaactgaatagcttggccaatatcatttggaagaagggattgaatctgacaagcatcccattcttcgctagatgatatgagaatggacacattcctatcaagggtgtttggtgtattgagataggtaattttttttgtatcccgtgatccaggcatccttaaagatatatatagaggtaccaccgcccactttttttgtgtaaaccctacaagaggagttctttaccccaagaaatgttgttctagactagagaagagtggtgccctttaccagaatcaagaaatgtgaaatggggatagtatcgggctttgaggaaggtagctacaagtgaggaagtagcctgaagaatacgccaagcctgcttggccaacattgcttgattaaagactttcatggagcagaaacctaggcctccatggaatttagacttacaaagatgagaccaactcttccaatgaactttcctattgtgttcagttccaccccaccaaaaatgtgccatcatggactctatttttttttttttttgtgaaaatagttgggtaacaagaaacaggccataacgtaagacgttatagcttggaccacttatttgagaagtatttctttgcccctttttgagaaaaaagtggagttccacttgttaagatgtgaccacacatgatcctgaaagtagaggaaagcttcctttttagagcgaccaaaggattgagggagtctcaagtatttatgaatagagtcccgaacaggaacctggagcagggaggtgatttggattttgatctcattagtggcattaggagaaaaatagagcaaggatttctcgtagttgataagttggcctgaagccaaattgtagtcacgaagcagttccttgatgtggttaggagcaacgggggttgcaacactaaaaagaatgttatcgtcagtaaaaaacaagtgggatatgattggtgcagtcatataaatttttaggccaatagcgtgcttccttggaatgcgttgatggactttctatgagatgagtgaagaaagttcttcagaacataagaggacaagatatggggagagcgggttgccctaacagatgcctttggaagggatgactaaacctaggagttgttgattgatggaaaaaatgaaggaggcagttgagaggcaagccataatgagattgatgaacttggatgggaaattaaatttgtccacgaccttctggaggaaatcccactccacacggtcaaaagccttcgctatgtcaagtttgagagccatccaacctactttgccgtgtttatgatgagtcaaagaatgggtgacttcttgtccaatgatgatgttatcagagatcaagcgattaggtaagaaggcactctgagatggtgaaataataagacaaagtattggtttaaggcggttaaccagggtacgggagatgattttatacaaggtagaagaacagaggctaatcaggtgatagttagtgacagattgagggtgattctttttagggataaggacaatgatggtattatttataggtgttaaatctgctctgtcatttaaaaaactaagagcagctttgatgaccttgttccctaacatagtctagtttttttggaaaaaagtgtcattgaagccatctggtctggaggccttatcacctagtcggacctcttcagacgtgaatggagcttcccaacacaaagattctattgttgggttttatgccctaaataaaactctttataatctgattagttatcaatataagaaatttgaagtgatttat

SEQ ID NO: 113927 - DNA, 4508 bp, Cannabis sativa
  modified_base (924)..(926): a, c, t, g, unknown or other
atgaagtacttatattaaatttttatatttacaaatttaattcgtatttttatttcgtatttaggtatcttattttcgtaccaatatatttgtacttttatgtcaaacgaagcgagagatcatatttcttgtgttgtatgatacttgtggcgggttttcctacagtgcaaacaaaccaacttgaatatacaactctaatccccactcttaataaattgaaacataagaacatagtaaattgtgtgcatggcctatcctttcctacttgacaagactgtcaattttgtgtgcagtatgaaggtatttggctaatgaggatagatatgatatagggtgacaatttgttaaaggttgtttaggattcttttcacaaactcaaaatttcaagcaccaacttctcacttttccaattttgaagtaattaggcgcaacaaataatatttcctcttgagaacaagtaagtaaaagggtatccaaggaaagattccaattcttgttaaaatttagaattaagtaattgataataaaaagagtaattctaataattcttgaggtagaatcgaataggattgtaactttaatgtcaattggttaattgacattttatttctagatattagtaatataagactaataatttttgaggtagaactgaatatgagtgtaaatggatcggatcagatctaattcagttatgcttcgaccggatccagatcatataatgatctgccctacctaccccgctaaatcaaatactcgaatcgaatcaaatctgacctgacttgatatgatccgactcgattgttttttatgtaagaaatttaactatctaaacttataattttatatacattttaaattttgtattagtattatttaatacaatactatgtgggtaatgacttgtattaatagattgtgtannnttataatatatttttaataaacttgacccaacaccaactatgagtcgggtcccagttctcgggtttgggtccaggtctcaggtcaggttttggattcaggtctaggtttcgggtctcgagtttgagtcccagtccgggtcccgagtgcaggtttgggtctcgagtctcgagtcccgggtttggtccgggtcgtgggtctaggttgcgagttcagttttggtcctgagtttgggtctggcacccgggtctcgagttcgggtccagctattgggtccaagtcccgagtctggatcccaagtctaggtctcgggttggggttgggtccaggttcgggcccgggtcctgggtcccgtgtccaggtccgcatccgggcctaggccccgagtgcgagtctgggtctcgagtctcaagttcagtctgggtcgtgggtttagctcgcgggtctcgggtccgggtccaattcttgggtctaggtcttgggttcggatcccaggtctaggtctcgagtttgagtctcggtcccaggtttgggttcgggtctggatgcgatctcaagtcttgggtctaggtccgatgtcctagttccgggtccgggtccgatgtcctaattctgggtccgggtccgatgtctgtcttagttccaggtttgggtgggtcctccgagcgagtcttgaattaattaaattttttttttttaatatattgaaactgtatcggatcagatccaatttgaaaaaaaaaattaagcggggtggaacggatctaatccgagatttaataagtatccaaacgtttcaaattggaacttcgacccgatccaactaaatggatctttttgatatgcttagaatcaaaggccattgtgggcgaatgagcttaactggaatgagtgagattacatttttttttagattacttggttatatctacagtacttcttaggaagaagcaagttatctcatatattttttttttacttttcttgagtattatggcttcattctcatcttgcaatggaagagattttattcaatttgtgaacaaacacaaaggaatgatctttgttactaaagttcaaactttttcaaaagtcaaggctccaattggcccaaggcccaaggtatactacattctcaattctttttccctaattattcaagcaagacaatcattttatgaaaaattgaactaaactcatgcagcaaggttagaatccaatacaacagtaacaattacaacattgtagcagtactgctggcaatggataatagcttttttactatacaagagtgataaacacttgtgcacaatttagttcgagaagaaatacaaaatcccaagttattcaaaaaatttggtaaacaccctgaataatattttacacaaaaatccattacctttcacaagatcaattctacaaatgtgactgattcaaagtttttattgtgtggtagtgtaattattataaaaaatatttgtttttactgaaattttccattactcttattaaatttatataactttatgaaggtttaattattataaaaattataatgggatttttttgttattttgatatataattataaaatttatttttaagaatgttaaaatttgaaatgtaatttttgtcttttaataggagctagattaacaaataattttataatcctaactagccaaccaaattagaagacacaaatttagaaacagtaaacatatccacttaatacttgacaactcagcttcaataattctaatgaattatacaagcaagattaatattattaaggcctaacaaagagatagttagatttagatattcaacaaatactgttttggtctccaaattaagagtgttgttcaattacaagcattacagtggaatcttcatttaaaaatattttatttaagaataatttttaatttattatacatataaaaaaattaatcctaatttaaattaattataaaaaataacttttaaattataattagtcatgtattaaaaaattacatctttatataataataagtatattttattaaaatatatataatatataaatttatttatgtcaaattaataattatattttaaaaaaatacgcgtataaataatgattgtttattgttattgttattacattaatattttttagtattttttttttctataatgttaattagaatataatttatttagtctcaattatatgtttacaaagagatttgactgtaattctattgtattgtattctcttctaatcgatacgttaatacaaagactcttacgcccttttattttattactctctttaacaagtttgttaatcatttcatgggatcttaacacattagtctctaaacttgctcaaattgattcatatgagaaacatgccaaagctttctctatatttagcaaaaaaaactaaattgaaacaaatgacaacttaatcaacaaacacttttatttttcaaatcaaaagcctttcatcataagcatatatatactataacaacaaaggtgacatgacaagatctaattgcacaatcaaacccttgaatagttgtgagagaaatattaaactcaaaataaggattggatcaagtatgtcatgaacacaatgaaaagaaatgtatctacctcagcagtaaacgtgagcatacatgttgccttttaaatgacagaaaaagcttacttttacactctcctcaacttccttaattcaatataacaacaaaaacggaataaaaaagacaagaggtgccatatcgttgttattggtacactttattatcggatctcagatattttgattaagtaaataatatgataaattgtaaccactcgtaacatgtcacatcggtatggtgttttggagaatgtcttatgaggtagaaagcttaagtggaaaaatataagaatactatacggattaaagaatgttactcttaaaatttatattgatgccacacaatgatattgatgctatactttttttaaaaaaaataaaaattgaaagtgtaatatatataatagtttaataaagaaaaagaattatatatacatataataatatgtaaaatcataattataacattgttgaaagatgctatagtgtttttagaagtaaggatgctaaaaataatgtaaaagaaagataaaataaattattatatctttaaataatatagagatatttaacacttttaaaaaatactactattagaggtgctctaaaaacatctcagagtgaagaaatatagtttgcactattggtcccacccgacacttttattgttttagctaattacaatttttgttttgtttttttaattaaaaatttaaaaggacatcaatgcctattttagaaactttttattatctcgcaagaattggtatccactttaacgagtaatggagcaggatcggacgtaattttatatatctaaagcgagtttggatcaaggtcgaaggtgatactacctatctcatattcaatccagatatatagtttctaaactttccatatagttttctaattattacgtattaacttgctgtgtaattaataaagc

SEQ ID NO: 113928 - DNA, 1554 bp, Cannabis sativa
aaaaaaaaaaaaaaaaatacacaccaatctggggatattgacatgtaaagccttttcttttgtaggacatcatgaacattcactttccaccataacacttgccagacaaaaactttttctttaggaggtacagtcattttccaaagtgaccaggaagtctacaactgccttgttgtccttatgattatcaaaataagttttgcaagtgaatgattcagaattatcctccaatcaaaccctacaatcttccaacaatttacatcttatacttcccaacctctccagcaactgaataagctctgacatttctttgtcattaagattattaggtcactgattccaacttacattatctccatcaccttcgtgaaagtcaaagatgcaactgttcctaataaagaaaattctgcaaaattaggaaatccctgttataaagtatcagatcctgcccacctatcttcccaaagctgaatagatctaccattacttaccttacaagacaccctactcgaaactcttcataacatgacatgataccctttctaggactcctgacagtcatattgctcccataatggaacagcggtgtcctcacgcccccagtccagcccataggagaggtaatactttcaacctcactgcagctggtcagaaagagaaggacgggggctccagtggacaaaggttagtatcaacgtttatctgagctagtccgtgcaagccccttataaagaacacatggaactggtccacatggttgtaaaatacttaaaagacccctatgaattatagtgtatagtgtatactatgcagactgggctgaatcgaatagtaactatttagcaaacaatttggttcaacatgatcaaacaagctatgtggaggttggcatacatctcatgaaaaagaagctcgaatgtggagttatttgtataccatgtgtgctatctcaacaaattgcagatgtcttcatgaaagggttacttagccaaaattttgatttatttttgtaaacaaattattcacgatcataatcaatatctatactatacagtatacacaaacttgaggagtatgaatgatattttttatttcctaataattactccagatctaaactttcctaactgatcgtaattctcctcgatgtaaggaaaacatagggaaagttaggtcattagccatctatttatgtctctgtttttctcccagcccagcaagtaatgatggaaagtaaaaaaaaataaaggttttcaattatttacagaaattaaaaaccaaccaccgattgacaaaaaaaaaaagaagcaaccaatgagagaataagaaaaccattgctacctttaatgttattgtaccaacaaaaccagccttgacggtgactggaagctttaatgagtttagtgcctctgccttcagtttcaaatctttaagaacaacatcacctgttcaaaattgaaaaataaaaaataaaaatattttttaaaaaagagtacaaattctgggggaaaacgtagacaagatatcattattatctttcttgtattaatgtga

SEQ ID NO: 113929 - DNA, 2525 bp, Cannabis sativa
ctacaagggtaaattatttctaaaagtgattattttttataatatgatggttttattattattaaaattttataaatctcttctttataatattaaattaatcaagtctattgcattggtttatattggtaatgaaaatgctcatacttcatatggggaaactcgatgtccatttgagtaaacggtgcagcatattgcttccattttgtaattctttttgttcattgaagacgtgtgtgtcctcttgagtcatgtaatgaaatagagatggtaactagttacaagttagatatagtttagtcagctataaacaatgcatgtcgtttaaattatttaaactgataaacgacatgaagatagatcctttaagtaagcaatatatgtatataattattaccaaaatcagggcattcaattagtatcaggagcaatgagtaccgccagaacagagcatgacacgaacacagaaccctaactaatgctaaaagattctagtggtacctattactttcttaggtgtcaatatcgttattggttaactaattcttaggtgtcaatatcgttattggttaactaagtaccgagtaccatatagtttaatataataacttctaaaaaatatcactaactaattgcaatatgacatgtctataagtactaaacaccaacagtaccaaatagcaatgctcttataaaaaacatactaaaagtaatgattcccactcccagtaaatttgctggagatactttaagcgtttttcttttcgttcactaattgatgtatcaagcaaccaattcacacgaggcaactaaacccatcaaaatcaaatcaattttatagctacatgcagagtcaaaaacaatcatcttaacactgtgtacctaccagcaaatcagacagtttaacaaggcaactaaaccccatcaaatcaactcatctctatagtatatgcagtgtccaattcacactatgcacctaaacacataaaatttcatccaaatcaacacagttgtatagtatatgcagtagtgtcaagcaatctattcgcactaagctactaaacccaccaaaattgcatcaaaatcaactcaaccttgtgaagaaatatattcacagtaggcaactaacccaacaaaacttgatcaaaatcagagcagtttatacaatttgcatttctcttcttcttcttttttattaattccagtttatattgaatgaatatcacaatctgtacaccacaaaggagatgatttaaaaggcaaggaagtgttacaacaaacttccaacctatctctgaatctggcattgcttgtctttaacaatataggcaaaggaaaacacacacctttctctacacaactctggtgtctaggcttaatcctcttatccaagctgaaagagaagtactgtggaaactccttcaactccctcaactctctccccatttcaaccacgaagtaatcaaatttgggttcaaaattctctttaatactgtaacaaaacagctgaggaaacctcctaaacatggacaccgcttcacggtgagaaaatccaatcttctccaaatactcgattctgggcaagaatttttcctcgacggaacaggaaagcaagtcggtgtgtttgttcacctcggctattccaatgctctggagaaagtagagagtgggtctgagcctgttcttgacactacaaccgagcaatctgggccgtcggttgataacccttttgagatcggagccgttgacacgggcctcgcgagtgaggaaggtgaatactgggacgacgtcggagaccctcgaggataaaacatcagggcacatacccacgacgcggcgaaactcgatagctgtgaatccgacggttgagacgacgaaatcgacggtggatttcatgtcggagagtgggaaggttaaaatcggtgggtggtcttcgataagagagaggaagtcgatgcctattgagtccaaataaagcattttctgttcaaagtctgaagatgatgaagtgggttttgaagggggaggaagagtggtgtttgttttggtggaaagggagggaaaacgggggtttttggggtgagaaagtgagggaaaatcatggtttggagggagagggagatggggtctggaagggttagaagaaatggtagctctggtgtttgaaatggaaatggaaatggaggagaagatttgggtttcttgcatttggtggtgttttagagttgagtagtagtagagaggttgttcgacctcttcttctacatagtgatgatggcgataatggcggtaatggtggacaatggataagggtggaaagagcgtttttatctatataatatgctgtgtctgttctatctgtttgaaatccaagggagtgttctgaagaggtttggattggactttttttgtggtaattgataagtaagaaagagactaaaagaagaaaaagtggagaaaatgaatactgaatattatctgggaaatttacaaaaatactggaatttgagttaatttttacaaaa

SEQ ID NO: 113930 - DNA, 982 bp, Cannabis sativa
  modified_base (63)..(67): a, c, t, g, unknown or other
accttttatgtgtttatttttatcattttagaaattcatattaggatgttaaaaacatacttnnnnntaaatctagatcctagtaaaatgtattctaatagaaagatggttggtaacaaagtcaaaaacaataacaacaacatagctaatcatccaaatcatgtggcaaacttgagagaatgttttaggccgacttccaatcctacattagtcggcatgatgtgagaaggcaatcctacattaggccggctgcaaatgttttaggccggatgtgagaaggcaacaagtgaaagtaaacaactttgagctaaatcctacgtatgtcatcatgatacaaaaaaatcaatactctagtttttcccatgaagacccaaacattcacttatctactttcttagaaatctttgatataataaagatgaatggagttccaccagacacggttagactcaagctcttttaattctccttgagagaccaagctcgttcgtggtactgatccttgcctcctaatgcacttacatgggaggagacgtctcaaaagttcctcaccaaattctttccgccttccaagacttctaaactaagggcgaaaatcatttagtttggacaaattcaagatggagatattctatgaggcatgggataaattcaaggagatgctatgaaagtatccttaacatggcataaaagattggtttcaagtccaactcttctacaatgggcttaataaccaagcaaagttacacattgatgtcgcatctagcagttaattctatctaagacaccaacggagctttgagtttatttgagggtatggcaatgaatagttgcactgattttgttgctatattactgcttttcatgctggttttgttgggttttgtaccctaaataaaactcatttcaatataattagatttaataattaatcaagatcagaaataatattttatgatttgcatggttcacatgatttctt

SEQ ID NO: 113931 - DNA, 5213 bp, Cannabis sativa
  modified_base (5173)..(5175): a, c, t, g, unknown or other
tattttattttttacttttttaaaattaaacaaaatttgatataaaataacatactaaaaagaacctttctctctctctctctctctctttttttttaaaagacactaatacaatgtttagaattagaagctttgttgattcctgggtctaggggtggataacaccaattcaatttaaattggattggttattgtatctcaatctaaaaactgtataatatttatttgattttatatttattgaatttttttgttttgaatttgtatcattaaattattttctgtatttatttttatgtgatttgttttattttattatttggcaatgttttaattattttaaacttatgtttataaagtattaaatttaaataaaaagtaatatttagtttataggtattttttttcataattttaaattaattaatattaaaatttgagtgtgtatttaaatatgaaaacttacaaaaatactgaaatttaagttaacttttacaaaaatactgttacatgaattttttttcaaaaatattgtgtttttataaaataacagtggaacacaaaacaaaacaactaaaacaacagtggaacaactaaaaaataacagtagaacaatagtgaaaacttaacacagtacacagtataaaacttataccgtatttttgaagaaaaaaaaattcactccacattataaaagtaaaaaagttgaaattttcaatatgtagtgtaattatcccattaaatattcattagaaaatcgattcagtccaattaatttttaaattgaattggattaaatttgaagtctaattggatcggagagaaaaatattagattagatcgaatgtccagccttacgtgcatgcacgttttatacttcaaaattgttttacttttttttttaagtaatttttggttatttctacagaagatttttactatatatatatatatattttgtagcaatttttactatatatattgatatcaaaggttggtaaaaaaaaaaaaaaaactttagccgggggaaaattctggctaaactattaggctaggctacaaagttttaacttattacaacagattattgttgaggcagagcaatttgtctaaatatggtaacttttatctgaggttgaatcctttgtatcagctcaaagatgcacacatcattttgctgaagacaattctctcttgcaaatgcagaccatccaccagaaaagtgatattctgatccagaacgagatctcgtaacagttaaattcacacgccaattttgttcaccaacccaaagaattacagtttgtgcctttttctcgaaacaaaggcttgcaaaagccaatggaatatactgcacaatcaagaattaatactcaaacatttattactagttctctcttcatcatatgaaaaaacaaccatttcaacataccagtctctttctatgcattgcagtccatcccaaagccacttggatataaggattgtttgagaagtattggctggcagctttataagatctactaagtcctgaaggtgaatgcatatctttagtgccttcattgggaatgttttgactttatattcttgaatcatatagagactaattattacctgaaggttcaactatttctttctttggaatcaagtcctcctgtgaaatcttgcttggtttgtcgtaattgctggtgaaagaagattcaattttcacacaaggtgttgtgtttggtactgaagtagctgaaaataacacttgtatatgttaaactccgtggctatatatatatatatatatatacattcaaattatatggagttgttgttttagttacctggtacgttaggtgaattcgttactccattcttataaatagtaacttcgaatgatgttatcacaatgttctttctcataacaaagatacaaacatcaccaactttcaaatcattgtccatagcaaaggccctccaacccgactcgaatctgatttgtgagtgtccattgtactgtctataattgcacctaacaggccaaaacctctcgtcctcagccaccttaaggatcacatcttcatgatgcttgctgtgactgaggaggtgatacttggcaaagccaaatggtataatcttctcaaatgaacagagtcagtacgaaaagcattaaattttaaactcaaaagatgaacttttaatgtaagaagcctattaagtaattaccatattataagatgaacttccaacaaacgatgcttgcatgagaacactgaaaaatggatcatcagacttaaaaccattagctctcataagagcttcaaccttttctgttcctctcaacatttgcttccttgaaatatttgaaggttccatccaccttggcatggaagattctccacatatgtcatctgaaaaatcaaacatattagttaaattatatctatccttaaagttttaggatgatcaagattcaataccttcagttttaacataaggactggttttccttttcttgtgggattgagaagaacaaggtaatggaggagacttgtctcttgttttaggcataaaatgatattctctctccaaagtattcttctcaaagatcataacattgaactgagagttcccttcatatccaaaaactaagagatttccatggcttaaacaacagtcttgtacaaatttattccaacccttggctatccatactttttcatcactacttttggtcaatcctacctcccatcttgatccacatggaagcttaagaattacttgacttgatacacagccacaatacttgacccaaaatgtgtttggaatttgctgcacaagggaaaattagttatgccactaaagcaatatatgtatatgatctagaaggattgacagtgaccattccacacaaatcaaaagcatttcatttttagtttaacatgtcatatcctattagatatctttagacaaacttagtgaaaacggatataatacttactattttgttgttcaaaagagtttcttgaagaataatcttgaaaaaatgaggctggacacaagccattgctgaacactcctcttatgtttttttgctcgttactttctcaactcaaagctttttattacaactcaaattaagccaaattgaagagtgaaaaatgcttttgaatagttgtataagtaaacacattattctctcactctgcagacttatttttacttaatgtatattgatgggaaatgttgatttgaagtttgtagacccaacacttctctttgtcagtcttttttgttttcttctctgcatagaaaatcgaaaaaggatgcaataagcaatctgatttgatgaaatttaatgactattcagctttagctcttttcaatatttatttatccaagccacatataagtcctggttgagtgacacatgaatgtgaagaatcttttgggaatatataatagaaagcagcaacattttttttgttttacttagcttattattctttcttggaagcaagactgacttcccagaccaacaacattgaaatcgaagtgacaagtctgccaacaactcaagtaatatttttggataattctataatattgcagtaattatggattgaattttttgacacaatacaaaattagtacgaattcggaagacaccagcataattaagcatcacgtggtatgatgctataaattaacacgatataaagaaaaatatgtctttaagtacgatacgacacgacacataaacacgaataaattaattcaaaagatactatacacgacaagtgtgaaaagcacaatacgtcattaaaaatcttataataataatatatatgtatttatcaattataaataaattaaaataataataaaatttaaatataatactgaatataataatttaataattaaaatactaaaaattaagatcatatattattaatttatttataagatgtgatataaaaaattaagtatttataagtagatatttaaattttaataaacctaatttttttttaagattatctgtaaaatattgttgaaaaactatataaatataacttactatatacgtcagtaattgtaaaacaaaatgaaaaaataaaacacgaatttaagtcggaatatagaaaatggattgatttgtttaagaaatgcgggtcgacacaaaaatatcgggcctatgggttgtgctgagcctactatttaaaaatattggcacggcgtgacacgacctatatttttctgtgggatccatttcttgaaaaatactaataaatatgtcaacacgatatgtacgaacttacaacactagtacactctatgtacaaagggctgttttggtagctctatcttttttaatttgtcagtaatttttttagtttaatttgtttatgatgtgtgacgaaactctctagactctaaatttttaagtttaagaattgttatagtattgaaaataaaatttaaaacttttgttgcatgtacacatggctggccctgagttgaaataggtcatagataaaaaaatttggggcccttattataaagataaatgatactttaaaaattattaaaaaaaatatacatattttttaaaagatatttttttatttgtgctcttaaaataagtgggccctaagcgcgggtctaacccacctatacttaaagccgaccttgtatgtacatgttaagtaattgtttgaacttttacttcgatttttaaaaacttaaatgtgatttgattataatttaaaaaaaaaaataaactctccaagctgaaagtgtaccgaactttacaggggtatattacaaatttttataatattatttttgaacaagcacaataaatcacttaaagatgaccaataagactagctttgaatttttttaattcatcaaattaaaatatatagaacactagataattataccaatagtaatataattcttatatttattattaaggtgggcaccttaggttaaattgacttgtcattgaaaaattgtagtttcaagaagggtctaaatttaataactaaaacctatttatgaaaactaaatttatgatcaataaataatctatatgtgattggtttaataaattttgtcttaatatatatattgtaaattaaatcatatttatatatatatatatgggtatgcnnntaatgggtattacccatgtatgggtattttattcttga

SEQ ID NO: 113932 - DNA, 2831 bp, Cannabis sativa
  modified_base (53)..(54): a, c, t, g, unknown or other
acaataaaaatgtaaccattgaaacctcttccataaatatatatatttatatnnatatatatatatatatgtcttatggttaatgcttatattgtcattgatttcttatttattagctggcaattggcaatagaaacaatatatattaaaaattgttattaataaggtctcacttgtgaagaataatttagcacacgaaagtcaagtttaattatgtgtaatattaatttgtgtgtttgaaagttgttattaccttattaaaatctgttgagatttatttaataaacgttctataaacgaaattgtttactagtattgctcgtgatttttgtttttattctattcataagttcaacaagagtaatacaaatatctattgttatggagaagctatttgattaataaagtttttttttttcattttcaaaaaaaatatatatatatatatttaatttttaaatatgattaaatagcaatacaaattttgccgatccttatatcaaaatttgcgatgagaattatagttataaaaaaatttaaaggtttttttatttttacactttaatttttttttttttttttcgtatttttacggaattctacataaaaaactttactacaactagcgctgcaatctaaattgtaacaaaaaaaatagtatagaaactcttattgcaactagcgctgcaatcactttagaaactcaaaccgtaaatttaaaaaacaaaaaagttaaaaaaacagtatataaagtaattccccaaaatatttgatatattatgaaacttaatatttaaatttatcaacaacaatataattatttatttttcatgagaaaagattttaaattcatatataaagaatatatatatatatattatattaatggtgtctatctaataaaaattgttggtttaataatttttttttaatttcttgttcaagttaacagttaaaattaatatcattaaattaattaattaattcttttttttttttgaaaaacaattaattttaaatatttaaattaaatttatttattaaaatataacttatataattatttaaaagtatcaataaaattaaataattactttttatataaattttaatttaaatttgaatttgacgttaattcaattaattaattctcctttataacaaatttattagttatattgtttaaaatatctacatttatttacttatttcattgtttaataaaattaattaaatatattttcttataaataaattcaaaactagataaattatctttatttttttaataaaaaattaatttcaaatatttaaatttaatttatttattaaaatataacttagataattatttaaaagtattagaaaaattaaataattattttgttatataaatcttaattttaatttgaattaaactttaactcaattaattaatccttctttataacaaattgattagttatattgtttaaaatatcaaaacttatttatttattttattgtttaataaattagttaaatatgttttttataaataaatttaaaattaaattaaattttgtatatttaaaaagtataattaaattgtattaaatttaatttttatttttattatttaaactaataattaaataataataagtctaatataattttaagcaaatataatttatgttactaatatttaataaatattatatatatgtttatatataaatgagggtatagaacacgatgagtataatagtattcaataaaatataaatacttgtaactaattaatgatatttcacggcctataggttgacatcagcacaatgctggaagaggcagtccattatgttaagtttttgcagcttcaaatcaaggtgacatagcaaatcatttatatgtttgggtaactttagaatgcagcttatattaaggtgtactgatatatttttatttatttcggtatgaaaaaaactttttaatccaatttttgtcattgtatatatattaatagttatttaagatttaataaattgtttaaactatatttttaattttttaatttttttttttttgaatttattaaaattttataaaatattttaaataattataatataacaaattcaactgatgcccattataggagtgtatttatattgtaaataatataaatggagtttaatttttggagagttaaaaaacaattaattgattattaacttgtatatgtatagcttttgagctccgatgacatgtggatgtacgctcccatagcttacaacggaatggatattattggcctcaacaacaagttttcttgaacggagggagagagttcacacattaattattttttttctatctatatatttttcttcttatgttgatgagataatcctaattaaactagaaattacttatgatgttatatatatatacatactagatgaaagttacgtggcgagccacgtaaattttagttttatttaagttttagtggtttttgtttaagaattcgataagtaattgtaagttattttttttaaacgatttgttttataaaagtaaacttgttaagaatacaataattgtgtatataaacctataattgaaattggtctcgtgttctacgattttaggatgttacgattgagcatttgatattaatttgaaaattttgtgcaatagattcaaaattccgtagatatttttattaaacagccagaaaaaaaaaaacactccgagttttgagaagcttaaattaagaccacaatgtatattattcaaaactccaaaccacctctcacatgaccaaaccccatcagttgccagcg

SEQ ID NO: 113933 - DNA, 1765 bp, Cannabis sativa
  modified_base (1571)..(1588): a, c, t, g, unknown or other
ttttttttttttttggagaaattaaagaggagattagggtagaagaaagacagagaaaaatggagatgagtacagaagaagagacaatgttcagtctctgcagttctgactgtggggccactctgcttatttacaactcggttctttttgttttagtttttagttttcttattattattattccattataacgattgcttcaattattttatttgtgcatttactgaattaacctttttcttttgctttctttataattatttctcctttctctacctttattttctattagaaaataatgactaattattcaacaaagaccacatttaatgttaaaaatgttaacattttcattattttttatggtccagctttatataattgtcatgtagatggtgctctaaaattttacctacgatttgactcggtagatcctcctagaatatgtttttttttttcttaaatattttaattgctaaaattatattattagtgctcagattatgaagattctaaccgaagatgatgcttaactaaaaaccaagttttcttccctatttgataagttaatcctttctttttatccaaaaggcttaaatatgtctttattctatataataccattaccacttcttttttcttttaaatctagctagtctttagtctacacagtccatccatgtggaaatttggcaaacaattaatctcttctacaattgctactagtaaaatttgtgtataataggtatatacctctaaaccctaaacttggttgaataaatgctgttataaaaatatatgtatacaatttgatttttagtgaatatattcttttggtacttgttatttgtcttcacaccagttatacggtaaattaatcacctcaaaagtataatttatctttacaaagtttggtaaatatatatttttttgaaaacaaattaggcccaagttgtaacttgtaagtctacatcacagtggccttttagtaaatataaaggtctaaggagggcataaaggggtttatggaacttgtaatcctgttgatgggccaagtatggatcggtccttaggattagtccaagtgtgccacccataccacctgcaagactttctttggagatttcatggtaaaggtttcttatctgctgacgtggcaatcttctattggtgacttcagattttagggcttacctggcatgtcttttaaggaatggatgatattcacgtgtatcaaggtgggattttggatgtctctcttagaattaggagcaatgatttgttagactttttttttttatttttgaattcttttcatttctttttttatatatatttttttctttcttgttttggtgtctgtttgccaatttattatgtgtggcagatgcgaatcatacgttgagcttattagcttcaatgatttgtgatttgatgatctttattgttttgtggcaaatcttcaacttcccctattattagtatgtatctttcttaaagccactttcactaaatatttctacactttggctttcatacgataataacacttttattattattattattannnnnnnnnnnnnnnnnnttattattattattaagaaaataacaaaatattgctaccttttcaaatatattaagtagcctatggcactttcactcgtttttaattgatttacttttatcttgaaagattatttttattaattgatatttacttagaaaaatacaacggtaagattataatatctttaccaagatc

SEQ ID NO: 113934 - DNA, 3867 bp, Cannabis sativa
gtcgttagtccataaaatcaactaaagtgacgtactcgtgtataagagccattcattccgtgggtgtgaggacccaatggaggcttgaagcggtaacgttacatgttatcttcctgcttcctgggcgtataggttctgacctggtgttgttgatatactaccaaaaggttgaccggctccatcgaccaagtatattaccatagtagacgttgttgttactattgtaaggcacacctctaaattgaattctttgtccaagggtagaatgatggcaaggacaaaacagaccatgaagaaggcttcgaagtccaaccctcactttgctcggctatttacaatggatggagtgaagtaggctaggcctttgagcgtggatggtgaaatggtaacttgggacattgaagtccaagagattgaggatcaaggcgaggtccatcctgttggtccctccgatgctaaagcagaagaagaggaagatggaattcaagtacttctttttggcagctataatgaggtcggagaacctatcttcgagctaggtgacgtcttggtggtgaattaggactatgttgccatgggcacaaaagggaaaaaggtcctcggtgggtttctcctccgtccacactcacttttaagagattaacaaatctctttgaggaaggtctccttaggaaggtggaggcattcttgcctagtctcggccaactggcaatgaaccctggaggtcggttttgtgcatagtcggggtctcatgccaaacaaggcacaatcctacccttgcatccatactttaaggaggtaggcaactactataagatctgtccgacccaattcacccccaaaggtattaagtacttggttgtgttattcgtattgtacaccacacagggatggagtgaacctttcgcccacgacaaaaactagttatttgacttaaaatcaagtccaaaacaaaataggttgggatatttctacttctcccatgatgaataccagtggctgagcggcactacaaataaggaggtgtccaagatcgttgggtttatcaaagattacaacttcgtcaaaggcatggatgctgaccccctttccttccatcatattccctccaactttcgtccttgttttaccttgggccttaggtcaagattccaaaagattcttcagctgtcaaagtcagctggaacatttccctcctggccactacaaccaattgtattaagtatgggctttacgcgttttaggaggttcgggagtctgaacatgcagctggggggattagtgccgatcaggagctccaaataataagaaaactttcaaggcgagtcaggtgccaattgaacggtctatcaagattagagatggccttgaagaagttgcccgtcctactattcaggtgacaggaaagtggaaggacgtaacaatggaggatgatggggatttttttgatgaggatgccccatcatttcttgttcgggagggtgcagcccctgaattccagggtatctatttttctacttatctttatttattcttacttgtttaggtttttaacaagtgttttctttcgtgaagtcttgtcaaagaaaatgaagtgagcactcaagaagaggtctggtgatgcctctggccaaaagtcactcgccaaactcccaaaggtggataacgctcttcccactagcattactttaagctccaagacacgccaagtaaatgttgagaggatctcgactgccgttgttgtagatatccccgagactattcccctaaccaagaagaattccaagacttaacctttagatgcattagccaaaggctctaagggggctaacactgagggggccgacctgccaaaaccagttgctactctactcacactacaaccagagacgaagaagggcaaagagatgctcagtttttaccagaatcatttgatgccctaggttaacgagcagctcactagggtggaggatatgctagtggaactcttggtcggcagagttatgaaggaagtcaccagggtaagcttttatcttaagatttttctgtacgaatttttctgtatataagttttaacttttttttttatccttgcgggttaatttgaagttggcatataatacccctgagccaaatcagtagctctaaaggctaccacgaccaccaatgacttgaagaaagcactagaagatgcccaaaaagatgatgaatcgaaaggcaagtagttgggcgaagtgaacaaacaacttattgttgcaaaaaattctatagatgacttgaaacgggaaataaaagacatgtcatccattgccaagcttgaggcagatcttgaggaggaatctaaaaaggtgcgaaagctgctcgatgaaagggaaggactctgcacactttttcaaaaccaagaggtcaaaattaaagaactagcaagtctctttagaaagagttcgaggagaagactgttgtggaagggaccctagccactcagagggaagcacaccaaaaagaggttaaggagtacgaaacagggattttagaggtcttttacaagttctggtcgacaaaccctgaggctaacttcgattacttaagggaagatttccgtgctaacttcttgtgcttttgtgaagctaagaaagctgagtaagcaacaaagaaatatgacgagggttcttctgtcgcccaaactcatgaaggcttaattgctcaagacttgactgctcattatcaagaccataggaccctcctagagtgaccttctaaacttttttttatatgttcgacctacaagccttttatttgatacaacatggctgatgaggcgggttaaacttggaattatatttacattttttaagataaacggctggctaggtagcttttaatcccggaatcattctgcttctttatcttaatataaatagtttcctaaaattttgaattttattttttgctttagcttattttttaccaatgcttgtatgggtgtaggtgcccccaagtgatctagtagacttttgactcttggtcacttgcatttcataagttttattttatctgtccatctttttggtttaggcaaaccctctgcacacatgttatgtaatcaaataacttgctataatttgcaaaaaagtataaaattgacacaatttgaatgataattgatatctttattcatttatttgtttgtatgtgtgttactgtagtaacgtacatttattaaataaaaagtcattttagccaatttaaatataaaaactcttggatggtatattttgaccaaaagacattattaaagagtaataatttttttaaactaactatactttaaaagtggttatctgaccttagcaccggttgttctctaaacctttgagcgagattcgctcataaggccatcacttaagagtaatgttcaagcattgtgaaatttatgtggtccatggaccttttgcacttattggtagtattttcttaaatgttcgctattccaatatcttagtagaagaactagctccatattttcatcatattgaccaagcttgtatgctccagattttataacttcacttggtatggtccttcccaattaggtctgagcaaactcgttgcactgtatccttagtgcttaggaatacccttttgagtaccatgtctccgacaaaaaatttccttactttcacttgcttgttgaagtagcgagctactttttgttgatgagctagtagctttagatttgttaaatttcttttttcttcaacttcatcaagtaattctgccaggagggcatggttagtctgctggttgtacgtcaaccttctatgggatggaggttctaattcaatgggcaacattgcctcataaacc

SEQ ID NO: 113935 - DNA, 3034 bp, Cannabis sativa
  modified_base (2973)..(2991): a, c, t, g, unknown or other
aaacctgaaaccaaagaaaacaagcgtaattctattccaaaaacaataataaagaagaaaaataactataaaatgtgatccaaaacttaggctaaaaatagcctaacatctctgaagaatcaagaccccattgttcagtagccaaggagatttactctcaattctatccaggtccttaccgttcttgaacgaaaaaatcaagaatgaagcctctgttgtaacctttttgattttaactccccaatcaacttttgcaagaccccaaactctccccaaaatggttcgaataagggctctattcaggttcttggtggtgcaaaatctccccatcagacacgagtttcccacctctgcttcccggtcttcatttatttcccatccttcatcatctttcactctcaggttgttcgcacgatcaaggagatcatccatggttatgtcaagcgtgttaggcattcctacaggaaaggctcttctcaaacgagagagcaaaagttattattggtaaaacatgataaaaggttttattattttgtttttttggttgtaactttctaataaattttttaattagttgatttctaactgcttactaaataattttaaagcactactttatcaaaaaagaacttccaattttttcaaaaatgacaaacagacctttatgtatggttcaggagccttaaattagttaaagacttggttttcctagcttgatcatagaatcggattatcaatctcttatcctaaaaatatttagctaaagatcatagtgactcttatctaaccaatattattagagagataattgaaacatgtaatgacttttatgatgttgttttagattattggattattttcctagaactattaatggggttgcctataaattggccaagtatattattacaatggtcactaatattgtttcgtgatcaggttatcctaatattgtgttgagtcatgctttttttttttggcccttttggtttaagtcttccttttgcaaataataataataggccaattacctcacttcattttaaggtgtgtgatctctctatttgatttcagctgttggattgaactttaaagtcaaaaagttaaaccttatggatgataattgtggaagtgtaaagtttttaagaaaattggtaaccggttgaattgtttgtagcgtgatgtacttattttgaatattttattgagaagatttgtaggaaaccttatcattgctatatataatgaaaaaatttaatatatatttgttgggacacgattttgtctcgtgatgtattttcacggaatgtatttcgtggtacattagataggtctcggggtacattagatgggcctcagagtactttaccattttttaacactaattacccttaaatcaacctcaacgctcagatcaaataactcctcctaatttagactagactactcaaatgaatgaatagcaataaataacaagagaattttttaacgtggttttgaagttacatcttcatagtctacgagtctatcttattcagaatttataaattctatatagaatacaataaaactgttatccagaaacgaatgataatcaatcacaagattatttatttttccaaaggttggccctcctctattccttggattctgtcactatttatagaagtctaagatgacagttattcctttgggatatggtcattcctaactgctcatgaaacgtgaacattcaccatggtttatttttgtgcacatgagataatttaaataaccgcctaaccactctttgtctttatctataaacggttatgctgactgtactcaattattcacatcattcgaataatatcttttttaaacatcttcgtgaagaaatgtgtgttatggtgcatctcccagccttccttaactattaagtaaggtataagagagatggttacttcaacatgttaagagcaaggtgactgaatgttaaagttgttgtcgttattctttgaacatattcacaagtatgtaggtcaatgagctacaaactcattatctacccattctaaatatttccattatatattctgtttatcccaaaatggacctatttacctcactagtctcgtcagtcaatagttattattcatgtctccctattgactatacggcggcgagttccagtatttttattaactatatttcttgagacgagtcatttaagtacatttaataatgcataatttgatatggttcatattctagctttgatacacgtgtcaaccttttattattgctctaaatataggtataatagttgtcccctaaaaagtacattttaaagtaaaaaatactttttaaatgcctcaacggtacgatcatattttccccatttaaaatttgcatgcttttattttgacggttcaaaactttgaggcaaatcatttctctatttcatgctctaaccgttacatgatccctaattctagggagtttagtaattattgtagcagtttttcctcgtctgatacttatggtaatgttctaagtgagagttttaatattgccacctttgtattacttgctttacatagaatttgatatattattttttctctcgcatacatggacagtttagaaaatctcctctgcagtctaattgtccctgccaagcgaggtaataaaaagagaacaactcccatggaagtcacttctgattccaccctagaagtttcaaagaaaaccaaaaagactgccaaaaagaagtctgcctcgaccggcatatccattgaacctgagaaagccgcaccaacaaattcttctataccagcaactacgagctctggtggacaatctttagggtatttccttcaggttaaatgcataagggtactaaagtggataatttttacaaactgagagtactaattgatcattatttaaagtataattagaatttctgccccttaaactttgacatgtacnnnnnnnnnnnnnnnnnnnttttaaggtcgttaaaaatacctcctgaactattgagattgtt

SEQ ID NO: 113936 - DNA, 1113 bp, Cannabis sativa
tagtatttttgtaaaataaggcaaaatatcggggcgttacatcattattaatggaagtgtagctaactcttagcttcaacccaaacaattttatcagcaacatgatgccttgcaaccgctacaatcaacatcctctcccgactaacaatcacatcacaattgattttcatccaattaaattggagggggagtccaataatcaagaacaaggctgttataggaacctgaaacacagaagagacaagtataataaaagtatttctttaaatagtattgttgtgaactttatcgttacgagctctctaaatagtatctacaatggtaagcataactcctaaacatttattgtttaggctccaaataaattaattaatctatgccaataccgttaatgatcaccattttctcttatagggtatgagacccatggggcaaaattatagtaaaaaaatggttactgtatcggcctcaccccacaaagaggacatgcaaaaagtatctttcgaatgacactactacaaaatacatttttaatgtcggttaaaacgtaggtcaacataaataattaacacttttgatcactccaatttttaagtgtcgattaaccgacgcctataagtcgtcattagtgtcggttcatacaccaagactcatacaaatataacaccgacagttaaataaattagttgagtcttaatagcgtcagcttagaaccgataatatgttaccttattatgactctcccagattttgaagttccaaaatttttattctgaagaatagagtagtaacatcatatataattgggggctctctttacatcctgaattatgtaggcaaatttggtagaaaacttctcattattgtcctttatctatttccactcatgatcagcagcaccacaacccctagtgttcctttcatacaaaaggtaacagtcccaatataaatacatccatagaccatagtttcagtaattattattacttttgtcaaaaaatgcacaaaatgtatttaccggattgtgtatatatttagttgagatattaatttgtatattaaacattttattacatgcatttgtagttgtaacgtccccgcttcaagcctcca

SEQ ID NO: 113937 - DNA, 3739 bp, Cannabis sativa
  modified_base (3686)..(3712): a, c, t, g, unknown or other
tctctctctctctctccctctttcaatctctttatttttaatctgatattgctttttttttagattttcggtggtagggtggtggtggtactgtggtgcggtggtggtgccgtggtgccgtggtggcagtgtcgcaacacgcagtggtgctctcccgtctctgaaaaaaatttaagattattgtaaatttaagatatgagatttttttatgtgaaattgagaaaatttgtgtggcatcgatctggttataattttttttatcaagaaaaaaataatcttcattaatcaaaaagcaaaaaaccaacttacaacacaacacaataagcacccaccctacaaagaggtaatttttaacgataatatcctctcttcatctttcaacttcttaaaaataaaatttctcactatatacttagtatccttttttatcatctctataatcttttggacactataagaaaaatcattgaaaacacaagtgtttctatttttctacacataataaattgttgttgaaaaaaccattgcagcaaccaagttttcctgtttgtttcccagctgcattgtccacagctgccagtcctccatttggtccgaccaagcagcccctaaccagtcattgatacccttcaaaacctgctgagaaaaatcgcaggagaagaaaaggtgagctaaattctcatcataacagccacacattggacaaagcttgttgtgaatatgcagaatccgaaaaagatgatcccgagtgagcaagttatccttcactgcctgccagtaaataaaatggtgctgtggaatagcaaatcaattccaaacaaatcgttggtgtttaaattgctcaccatgacaaaggctcttgtataacttgttgacacaaaatttacctttacaagttgcatcctccacttcttgctgagaaaacactaatattgcataattttttcaagtaccaactagtgtcattttttagttgatactgccagaagctttgccctttcaaatacacatggttaatccatcgaacccaaagagcttctggatgatgattgattgcccaaacatactttgcattcatagcctttttccacttagcaccttcaccaaaaccaaggcctgcttgctcctttggtaagcaaacattagttttagaggtaagatggaacttacttcttgcaccattgttaccccataaaaaccacatacaaagcttgtctatttccttgattgtgccttgaggcaacaagaaaatattcatccaataattccttagacccaacagaacaaagttgattagttgacatctccctacataagaaaggtgcctaccagcccaagtatgaagttggtttttgatcctcttgagaataaccccatcgtcctccgctttccactttgttggtctcataggaaccccaagatattttagggggaaacacccattcctcaatttgtaagatctcaagtaaatcagacctatctcatctagaaattccatcaaagaaaacttgagatttagcaagattagctttgagcctagtcctattactaaactcctcaaatattcatttaacacaagccaccgagcctttattagctgtgtagaaaataatgagatcatttgcaaaacaaaagttaataattttcaggttcttgcattaacggtaaaacggaaactccttctcccttgcccctgctgtaataaccgagtaagatactccataaccaatacaaacaacatcggggagataggatccccttgtctaagacccttagctcccttaaaccctttttgtaatcagctattcatcataagcacataggaattctcccttaaacacaccataatctagtgaatgaacctagtaggaaacttgaaacttttaaataaattttcaagaaatcccaatctaccgtatcgtaggctttactcaagtcaattttcagtgcacatcttggagaagcactttttctactataattcttaatcaaatcctgaaaataaggatattatgagccaaagatctacctttaacaaacgctccctggttttggccaatcaacaaaggcagcacctcagataatctaccgcagatcatttttgagatacacttatacaacgtagtgcagcaggcaattggcctgtaatccaccattttacaaggcatttcaacttttggcacaagggcaataacaacttcatttaactcttttgccatcctcccagttttaaggaaatcaagaatagcctccgctatctcatccccgattaatttccacatggctttaaaaaatttataattatacccatctgctcccgggcttttagtgcttgctatactaaagatcactttcctgatatcctttttactgaacttctttattaagttcaattgaagctcaatactaagccgaggacccatctccatacatctctcatcaaagttctgagatctagaactcttgctgcccatataatttttaaaatggtgaactaccttattgtagtcttccacagttttcccatcttcattaatgaacctgacaatcatgttctcctgtctccttttcttgatgcaagtatgaaaaaaagtgttattatcatcacctttgaacagccaagttatcttacttctctaaaccaaaaaactctgatacatggcagcctgttgttaaaacgtagcagcaggatttccttcctgtaactgagccaaatcatttgttggagccgcttgtgcattggttaaggcacactggtaatcaactttagcttggtgataattctgttccacatctccaatttcctcctttttgaagcttttgaggacatgtttaagcctcaaaagcttcctaagcacacgatgaagcccagaacctgcacagggttcattccaattggtagtcaccacctcctgaaacttactctgagaagtctaagattaaagaatcgaaatggcttgatccctaaattcccctgttgttgggttttaaccacacaataacagtgattagagtaagtttcccaatgaaaatcagccaaagagttgggcataaaatctatccaatcctcattagtgaaagcatggtcaatcttcgaataaactctatccttcccatcttccttatttgaccaagtgaacttcgatccagaacatttaagagcttctaatttggactgagcaatccaagccgtagcatccactaaatcactaggagtaactactctacagccagttctatcaccataacaaaaaactgcgttgaaatctctaattatcagccaaggaaccccctaacaattgattgtagagagctccttcgataaatcaactctctcgtctatggtgttgagaccatacacaaaagtaataaacacttcaagttgagaaccaacaaacttaacttgacagtgaactagttggttgtgatccttcatcactttcacctgaacaaacgacttgagccaaacaactaaaattcttctttcacattgatcaccgcgatggtaatcccacccatgaaacatctttaccatcatatcatccactttattattcttcaatttattctcaacaagagcacctacccctgctttatttagcttcataagagtaaggatatcaccttgcttatcccttttattcataccctgaacattctgttggataattattttaccaggatcnnnnnnnnnnnnnnnnnnnnnnnnnnnaacaccctaaatatgaactctctaaaa

SEQ ID NO: 113938 - DNA, 1725 bp, Cannabis sativa
  modified_base (1607)..(1611): a, c, t, g, unknown or other
gatcactaacacttgaaaatctatttcaacaggttgttgaaagaccaaacaaaggcgggaaagaggtgaggcatgatctcatggtgatggagaatctcacctttggccggaattttactcgccaatatgaccttaaaggcgctctccatgctcggctcaatacaaaatcaaaagatcccggtgatgttcttttggatcagaactttgttaatgacatgaattcttctccactatatgttagtagcacagcaaagcgtctcttgatacgagctgtttggaacgacacagctttcctcaatgtgagtacttaaatttttctgtttcgggttacattttcactcaataatttcacattttcatgaaagatatttctgtttctgtacgcgcagtcaataaatgtcatggattactcattattagtggtagtagacactcaacgacgagagctagtctgcggtatcatcgattatctcagacagtacacatgggacaagcagttagagacatgggtgaaatcttcacttgttccaaaaaacttgcttccaaccgtcgtctctccaatagagtacaagaggagattcaggaaattcatgtctactcatttcttgagtgtcccagataactggtgctcgggcaattcctccggcaactttgaactcgatcgtgtcagagaatgattctttctcaccatccaaatggttaggtgacacaaacatggttttttcctccttaccccaattcgttttctttaacttcttgcctaagaattagattctctggttcggtttacaatcgattcgccaatactgtaaatagtctacgatttcatatgagtcagctatcctatatatcctgccctgttattctgcaaatttttagagaatttctggggatagagagtcattcatctaaagtacaaaatgtgcagccaagtttaattttttttggtattgttgcctttatatttatttatgtatagccttttgagaatatcagagttgctctgataaatagtatcaatgaaaagtttttagctcatcattctttcttgtacatgaaaagaaaagttgttaatggatatatttggtgccattatataaatgctatatcaattttttatcttccccttttcttagttactgggtttttttgctaagatttttttactacaacttgaagtagtatttatgtagaacattaaaaagaaatatgcttggatttagatgagatgaaatgagaagcaaggaaataaggtcgtgtgtttggttgttgggaggaatgaaaatataagaataggaatgttgataactctatgaaaatagagttatttatatctttttggacattaaattagccttgttctcaagaatttttagtttacttttgtgacttttatttagttttttttagttttgcataaatattaattttagtgtttttagattaattttaataatttttttttaatatttcatcaatttaatttaatttctcactttatatatagtaaatctctatattgtgttttttatttggtagaaagtttaaatgcatattttgagcttgtcacgttagttcaaatgaagagtattaatgttcatggatgnnnnnactaatgaccaccaatatttgatgtaaaatgaaatggactcaaagcccaaatattttacacttgagtggctatatttattgggcttttatttcactagttgaaagtcaaaagaa

SEQ ID NO: 113939 - DNA, 1058 bp, Cannabis sativa
ctcttttctttacaatttcgccccggcttagtgaaaattcacaaattagacatagtctaagtttagaattataattagacatataaagtctatctttagtagcctttactgggtgcctttggaggagaagtagatctcaaagaaggatcaacaatcacgggctagttgaccagaggtggacctgaaggaggtggaggcagagtggcctgagtcatatctgaggcagcccctgtccgggcaactttggactgagtctgcccaccagaagggctgctcgacgtgcattttagtaggttcctcatcttagaagccatgtctgtaaaagaaaaacaacaaagttagaatacaagttataaacacaaagagcaagtaagggtaagtgaattactaccatcaatttcctcgagataatctacacagggagaaccatccaaaggcccttcatcctcagaagaagactcgtcaaagcttttctaagtcataacagccttacatttgcctttatctattgacacaggcccgacaggtctcacggactcctattacttaggcctaatcaaaactagggcatagtcatttgtgctaccccatgcaagatgcctcagtcaggcttggttcctcctagtttctgctcaagcaatcttaactagtaacatctcattgtcatacttacttttctcttttttagccgcatgcctctttttcttggccttctccttctcaataggagcatcatttggatcattaagaggtttgattagagcctcaattgttggtttttaaagcatctccaatggaggtgtaaataaatgatgaaaagctaaaatatagctcatttaacaaaaagtgtgctccaatggtgtgccaaaaagtgatgtaaatttggcacatagcaaattttgtgcgaaatttggcacaacatttgctatgatgtaaaatttacaccacaattaatgtactacttttttcatttatatttatgtcatttctattattttattagtatatttaactatcacattaaattatgaaatatttatattatttttttattgtct

SEQ ID NO: 113940 - DNA, 1331 bp, Cannabis sativa
ataagggtgtgagaggaaggaagggtttctccttttcttgaattttgttgttgggattgttgagattttaattgttgtcatttaattcatattagctagtttgagagagtatgagagttcagagtcacattattgtttgcttttcatgcaataattaaagtaaatctcatgccacctttcactttccataggtgggaaggccaccgccatgtgattgttgaagccattcataaatattgagtttattatttcaaaacaaataaatacatattcagtttatctctttctatcaattgcatctatttttttttttcttaataaatgtatatattttcaaagccactcaaatctatatatgtgtgcatggcgtcaattgtcaaaagaaaaaagtataaatgtatgtgactttggagtgagtgttgttgtgtgttataggtttgactaaatttggtagaatattgaaaagatcggagctaattagtagagagaaggctccttttgcatgcagaggagaataattagattagaattgactagctcattggttggtatgtcgtataaaaatcgtattatattaaataataaataatattatgtacgttcaaatagaatattatactatattaattattataattataaattttaatacaatatgaattgtattattatataatacatgacaaatgaacgatatttacttgtattatttaagggtccaggattaaggacctcaatttcgaactaggactcagaccccagattatgaacctggcttcgacaccagctccggaacactagaccctaacccgaatcagacgttgaccctagacacgaatgcgaacacgaatcctgaatcccggatcccagacctggacctagaccctgaccccgaccatgtctcgaaccctagacctaagaaactgaaccccgaaccttgacccagccccagacctcaaacccctaaccaggcaagagtcggagttgaggtcaagtttatagtaatgataatataattttacgcaagctattaatacaagtgattgccaaacatagtattatattaaataatattaatacaatacaatacaattcaacacaatacaacacaacgtactaaacaagccctatagtacaattttctttttaaacatgataatttattgttaaatcttcttatgttttaatttgtatataattttattttcttgtttttttagtggtcataactagtgatggacatccgatccaatccaacctttttttgctcatccgatccaatctaattagtaattagatttggaaaatcatcatccgatccaatccaatta

SEQ ID NO: 113941 - DNA, 1135 bp, Cannabis sativa
ttcggttttaaactgttgggaaaaatctcctcttactttttccaacggttttcataattgacccccttattaaccgttgggaaaagccaactttgtagtagtgacgatggaccagagagatgagaagaaagggagatcgagagacggaggaagacggcgagagaggagggcgatggtgcagaggcatgggtgaggtttcagagagttaagatttttgttttaaggtgtggaaaaaggaaaagaaatagatgagaagaaataggtggacatgtgcaaaatagaaaataagtaggtgggcacgtgagaaatgtggtgagaagtaggtaataatttttttattgggcccttatacccgatgatttaaaaccgttaccacacgaaaatagttttgatcttaaaaaagcgttgcgatcttcatactatttgtttgtggccttatccaatgcttcgccccatcattcatttgaataccataccatgatgtctcaatttgagagttttgagcattccaacattgatcaagataacctttcgcagaagcaattatagttgaagcttgcaccaatttttgttgccaaaccaactcctttctagcaccccaaatagccaaacaaaagtgtcaccaccaattcttttttttttttttttgcagactggttttttaaaaacagtcaaacactattcaacaaaatttgcactaggaacaataattgtgtctatactaactcgaaccaccttacaagttaccagactatgtgatatggtctcaatctcagccttgcagagatgacgaagagggctaataactaccctcctaatcattaattaagataaagttggacgataatgagtgcctacaagccacaacaaatttttgatttttggagaaatttttaaagaccataaacaatttcaaaaagatgtagcagtcacctcatcacaaaggcctttcactacaagaaaaatgatttttacaagcggaattattaggggcgggacaaatccgccgttaataatctcaatattaccagtggatatatgattccaccgctattaagtagttttaatattaaattaataagggataattgcggcaaaagtccccaaaaacttgaagttgatgccgattagtcct

SEQ ID NO: 113942 - DNA, 749 bp, Cannabis sativa
tgttttgaggatcacacatgaaaaccaaagtctcttcaccacatggctgttactagcactttaattggtgtttaataggataaaaacgttggacaagagagctgaaagcatgctcaatcaattcaagtacgtttatgaacgttttcatcggtaaccaggagaatgatttacttttagctcgtgttattaaaaatcaacgtttaggtaatggaagaggttcaacatcgcgtcgtacttttattcctcatcatatattcattcgaagaaactctcttgagggtcaccttaacattcgagatcaagaatttcatttttcaacatcaatcggatcttgtcgaacatttatgggaaatatatagttaatcttaagcacctgtattttacattttactataaatatatatatatatatatatatataaatatatttaggctagggttatattttgaattggaaaaaagtaatgttaatgtgctttttgagaaatttaaaatttcttactttcccaattaatttatagtttagtttactttatgaattgtaattaatttatttaaaactataacataattttgtcaaaaaggttatgatacaactatatggtattatatatgacttgatattgtaaatactaagggtcaatttggcttagttgtactgtgaagaaaagtaattgtagttgtgctgtaagaaaaaacagttgtagtaaaactatagaaaaaaattgagctgagtgtttggtaaatta

SEQ ID NO: 113943 - DNA, 1274 bp, Cannabis sativa
  modified_base (33)..(46): a, c, t, g, unknown or other
tttattagttagtaaatctgattatattgaaannnnnnnnnnnnnnggcacaaaacccaacaggtacttcactgaagctactctcaccaacattggtttctctagctctaatcatggccccatcttcttacaacctgatgtttatcatatctctacccctactcatcgattttgttatgagaatgcttggtcttgaaaacccatgtgtgcacagatagcgaaagactgctggagttcaaatagccatctctcttttcatgacaaaattaaaatatgtggtgctaatttggataagtggggaacgaagctcacaggcaactttaagaatcgtatttctaccagcaaaaagaccatggctcgtctgaagcagcaacatgatttccctttgaacattgagtttgttaatgaacaaaacaattattttaaactcttagctcggcaagaaatattttggaagcaaagatcaaagtaattttggctccacaatggggataaaaacaccaaatattttcatgctattgctagtgccaggaaaaggaacaatcaaattcagcacctaaaaaactctgaaggagtttggaccaattggggaaatggtcttgatcaggttattgtctcttacttttctaatctgtttactgctaactgctctttgaataatactattgtgaatgaaattacttgttctgtgagtaatgaacaatatgaagagctcttgaaaccaatttctgaagaggaaattagaacaactcttttccaaatgcatcccgacaagccctagtttctttcagaaacattaggatattgtaagtttagatgtggttaagatcgtttctgacttctttgattcaggttgctttcctcatgagttgaatgaaactaacttggtttttatcccaaaaagaataatttcacttctatgggcaactagcgaccaattgctctttgtaacattgtctataaagtgctttcaaaagttctggccaatcgtatgagaagcctcatagaccatgttatttctgacactcgaagtgcttacatcccaggatgtctcatctcagataatgttatggtgggattcgaagtgatgcactatctcaagaggaaaactaaaggcaaaaagggttttatggccctcgagctaaatatgagcaaggcctaagatcgtgtggagtgggattaccttagaatcgttattgtgacagtcattagtcatgtgatccgtaaggggaaatatcgcgtaagctgtacaatcccacaccgcctggggaagg

SEQ ID NO: 113944 - DNA, 1827 bp, Cannabis sativa
agtgtcatttggtcgttttggtgtgaggtttggtggtgtgttttctttgttaacatcaagagtagcgactaaattttggggaaaaccagcagatataatcatttttgttggtgtgaaagttttttgaggacaagagggaaggtgggaaataagaggttttgtgggtggggtcatattaagggaactagcactcgggggatatgttgcaaaacaatttaaagtaagagatggggtcccaacatctggtatgtatatgtgtgttagatctgttatggtgggggtagtatttataggtttgagcgagtgttggcctggggttggttgtggatgttttgtgttggtgggagaagtatcagctgatgttggtggtgccaaagtagatgaaatagagtagttaatggggacgacatagggtattggtgtggtaaggctattggtggtagtaacagtaggaagattcgggtgtaaaggtggtgtatgagatgaagttggtatagatgtaaatttgttcttggaagtgtttaaaggtgttaagatgttcaggttaggagagtgatggtttgttctcaacaatggttgtcgggcggtcgaagattcaccttcaaagattgggtttggattggcagaagttcttgaagataatgtggtaaacttgtggcaaaagtcctttgagccagtcttgcgatgaaagaccaggcattacctttgctgatatccattatgtagcgatcataattatttgagggaagcctagcaactttaagccacgagccataaggaagataatcgtcattcccactgtcaataagctccataaaagagatgcattgttcaaatggatgcccgagacacccacactcaaagaaaaattcacaaagtcttccatagcgatattcaatccaaaattcattccttacatttggtagaaggatcattttgtcctcgagggagtggtttagcaataaaaaagtttgacccgaacacgcaaaaaaggaccccttccttcattagttgagtcttcaaacacatctatgaattcaccaatagtgttgccaagcgcttcagccagagccttagacttactaaggaaaggcaaacgataaatctgaacccaaaaggttgtgaaaatcatgtcttcctttgtgacattttgtagagcacttggcgagtataaaatgataagatgattctgaaagtgccatggttctttattaagtactcaacgtttatctccttcacaaccgaaaacaatgtggaacatctcggttttgtaaccagttatggtaacggggaatcatcccctccaatgccctgccatttgatcataaaaggctggtctatatactgttctttcagtaaggacacaggctagcagaacatgggtgaatcatggtgcagaggggaaagttgggatgtgtcaggtagtgataaaattgagcattcctccactgttagtgagagtgtggagttgaaattgatggagaggggttccattgcatctggtatgacagggaagagtgtagaaaaaagagggaagggggagaagaccaccgcaagcaatggtggttacagttaaagaacgacagaatagtcaaggatcagttttttaagtagaaatttaaaaaaacagggtgataggaagttgatggctttcttggtggaaacacatgatagttaaaagcacataatagctatagagccaaactagggcacttaacttaaatactaatgcattatagcaatactttttaaaataacttaaaaattaattgataatttttaatatcaccaaatatatataaatttatttatttaaaaataataata

SEQ ID NO: 113945 - DNA, 2656 bp, Cannabis sativa
ataacggtgtatagtgttgaacttgtaaccttctttaaggttttaaaaaaaaaaccctacaccatataagcttactttatattatttcactagaaagtacctctataaagatccaaaaatatttacttagacttaagcttcaaatatcataagactagtcctaatatttttagttgggacgacggccctacttaatctactcttaacttcacccttgcttgtactaataacttcggtgatgacaagataaactatatatttaattaataaatatattttatatctctatgattaaactactattcattatgtatggttagtaaagcataaattttatagaatggagatctactcaagtttattttcatttctttttataatcaaatggagatctactcatttagctagtgatgtactaattggacacactccaagtcaaatggttgtttatgagatgtatacgtgaataagtgaataaaaaaagtatgaattttgcttattaattaaaccgaacagaaaatcttagcaaaatgttgtgtaatagtagctgaactgaaccacatgcaactgtcatgctcccccttaatttttattttattttatttttttaaataaagatattgaattaattaattttttattttcctactaaaattagttatgtttgttaacccttataactttagttaatcttttttaataattttctataacaaattttctgttttgttttgttttttcataatctttttaatttcaaaatgttctcattacagacagtcttacaccttatctaaccatggatcccagtcccactggttccaaccaaaggattgatgaacatgttttaatatataaaagtgtacataacaccaatgtgcttacttgtgctactaacaattggcttcctagccaaccttctatttttgctacaagtgaatcatcaagacagggagcagaatctaaagagcaaccacatcaacctccctcaccagttattggttctctaattaggtcccctcctcatgctccacaacctattactcatgatatttcacctcctcctactagtgaagttgccatcacccctgtaactactgctgcagttgtcactcaaactgttgatgtcatcctttccccgtcttctcaagtcacagggtgttctaatgctcctggtaaaagcaacaatcaccatatgaaaaccagatccaagtctagaatccataaacccaaagctttactggtttccaaaacaccaaccaatgttcaagaagctcttcttcaagaacaatggaacaaagctatgagtgatgagattcttggattagtgagatataaaacttatgttcttgtcaggcttcttgtagggagaacaaccattgactgcaaatgggtttacagaataaaagaaaattttgatggcacattgtacaagcacaacgcacgacttgttgctaaaggatttcatccataggctggatttgacttcactgaaacattcagtccagtggtcaaaccagttaccattaggttggtcttggttcttgctttgtcaaagggttggacaataaggcaacttgatgttaacaacgcattcttaaatggggacttacgagaggaagtttacatgatacaaccaccaggttttgaaattcctagccaaactcatctggtttgctagctgaataaggctttttatggcctcaaacaggcactcagagcatggtttgaaaagctccaccacagtcttgcttcactttgctttacatcatcaaaatctgatcactttctcttcatcaaacatactccccaatcgaccatccttgtcctaatatatgtcgaagacattcttatcacagggagtgattctcaggttgtcactcaactgatttcttctcttcacactcaattctctcttaaagatttgggtactctcaacttttttctgggaactgaagtccacaaaatagatgatggcttgctcttatgccaagcaaaatatgctagagaccacctagaaaaagctcacatgactgctgcaaagttttctcctactcctatgacaagtggacttcgtctgtcagctcaacagggggatcctgtagaagatgttcagatgtatcgatggattgttggagccctacaatatctcaccattgcaagacctgagttgtcatttaatgtcaacaaagtttgtcaattcatgcaaaaacctcttactactcattggatggctatcaaacaaatcctaaggtacataaaaggcactttggagatgggtcttcatctcactaagccactgtcatatgacctaactgcatattgtgatgctaactaggcctctgatccaaatgacaggagaagcaccactagttttgttatattctttgtctcaaatttaatttcctatgttattgctgaatttacttggttacactatttgttctctgaacgtgggattcaagtgcctcaacctccaacaatttggtgtgacaacatgtgtaacgccctaaatagttaggcacgttacccaataaacttatgaaaccttaaatccctaatcgagattactagtaaaataagcgcggaaattaaactttattaataaatggaatgaaaataacttgtaataatttaaaccttataatttaaaagt

SEQ ID NO: 113946 - DNA, 3354 bp, Cannabis sativa
tctctctctctctctcaaagtcacctctccaaagaaaaaaaaaattaccttgcaaaagttgagtatggtggtatttatagatcaaggatatagatccttaagtcggtggctgcagtaactaagttcttaagtcagttacaacttaacaaactccttgtaacagtatctttacgtcagctcaagattaagctcttccagatgaaaggcacgctccctggacaaaggaccgaagtgtacgctagtggaacttcccggataagaataaagacatagagtcaaaattttcttccaggaggaaacagatagtcatccggaacacctttccgaagacaaactagcttccttggagactcctcccggatagacatgttagacttctgggagtgccttttcggatgacatctaacttttcataagacgaacatcttttagagatcttttcatttggaagaattatattacaatcactaaaacataaactgcatataaattacgttggagctattatgatttctttctaagaggtatttcttttttgttaccagaagcacgtattgatttaggaaagactgtaattgacaaagaattagtgaagaaggtgagttacatcatattccatcaattgtctgtaaattattttagtattatgcacattatgcagcattcttcatgccaaaccaagctcaatatctcatctttgttttttacttgagcaggtctgggataggattgctcctggtctagctgctgagtttgattctccgtacacagttcctgctattgcaccacgtcctctgctgattgtaaatggtaaaaatcatacaataacacatatccatttttttttgtttctgccatttactatttgggatatccatggctattaggacaaaagtgtacagtttctttcttatttgtttaacagggaacggcaggtcttttttaaaaaaattattatattacaagtcgtgttaaccatattaaaagtttttatgtgtgccaattctattgagtggacacaatttgtgcccataatgcgattttgttcctactcatttagaatataatgatgatttagtctcatttatgagcattgttaatgtatctcgataaaagcatcctcccgagtcacgcggcacagcgggattggttgagaaggaagcaaaactgctgctcataaattacatcctgatagaagcaccctcccgttacacgtgaggttgcttcctcgggatacataagcattgctctatgttttcgttaagttgttattataggccgacaaagttaagtcacatcactatgcctttattcttgattacaggagcagaagatccccgatgtccctattctggtttaagtattccctgttcaagagcgcaaaaagcatatgaagaagcactctgtgcagatgattttaaggtatggaattggattagggagtatggaacttaatttacgtgcttaattaacattttcaatttcctgcaaaacccaaaaaggagatacctcaactcagacctataataaatagtaccttagttaacatgatcagatgaatatcatttagtccttataattctctctcaaattatcactgtaaatcattgttatagcattattaactattgccaagctctggtattggaagtttctcattaagtattcttcatttatttaatatccagttcatcgctgaacctggaatcggccaccaaatgacaccgcagatggtaaaggatgctagtgactggtttgataaatatctcaagccttgaccctcttgaagctttatacattgttccattttaattcgtttgcatctgaactttattttcgcattttgtttatgaattttgttgtatccaataacctctgcttcaggcggttcaagtgttgatgtttatgtagtgttgcgttgaaagaggttcagttatattccaataaacattgttcttgttatattatttataaataatataatggcattttgttttatatatctcataaataaaataatgttaaatgcataatgccaaataaattaaggtgtgacaaattcaattttgccaaaatgtaatatatgtagggaagttaactctcaaatatgtactgtgtagtatgtaatgaagagtttcataatattaatttgaatttcatatgttagattcggtatgatatatagttgttgccttgttggacacattaactcaaagtttttggaagttacaaattcatgtgtgaattgatttggggtgtttttggaaatatggtaacaagttgagattttgtaactctagtcggagctgtgactaccattgtcaaaggccttgaccgggaggttggctgaaataaaaaactcagctcaaacctagcagcttccaatgacgtttttgcaccccaaatagttctcacttctccaattgaactctattcacaccaatttatcatgggatttttacatatattgtcatttttttttttactttttaaacatttttacggttgtgtagttttggtttttatttttaccatatttttaaatcaatatatggttattatttaaatttttacactttaaacggtttgcttatgtcatatgtaactgcttacacgtattcttctattgtctccaatcaatcacgattctctgttagttattcactttataatccactatttgtatcaccttctcttttttttcctttttttattttaatttttttccccttcatccttctcatcatcgtcttcttctttgtttttctttttcttgtttttttgcatgtttcttctttgtttttgagtaatgactatatcctatatgtattgggaataagttggaagggcgcgaccctaacgtaattgcaaaaatccttaaagtattgattaaggggaaggatggcccccactttaatatgctcaatgctccatgcaactatcctcaaagaatcgcttgtgttgtagccttcctcatttggtaagcgagaagcagggaaacatctccattcaccatgctccactgagtaaactcggcatccatccccaattttgataccataagaccttagaaatagtcccacatacagggtgattgttgtggtatttttgcacacccaagtgtacgtatcgtaacaagtagtaaactcaccaagagtggggtcgatcccacgaggattgtaattaagtactttaaaattaaatctttacttctatttagctatataaaaattaagaggaaattaaaactagaataaataaaaacagtgaaaggagaagcaattcaactaataaaggaaattaacagtgaataaaagttagggctttcgatgtcaattgtatctattgattatg

SEQ ID NO: 113947 - DNA, 1536 bp, Cannabis sativa
  modified_base (1464)..(1493): a, c, t, g, unknown or other
cttggtttcgcaggcggttctaatcagatggacgccaggcggaccaccaggagtcagggcaattcagtggggtcgaatcaaggtcagggagctcagtttcccccatctgccaggggctaagttagttagggtgttacagattggatgaagagatttgggttgaaatagttgtgaatggtgaaatttttggttgagagaggggttcgctcatatgaagaagaagaattaaaggttttttgaaaaaaaaaaaatctgatgaatggcacgattgagtgctctgcttgtttttaaatggggtatgtcgcggcatgtgattcctatgtggcggcctgcctctttttcttccttttctttttttcttgtaaggcccagaagtcgcggcatggactttctcatgctacgacctgtgtataatttttttgggctctttttgttactacttgacataggtgtcgcaacatggacttcctatgccacgacccgtgtcttttattctagctgagaatatttcttccaaaaaacaattttctcctgatgcacaggtgtcgcgacatggaaattccatgcctagacccgtgcatgttcaattcctcctcttgcttactgcccatttttttccacttgcatgcctaggcactattaaaaaaatttaaattgactagttttcacgatttccacggttctacatattttttctgaaataaattctaaaagtaaaattacaatttactaaaaactaaaaactaacgaaaataatagttgtaattgtttctaaaaaagaaaatttttagtaaaaaagtaaaagtttgtttgagatgcctcccaaaggcactgtcgtttacgtcatttagctagactccctttctctaatcaaagaggtgccaagatgataacatacttggcttgataaatttggcctcctaagcaacgctttagtacgtctttgaccattgaccttgaaggtctctagtgtctcccctttgagttccacctctccatatgggaatacttgaaccattgtgaacgatctagatcatcgtgatttcaatttttcaggaaaaagcttcaaccatgaattaaagagtagaacatgttgtccgggttgaaactcttttctgatcaagtttctgtcatgccacttcttggtcctttctttgtagaccttggtgttttcataggcctcatttcgaaattcgtccatttcattgagttgcaataaccgcttttctcctgcttctgtcaaatccacatttaaggtcatcgttaccccaaattccttgtgttctaactccactgaaagatgacagaccttcccatataccaaccaatatggtgacataccaataggtgttttaaatgttgtcctataagcccacagtgcatcatctagcttctttgcccaatctttttgagagcgttgaactatcttttctagaattaatttaaggctaattaggatttttnnnnnnnnnnnnnnnnnnnnnnnnnnnnnntgccccctgaacttttaaggttgttaaaaatgccccctgaact

SEQ ID NO: 113948 - DNA, 8014 bp, Cannabis sativa
agtaaaacagttttatataacataattttggataatatttttactattctaatttcaaaaataaaaattaattaaaaaaatgttacacattttattaaattttattgtctttattatgtatcattttcttcatcatcaatattattttttgaatttcccaacaataatttctcttgatgtacttccaactgtagttagtttatgttaagattaatgactaatgtaactacttttctattttgaaaaatagattagctagttttttaattttgttaggtttttattctcttcattcaagtaccttggtctataaataaaagtagtgttagttagttttagttaacatcttgctaactaattctagcaaagaatagtctcagatactttttattcttactttctttctctctagatcttacatgatatcagttgataatgactcacatcaatggagtcctcctcgattgatcctacaaatcattttgttgctactacacatgtcgcgactcaacctccaatgattcctccttggaatcctttctccaattccctttctcttctcttacaatcaaattggatcatgtcaactttctggcatgaaaatcataggttgttcccactgtgattggtcatgagcttgatgaaattctttttcattgtgtccctcctccccttacactagataatggagatccaaatccaatgtttgctcagtggaaaaggaaggatcagttgctcctgtcatggcttcggtcatctatgttcgaaggagttctttagtcaccttctactgtatggaaagccctggaacgaaaattcaacaaccattctcgtgcaagacttctttagctcaagggacaattctccaccattcgaaaaggtagtcttttgatttttgattatgctaaaaaagtttggaatcttgcgaattcattggttgttgatggctctcctgtcaaggaccaagatgtcattcttcaactcttgaatggattggagcctgagtatgattcagttttccctggaatcacgacaagatttgatcttctttctctcgaagaagttcaggctcttcttctttctcatgaaagtcgattaaaaaatcacaatgttgtgaatgaattagccatgaagatgcaaactaatctgacctatggtaatccaagatccaatgcctatcgaccaccccagggctctaagagaataggacgaggctaccaaaaacccttcaatcaagcaaattggcctcggtgtcaagtttgcctcggtttggacacacaacacccacttgtcactatcgattcgacaaatcttaggtcactcctaactaggcaccataccaccccgagcctttctcacagagcaagaatgggaatatgatccataagctttctctacctcatttgtgcctgattttggtgatgataatggatggtttgtgaacactgatgctactcaccatgtgactaataatcctcaaaatcttgaaacctcgacagcttatcatgcccctgactcacttatgggttgagatggtaagaagttggtaatttttcatacttttcactagaatgattttaatgcatggcacttaaaacttggacacccttctatagctttattaaacaaaatcctacctttttgttctacacacaggttcctcaaacaattacaatgttgtaaagcttgtcaactaagaaaaaaccacaaacaacctttccctatatcccttagcatagcctccaaacctctagaaataattcatatagatctatggggcccttcctatattaccgctaaagatggatataagtattatgttcatttcctagatgactacaataggtacacttgaatctttcctttagttcaaaaaaaaaaaaaaaactaggtcgttggtactttcattaggttcaagagtatggttgagaagcaattaatctacctataaaaagtgtacaagttaactggtgtggagagtacatgaactttgctaggtttttcagtgatcaaagaatactattcacagattcttgtcctcatacacatgaacagaatggtcatgcagagagaaaacacagacatatcaaataacatgcctcaatattcttactcaatctggatttgacttttcttattggtgatttgcatttcagtgtgttgtgttcacaataaacaggttgtccacaactgttaggtcatatctcttctcttgaatgcttatttgggaacacacttgattacactgttctaaagccatttagatgtgcttgttgtccctacttaagaccttacaatcatcacaagatggaatactattctcaacaatgcacttttttaggctacgcaaatcatcacaaaggatatatgtgtgaaaataaagatggacggctttttattgcaaggcatgtggtgttcaatgagtcatgctaccccctgctcacacctcttttacaagtgaccaggtaacttctgtttcctcagtgatgcacccttctacaatattttttacaccattatcctctaatgcagttcttccacgtgttgtgcatgttgctccccaatacctattactgagaaccatgcctctgctgcaaactctttaccaaatactacaaataacattggccacaattcagatgctgcaacattgaacaatacaaaccctgcaccaactcctcgtactgttgttgctccaaataatgttattgcatctgccactactcaaagacctggtcttagtggtactgcaatcttgagaagtaaaggttgtgataaactttctattgaaccaccatcgtctgctgaactccaacaacaatcatttgtgcttcccactaggggtgttcatccaaaccaatcaatactattttgctcacagtgcatccgatccacactaagtgtgaatttcatattttagatccaatttaatccgcacaatagctcaaatacaatacaatctaatccacaaaagtgctgattggatcggttattttagattggttacttttcaatattaaattatttaatattattataaaatatttttttccacataactaacaacaaaataaaacaaactattgttgttttatgtctataaattgaaataaaataacaatttcaaaagaagaaaaaaattgtatgtagaaaaaattatttaatttttttaaaattgtatgcagaagaaaattatatataaaaatagaatatacatttaatttattaagctttgaaatatatttgtattatatgtattatattttcaaattactaatttatttacattataaaaagtaattgtatatataaattttatataaatatgtgtgaattagattggatcggaaatttttacatgttaatcaagatccaatccaatctgcacaagtgtgaccaattttatataacacttttaagtttgaccaattcatatgatatttttttttatttataggttttttttttatgatatttaatatgtcatatatatgtaaattaggttttcaaagctcatgtttaatgtttttaaacaatcttatttgccgctagtactggaaaagtcaacaaaatttgttgttagtgccggaaatgtcgctagacaattttatttccagcgacaatgtcaattctgagaactttttcggtgtcggtagcaactccgacgacttatccgacaccggcagcaactccagtgatttttctggcaccgacaacaaacttcgcgccactttctggcaccagtaataactccaacgatcactgtagttttatttatttttttatataaaaaaaaatataaagagaattttaatattttttatggtaatataaataatatattctatgtatgttaagttttttattttaaataccatattttttcttattaagttttacttacaatttttatataaattaggttttttattactatactaatataaatatctctattttaaatgaaaaaagttccttaattttttgtatcaacttctaaattgaaccacgctgcattaacgtcatgtgattgttacatcaattaattatttaaagaaataagtagaggagtaatttttgaaaaggaaaaaaaaaaatatttatctatttttttaagaaaaaaaaaagaatatttttgtaaaaaaaatggagcaaaactacaaaagtgataattgagggagacatatagtatttattattatagaatttaacctctgaaaatcaccaataaaaattagaaaaaaaaataggagaaagaatagtccacatgtccactcactcacatgtatagttagttctctctctctcattatgagtttccaaagtcaatgaaggtcatctatactgtcttaaaaatacatctgcaaatttttgttgtataccaattttctcaagtcctaaggttcatatctctaactctttttctattattgttcaaatattatacatggttatgcttcatccctttttaatgttgcttacatagttggtttaatcttagagtaattgagattttatatacaagtttacacattattctatccatatttaacttaaggttcttccaataattttggttattctaatagaatttctcttattaaataacatcaaacaatttcaagaaagatgaagaattttttactatgcctagcctagttgttgtgtgatctttatggtgatttttactatttccatctgaaatttgaaaatccctaaattttgttctgtttttttttctttcttttacttgatgcagtttataatggatattactggtcccttggtggggattttagatttaatatgtacaccctttgcaacaagatttcattacttttacaatgttgagaaacttgagaaagttctactcaatgatttgggtatactaaaagaaagagaaaaagacatcaaagaggagattgagtggggaataatgaaccatagaaagaagctaagaagtgaggcacagttttggctcaaacaagttgagagtttaaggattgaagtgagtgacattgatgaaaagaggagattcatcaaaggatgttatcctaattgttattcaaggtataaattaggaagaagtatagtaggaaagattagacaagttaaagagcttcaagagagaggagcatttgtgaatggtttgttcattgatttaacattcccagataaaggaagaagtcttataccgacatcatcatcgattacagaaacgattccatcgaaagttttacatgagatatgggagtgtttagtagatgacaatgtgcataagataggtatatatggcatgggtggtgttggaaagacaactatcatgatgcatttaaacaatttgcttggtgaggataagattttcgattttgtcatttgggttaatgcttcgaaaagctttgatttgaagaagctacaaactgatgtggctaaggggatagagttggatttcttggatgatgaagatatgattagaagatcagccttgttgtttgagcaattgcagagaatcaagaaatttgtactcataattgatgatttgtggtgtaagttttgtttagaagatgttggaattccacaaccaagtaaagaaaatggttgtaaaatagttttcattactcggcttatggaagtatgtagaggcatggaaacacacaaggaagttaaagttgatgttctttctaaagaggttgcttggagattgtttgctgataaagcaggaatccatacaattaactctagtgagatacaaactatagcaaagaagatttcagaagaatgtggatgccttcctttagcgatcatcaccgtggggcgagctatgagaagaactgatgatgaaagagtttggatgaatgcattggaagaactgaaaagctcgaaagctgagattgaaggtatggaagaagatgtcttttcgcgtttgaagtttagctataatcacttaaagaatgaaagatctcgagcttgtttcttgtattgtgcattgtttcctgagaaatccaagattgatgttgaattgctggtgcagtattggatggcagaaggtttgatagacgaagtaggtaaccgaacgaatgagataaacaaaggatatgcaatagtaaaggaactcaaagatgcatgtatgctagagggtattggaacaaggtgggttagaatgcatgatttggtgagagacatggctattagaatcacaagtgactgtcctgtgttcatgataagagctggtcttggtttgacaacatttcccaagaattggagggatgatgtagagagagtttccctaatggaaaataacataaaagttgtttgtgatgttcccaaaagtacatgtttatcaactttactcctgcataggaatcactttttagatagtattcccaactcattcttcttaaacatgcctaatcttaaagttcttaatctttcgggaactcttatcgaatcgcttcctgattcactttctagcttacacaatcttcgagcgcttctcttaagttcttgtaaccttaagttcttaccttctctagcaatgctcatagagctaagagtgttggacctttcaaatactttgattgaaatgttgccacatgatattgggactttgatcaatctcagacatcttgatatctcttacacagaagatttggaaatctttcctgctggacttatcccaaagctgtctcggcttgaatatttgaccatgtttagaagcaactggagctggtcaaaggattcacaagaaactggaagtggagtagttttcgatgagatcatcaaatcaacacaactaacaagtctaggtcttacctttgaggatttaaacagcttcaatagttacatgagatcaggacattggcgagagctgaaaagctaccatatcggtgtaggacttttgtcaagcttttcgccaatatccaaagaagcttgcagcgtcgaaattcaaggctgcaacctctctagtagtagtggaaattccattgagataccagaaaacactcaacaactagcattacagggctgtcatgatataactgttctgtcgaaattgtcaagcacatcaaacttggctggagtcaatgaatgttatgtttccacatgtaataggttggagtatgtcataacacccgacgggacttatttttcgaatctaaagagtttagtcctcagaaaactctatagattgaaagctatttgctatggtgttgtagatgctaataatgtactttccaggctcaaaattctgcatattcacaactgcaatagtctcaaaactatactgtctactgtattttcacagtgccttgagaatcttgaagagattgagatatggaattgtcattccttagaagagattattgaagaaggggagttagagttagatattaatgttgaaaattcagcttctctatctctaataagactcccaagattaaagaaaatggatttgtctactttacctgagttgagaagtatctccacaagagaacttgcttgtaattcattgatttctattgatgtttgggactgtgagaagctaaagaatcttcctttctcagtggacaactttccaagctctctcaagcacattggaggaaccaaaaagtggtgggatgagttgtgttgggaagatgatcatcataatcctagtcccaaaactttcctagagccatttttcaaggaagacagattagaagaagcaacctaaaatcagtcaatggttgattattaccttcatgactggtgaaagaatgaagaaaaaaaaggaaaccaacttcagcattttgatttatgaagatgggacttgaaattatgaatgctgctatgcttaagtccttcaaatgaggaagaaagagtttctggtatacaattaaactgatgttctattttctcattccatatatgtatatgtatatattcagtaatatctatacaattacatatgagaaatttgattttctatacttacatatacttaatattttatttctaaactaatacatatcaccat

SEQ ID NO: 113949 - DNA, 2529 bp, Cannabis sativa
agaagctttggaaaaaaataagtgggttcatatattagagttgataaatttcagccaccataccgagtcttaagggattctgggggctcctcttccatgatgcccgaacctgttgtagccaggtactcacggatgttagttttacggtctccaaggaaagtgtgatctaagaagttgttataggcttcatcactcaaatttttggccgctaacacactgcattgcaaattaattctatatataatcaacacgttatgatagatagacatatgagaggattagcaataaagtatatttatgaatcatcacaataaaaggactaataatgttctccataaacgatcaaaggctcaacagtcatgaaatcaaaacccatatacacaacagctaagaacaacgaaaacgaaaatgttgaaatcacttcacttgtaaacaaaactgatttcgtgattcttccactcttttgtaataaaggtagggaatggctctcttttcatgacaagtacctcaataacaataattttaaaagtatatgtagtgacaatacaaacatcaggaaaaggaacgaaacataccagtgccggagataagcacgacatggtaagatatcatctcgccaaatctgatcaatgccatatcgtccatagtgttgaaaatagatgtccttgcttcctgtaaaccaacatgagaatatcaaatgaacagatcaactgaagatttactaacatcataataagtatgaaagcaaggaaattaaatgggaatgcatgcatatatgaaaattccgtgtttcttattatactgcatgaggtggcatgtttataatttaatctattttatgtaaatttttgcatttgtctttctaaatatcttttttaactttcgccccagtaagtatacagacagactctctaggtctgccactgaatactactactagtactaatcatcactaagtttccattacattaaaaataaacttgcaaggactatatttctacattttattgaaccttaatctagtgctatagatcaaaattatggtaaacattatatcacttggaaactagtcatcattcaacaagtcaccaatatgatcagcctttactttctcctaaggctatgtattatgcaatttcttgtacgtcctacctaaaaatgcaaaagagatgtaataatccctttctttgcgttattgactgtatgaaagtaatttagtgtcacactctcaacagttcaagaacaaataaaatggatgaatatacttgtagaaaataaatatgtatgtgtgtatgtatgtagtataaactataatgactttctacctttacatctaatccggaggaattcttcgtcgctataacgagcacaaagcacctgcattgagatgcatatatagaaaattacataaaatcaaataaggatgggaagaaaacaataatgcgtttactaaattataatccctcaataatatctacacaccgctaatttatcaaacggcttctcatcaagtgtttcaggcagaacctgccatataagaagaaagcaactcagaaaatcaaaacaaaaacagcttatgttgcgaatcaaaactcaaaattataatgtttaatggcagtaaactaaaagcttacggcaaggaatcgaaattcaagctccctctcaagaaatgccgggatctgatcataatgaagttgagaaaacagagaatcaaatatcattatatatgtcaattgaacattgaatcaaaccaaactgatacgtatcgatattgtccatacatcggattttgaaatttcgaatactgttacaattagtgtctctccttcacaaggctcaacacttaagctcgatatttcctgcaatggtaaagaaagaaaagactcaaaataattatatttaaggtcatatatacgtagctcgttttctcaatttccgagagtatgccgtaatatagataagaaaattcggaaaatcaaagacgaagaagaagaagaaaaccttggtttccggcttcgctattccacgctcgaaaaaaatgggagcaacatgagcgaagacgcgacgaaatccattcaatctggcgactctgaagttaataagatccggaaatgtactcctcgcgcttctctctggtttcacatcacatcagtaaagtacaatcaaccagacaacaaaatcaacagagatgaatgaaggaactgtacgtacgtaccagagaggagcgaaccgaagccgcaaatagagatacgaccgtccgatgcgacgatattatcgaaatcggactcgtgaatgagctccctaaggtccgaattgttcggcaaaggttctgatcgggcatcggagtaggacatgacgattatagtagatcgcgggtggagatgatcggatttaacggcgccgtaggtgaagagagcaagcggagttgagagtgagagtgagggtttgggtatgacaggaaaagggcggtggtgagggtgagaaaacgcagaaggcggagcaatggagaaaggaaaagagcaagtggaa

SEQ ID NO: 113950 - DNA, 1718 bp, Cannabis sativa
tctttgaatttccaccattgttgagtttttgagcttttatgaacttcttgaatctcacgtcttagaatagttttatacattataatttgttcaatagctttaggatgcataatgtatgactccttgatgaaaaagatagaatcttgtgcttttttttttaagattttaatcttcgggaagaatgaactttgaattttaaaaaatatgatttttgattcatttagggacctgatcggcgctttaggtctattagaggccctgcccagttcttggtctcatctaaaacccctaaccgatacttagttcctttctaagaactctgtctagccttctaaggctgaatctatcctggctggttcatggtgaactaaccataagctggccagttcttggtgaaccttctagaggctggccggttggtggatttatatttaggggttgtccggttagtacattaaagtcttggccgattagcccacatttttatccttgtcttatttgtgatctctagttgtttacctccctttgtcttttctcacaaatgaactcgcgcaactattagggaggtgaaaattagatcgatgaggacttactctgtcttttatacgaatattatcactcaactagttcttcctccaagagctcttcgggcaactctttgagtgactttgaggtgagtagtggttctctagaacctgtggtttaacatcaccactattatgagaaaataggtggtgagatctacggaagatttgactgtgaactgaactaggggtggagacagttccttcctaagtcttggaattacagtgtccgctaaggtctgctagacacactgcttatttgagaggcatcttctgtgtctagagatcttcctgtagcagcgatttctatggctatttcccagtactctgggcaataccaaaacttggcgagaactaagcaaacatattacaaggcacatcccactaaacctcgtatctccatgcttatggcaagaggaagggttcgccaagttgagcaggctgaatagcctgaggctagccacgcagaggagcctatggccaaccaagtgaaggagtcaaaagttcattagactgagcctgaaattgagcctagggcagcttagaggcaccttaagaagtgttatgtgatctagggtaataccatgggctcttataacaaggctagggagcctctgaacagtaggggtcaaccttccaaggtcggggatgatcatattgaggatgaggctaccgagccatggattctctaacttggagagggagatagatgggtatctcctcattctacactatcgactgccaagcttgacaccatcatcgatagtgaacttgttggccaggttcaatgcattaggcctactcgggatcacttggctcaccatccccagccaaactagatagcttggtcatgcccccattttgagaaaggggtagcactccccttgcatccatacttcagggacatagctaatttcttcaagcagtgtccaactcagattgcaccaaaaaagtataaaatacttgttagcactttttgtcctatatgttgagttaggttggccgcatccttctcctttcaaggtgaattattattttaagctaaaatccagtccaggcaagaataggactagatattttactttagccagcaaggctatcagtggctggcgacactattgatgcacccatgtc

SEQ ID NO: 113951 - DNA, 2085 bp, Cannabis sativa
  modified_base (1926)..(1928): a, c, t, g, unknown or other
aaataattttcataattaaacgtgattaacagctaatttccaaattaaactaagcggtctttacaatgaacatcaacttcattgtgtttggtcctgtaatgaaacactgtattagaggcaagctgttgaactccttgaatatcacactagatgatagacttggcaacagtttgaatctcaagttcaacaagaaaaaattataatctaaactacctcaattacaatggtagagggagaccaatattcaaattcactactagatcaagcaactgacttctgttcttagagccccaagagataaaattcccaccaaagtaacacaaaaccttgtagtagactttctgtcatttagattacaaacccaatctgtatctggaaagacttccaaagtgaggtttatggcaggcttaaaaataagaccaagttgagtggtgcctttgatatactgtaagaccctcttgcaagcattcctatgtgcaatagtaggttgttgcataaattgacttagcttatttactaaaaatacaagattaagtcttgtcaaaggaaggtattgtaaactgacaataatgcttctatataatgtggggtcctgaaatgcttcattatcttggatatgcagtttgtatccctgacacattggagttgaataggatttagaagtttccatgttggatatctttaggatgtccacaacatattgggattgagttaagtaaagtttatcaccaactttggaggccttaaatcaaagaaaatagcttactgaccccaaagttttaacagcaaatttgtcttggaaagctgcgataatatgagaaacatcctttagactagagccagtaataagtatttcatcaacatacaccaatacaaagagaaaaagattagtcttttttttttaaataaaaaataaattgttatccgaaacagaatttgtaaaacctcaagaaagtaatgttgttttgagcttgtcatacgatgcttaaggggcctgccttaatctatataaggattttggaagtttacgcacataagtagggcaatttggatcttcaaatccttgaggttattgcatataaaaatttattgtaagtccacattcaaaaaagcattgctgatgtcaacttgttagatgtcccaaccataagtaacagatagagtgaacaaaatttttatggtactagcttatattacatgactaaaggtatcaaaatagtcaacaccaactatctgttaaaaccccttggcaactagcctagctttgagtctttgaactgtaccatcaacattgaatttgaccctgaacatctatttgttttgcaccacattcataccaagatgataagggaccaacacccaagtattgtttcttttcaaagcttgatactcatctatcattgcattgttcaacttaggatcattcatagcatacttgactaaggttggttccctaagacaaacatttagtttaagtaatgttgctggaagatattttagattttgatctagtttgcattagatgagtttgttaggatttatgccctaaaagtaagtcattaatggataatatatcatatataaaatacatttatataaaaaaaatgatacattaattataagagtatagcttttaatatctaattttttttattcatatggagaatgtataatcttgtaaggatgtataacgcactactacaatttatacatttagtgacactctttagtaacccgcacaaaaagtgtcggtcactaaatgctttaagcaaattttagtgacccacattcttggacagtaaaacttttacatttacgttccataatgtgtgtcacttaaagtttgaagagtcactaaaaatttctttatttatctatattaaaaatattaggggaattactccatatactattttttaatttttnnntttcaaatttacagtttgggttgctccggtagtttttatgtgggtttctaaacagatttcgattgcgattttaggtttctccgttagtttctataggaatttttatgtggaattccgtaagatgcaaaaaaaaaaaaactattttaaagggtaaaaa

SEQ ID NO: 113952 - DNA, 6745 bp, Cannabis sativa
  modified_base (6685)..(6686): a, c, t, g, unknown or other
ccctcaaatttccttttcttgaaatttgttagaaatctatatgtaatagttagaaatttgtttttttagcctttcattctagtatgaactgccgcgaatgtttataaaaacgatgattacaacaacaagtgtttctaaatttaaaaaagaaaaacacgtgcagtacacgtgagacactcggttttgaaaaaagaataaatattagtgagagaattgattgcaacatagccgaccttagcatattttacttcctttattagctttctctcatcactaacaaattctctctctctctctctctctctaaaattccaactccactctctcactcaaaatccaagcttttcttcaatggcggatacctcaagacccgtaacgggttaccctgcttccacctatcctcaccagcctcaacccaacgctgctaaccccaatggttatccttacccgccgccctaccatcaccagcaaccgccgcctaataaccccaactacggttatccctaccgttacgatccagcacgcactaccttcatccgtcgtatctttgctttgatggtagctttttttatcgtttccgcttctataatcttcatcatctggctcgtactccgtccccgcctccctaaaatatcagtcgactccgtctcgctcaccaatttcaatgtctcttcttcttctccggctgtttctggaaactgggctattggattctctgttaacaaccctaacaaaaagatgagcatcgcttatgatgagatcgactctgtcgttttttacagatcaacgtttttggcggagacacgaatctccccgtttactcaggggacacggtcacagacctctgtcaacgctactttctcggcctttaattcgtacgtggaaaagtccgttgttagtggcattgctacggacagaggtcgtgggattgtgaatttcaacattagggttttggctagggttgggttccgtactggtggttggcgattgaggagaaggttgcttagggttttgtgtgaggacgttggggttggcctttcttcaacaagtggtaccgggaaactggtcggtggaggaagagaatgccgggttggtatttgaattatttaattttctagatttttttttttcataattgttttactatatttcccataaataaatggggtataatttgagatgattagctggctttagtttaggtgtaaattaatgtatagattcttcaccaaatttattttgctaattggtttaatgcgttttgcttatgtttctagtctttctttttgagtgggcattataatttgatttgttttccacaagggttttgatgtggtccccaaaatgttatataaacctaattggtcattttgtaagggaagatcaagatgtgattttgtacatgtcatggggcaattgtgtacggattcactcaacagtaattaattatgatgttaacacaattggtttttttttttattgtttacaattaggtaggttttgaatagccttttttacatcataatgtttatttgttagctattatacacttgtttcggtcgttgcattttcaattattgcacaaaactgtggagactactttgcttggatttgaagttcttatgcttttgttttcctttttgtctgttataattttcttgtaaagtaatgatgggttttagaattgtgtggcaagtgtaatgaacatgtaacagttggccgatagatattgatcttggtttttagttagagattctgtgtctaaggatttgaggtttttcgattcaaaaccatcctaacctagctttcttacttatttggagcagttatattctgctgctatgttggttcagattgtctttgggaacatttatgaaaagaaaaattaaggatggtgttaattgataaatatgagaagacaagttcgatttagaaacttgagagattatagggtgtccacattatttttgaggacaaaataacctgtaatgtttggcaatttcggtatatagatgataatttgtagactaagttcaatgatagttttatttgggagatgatgtattactgttctgtttttcagggtatttagattcttcagagatcttgttgggtcctaagtcctctaatttggacttgattgattttgtttcactaatatattgactaagacgaccatgaatgtgaccgggagagtttcgttcttttttctggctatgttttgaaccctataggttgattgtttttagcaacttttggtgctttatttacatgataaactattctgtaggtagggacaggaaatggggactactactgtcagtagtttggaactttacgagtagactagttatattggtagcttctttctagtacttgtgagttgtgtcaaagaagatttcacatgtagtgtttaacataatgactatttcccgtatcagttaagaaagaacccttacccttagcttattgagtaatgtggttcagaccaggtttgaatttgtgaattgaactaatagatcttgagttttggtaattcattggcttaattaccttttaataacatcatataggtagattttggtaaaaactaaattttgtttgcttagtgagtgagatctatgaacctaactaaacaacaaaaatattgagctcttcaagttcttacttctcttatctctcacaaagtcttttttttatttacttatttattgggtgggttttgctattatattaaaatgaatggtaatagtacactagatcttatcgcttttgtacaatgattgggccaatgacagatctcatggttggattgtttttcaccagtgggtatgttattatcatgtttcagaaagctaatcaaagcttgttctttagcatattaataggttggatatagacaaaggctgtgtggtccagttcactcactcattgttatgcctttttgggtattttgtttttcactattatcgttcaagtttggatttgaattaattctcaaaggtaactgagagggcagctttattattttgatttttaaggtaattctggtataagtagctcaaagtgcaagtaagtggttttttctcacatcatatgaggtttctagtgttcctttcgagcagttgctacattgtataaaaattttagtgctaagaggcattacattatattaaaatctcgaagttaggttagtttttagtaaaatggttagagataattagctaccaaacaaagatgcaaaacacatcttatgaattttgttaaaagaaacatcttatgaattttttattgggcattattgtgcaattttgtggtggcttccaactttagctttttggaagagttgtagaaagagccaagtcagtgacttggtggcccttaattgcattgatggattttgttaaaggggaaaagaaatgatatagttttgaaaagcattaagctaagtacaatataaataatgttaaccttgttttgtagctaattatataataattattattgcattattaggttcacatatgtatgtatattgtaagtggtgctcgttttctccactaaatagtttttaggtccaaacaaagatatccatagttaacatttttgcactcattttctgttttcccttctcagccattaatggaaaatgactacatcagcacaaaatttgctaacaaaaatgatcaatcaaagtttgcaagaaatattgacatttttttgtccattgtttacactaaagtaatgagatattagttcatttataagattggaaatgggctagttacttgttaattaatttaagaccatatttatatataaatttaaatgtataaataattttaaaaaatcaataaattaacctaaatgctaagaggaaaaagtataaaattatggtaaaaaaattctgaaattcaagaggggtagctcaaaatggttaggtggtttgttcgaacaaaatctgagatttgagttcctcctaggtatctacatagtaatttccatattttttagtctttaaatatttgtaagtttaggcagggactctagttttgaaaaaagaaatctaaatcttatacaatttgaaatctttttattattttcaaaacttaaatagtggggcctgattgcttggctgttttaaaaaacttaatccaaataacaatttaagttttaagcttaaaaatgacacaaaattttaaaaactcttcaaatattttcctaccattttattttaagcttaccaactaatcaaaatttattttttaaattcaaatgacataacaaacaatcacattttaaaatttcacaacaaaatttaagagttaggagttgattggtttgtgattgaaaaattatgttttttaaaagtgatttggaaacaaaaaattgaattttgtatgtgaaaaattgttcctaaaaatgtaattggttgtaatgttatttagtatttttgagtttgaaaatattaaatttgtaattggttgggaatctcaaattaaaaaagtaagaatatgagaaaagtgttaagaaaaaaatatttttttttttagcaaaagtctcaaccatcaagcaccaagagcagcaagtactctaaaaaggtggaggcgaggatagttcaagaatagcatcagctatcaaaagatcattgatacaactagaattacttggcccccaaatcatactactactagtagatagagcgagtttggccaaggaatgagcaacgacattacaagatctataacaatggataaaactaacaactttgaacttattgcaaaaaccaaaaatttcatctaagacaaagcccaatgaagtaataatagacaccttactttgaatttttagaacgacgctcaaacaatctaattcgagaacaatgttgtcatacccaaatgaaagacactggatcaacgcagtgcgaatggccaaagcttctgccacttcaggttcaaagcaaccttctaatctccaactcgccgaagctcaaacaacccccattcattttggatgaccatgcacatgccactgcatttgccaatcgaatcaatggtcgcatatgtgttcactttgacgtagccttaaggaggaggtctccatttgtcaacccccaaaattgggtgaggtctcaccgacaattgagaatatttaaagagttttttgattgaatgatttgaaaatatagaaaatataataaaaattgttgctcttattttttagcctaaaattcaaatacttacttagatttagtttttgaaaatactccactaagagcatctctaatagtgtactattttactaaattagtgtgaaattttgacatcattttactctaatgacacattaaattatgcacaaaattttacgctattaattgtattggattttgaatatacactaattttgtgtaaaatatttcttttttgcattctaagttttattttattttattttcaaatttattcttacattttagtctacaaattaaaatttatcacaaaaataagtgattaaaatcactagcatatttgaaaatacaaacaaataataacaaaaatactaatattaaataaaataaaataacataacactaagttatgaaactaaaaataataatatacatgaacataaatattaagtaaaataataatttaatactcaaattgattacttgagaatcttagcattgaagaatatcaaaatattagctatatggacttgaagtattttgagaattttgatattctgagatgcttgatattgttacgagctcattttgaaaatagtcgcatatattaagatcaattatagaattttaatgttttttttaaatgtgtaagtgtaatgtttcattgatgtaataaatattttattttactaaatttttactagtagctatgatataattatatgtaaaacatatttagttaaatatttggtgtgaattattaaagttgttgcatcaaaaaaaataattctacactaaattagtgtaaccattaaaaatagtctaatcaaatattttatgagaactcgagtttaaaaaaaaatattttatgggaaccctatgttttaagtttttagaaggtcaaattattttcaaatcccgtaccaaaatttttgtttttgtttttctcctttgaacaatgaactaaattttcattgaacataattagggtagaggacaatcaaaaacaatgatggaaaattatccatctaaattagttaactagctatactcctaagtacatgcacaatcaattcattcaaagttaacaaaaattttgttttaaattctttcattcaaatttatttattggaaaggtgtttaccacaattttgtatggtagaaattacactatatatgagaaaattataagagtttattattttatggcataaataaataatactaaggagttatgggtttttttttttgttttttttttttgtttttttgtttttttacatttatatgggctttttttatgccatatatatgtaaaaaaaaagatagaaatcccatatttgtaaacaataataagttttgtcagaaaaatcgtcggaaaagttagtgccactggaaaagtcaccaaaaaagtcatcgtccccggaaaagtcattgaaaaagtcaccgttaccggaaaaagtcaatggcaaagtatgctagtttcggatgtanngagtatacattggactggaaccgatattgatcttcataaagatattataatcttaccgt

SEQ ID NO: 113953 - DNA, 1762 bp, Cannabis sativa
tacaactaacttaaattgtaaaaaagccataagttaagtaaatctctaatttttccatatctatgaaatttaaggaaaaaatgccatattctacgtaatttcctctttgcgaaactgacataaaaagtgtaaaatttgcaaaatgacccatctaattgggctcaggatcacactgcaaatgagaacaaatgggcccacactatcatctacttctaattgggcctttgaccatttactcgtctattattagcccattgtcgttttgatcaattaatagtcgtattaacaaatctcaatcactagtctataccactaacaaaaacactttgttggtgtttgcttcaagctaataaaatggaaataaaataaattttatccattttaaattttattcaattctatttttatttttatttctgtattttcattccttttaattaaacgtcatcttagatatttaatattttagtcgaatccaaatagaagaaaaaaattgattttcatcaaaccaattctatcctttatattttatggttttcctcttgtgtcgtggaacttatagcgcggtagttctctgagtgagtgtatttatttctccaatcctattgatacgtcaaaagaaattaatgttggatttattagacctctttctattattttattgtattttaataggacctccttctctataaaatgagagcttccttagcttactattcacacttttcattatctctacaaggtcaaggcttctctctcttcacactttctctctctaaaaattgtgaagtgaagctagacttagttatttttcccgagttctcctgtaacgcaattagcttttgcgataataaaagctcaaagtagacgtaactctattaccatcacgatatggggaagtgaactactataaattgtggtgttctctttattttacgttattttcttatttatcgctatcgattatcagacgatgtacagttgtctattttttagcgtcaatagcttctctctctagaactcacgtgtttctctttcttgaaattgtgagagggagctctccttagtcaaaatttcttgtgcgcaacttacatttttgaaattaataaaagttcgaagtagacgtagctccattatcgttacaagacggggagtgaactactataaattgcggtgcgctcttactttcttttctttctatttattgccactatcacttatcagacgatacagaattgaccactttttagcataaacaaaaaccccaacatatactcaaccacctcactcattatcaactctctctctcttcttttttactcagcgaaaaaatgctctctctctctctctctctcatatgatacatttttgatggtgtcataaaaatttgatttctttagagataaaatgataccaaatgatgcatttggaatggttgacgcttgattctgtgttgatgttatgaatacttaattttttggccagaatcaattgttaaaccatgcttaatgatgattttgcaatgaactttgattaaaaccttagttcactacaaaaaattttacttttagtcacagtaaaatttgtgactaaagtaaaaaaaattgtaactaactataaaacataattctatgttgtgactcaaaagtctgtggctataggtataattacaaaaattaaaatttgttgtgactaaaattaaattagtgataatgtaataccctagagttaagaaatggattagaaaaactctaactagata

SEQ ID NO: 113954 - DNA, 2193 bp, Cannabis sativa
ttgcgactacggtatatacgtcggtttataaaaccgacgtaaattctttaagtgacacttaaaaacagacgtgaatagcgaattttgtagtagtgatcaataacttttcttaacaatatttttctatatttaagacctggttacaattaattagggcacattagccttcatgaattaatcccttcatggatgtattctcttataatatttattagagaccaacaactttcaattaaacataaatatttaattataattgaaatggattgaatctaatgtgataattaattttaagtacatataatcatttgactgaggcatatatgtaaacaatgggggttgtagctctccctcaaaatttttattttttacatattttcatgtatatatataggtattaataatttgtcccgctaaactaattttcttacaatttgcctcctataacacaattttctccattcgttgtcgttgtatataatatagattaataaaatatttatatttctttaagtagggtgcgtttgataatactttttaattagatttttaattttaaaattagaaaagtgaaatattttctaaaatactgttctataaaactgtttttacttttcaattttttgattgagaatctaaattttaaaaattatgaaaacaaaaaagtcacttttaaaatttttttaaaataatttttttttatcaatattttaaactccgaccccaacctagaccttggaacccaaaccctaacccagacctggacctgactccgaacccaactcgaacctagaccacagactctgaacccaaaccacagaccccagacttgacctgaaccccagacttggacccgaggacctgacccataccctagacctcaacccggacccccgcccccgaccgggaccccgaatccagctccggagttggaccgggactccagccccagacccaacttaaataaaattaataataaaaataaaaattaaatttatagaacacacttttatttttcattttcaaaattaaaaaataaaagtaagtatagaacacatttttattttactacaaaaaacaaaatttaaaaacaaaagtattatcaaacgctaccgtaatatacgtacatataaaaaatattcccactgcattatttttggttgtctattagtttatcctacaatactcagctagtcagcttccacaattgactagaaaaaaccattaaaaaacgcattttattattattctcgtgttgaatattttaattaacacatctttgttgttgtttttgttgtataattagctcattatataatccaagcttttagttagtggtactaaacttggaaggttgacaatttcatgttatatatattaactaaaccaatttaattataaataagatagatttgaacttaattagattagattagatgataattttgaaaatttaattactaattagattagattagtacaagtaatttaaagtcattaatcactcttaaagtgtcaactcatggtgttgtaaatcacaaataataaggctctttactattggagtactatattatatatcgatcaattttaaataatataattaatacattgtgagagactaaacgtgatttcatatttatatatttatatattatagtatatgatattgtgattttgatttaattgtcttacttaataattatttaataacgattgaaatctaattttttttttgatattgagagatggagatttgaatttgagacctctttcttataaacgtgaaactattaagctatgtctacgaccactactaaaatctattaattagagctaaaaatacattaaatcatactaatttaacaaatttttagtataaaatgtttttcttaagtggaaggaagacaattttgtatcatttatgtaacatgccggcctagctaacccaatttaaaatattttgatggcacaaatatatataaaaaattttagggatattatttttgtctctattatacttataagagtatttatttatgtttttttgagtggatgtgtataaagaaaaaaattatcattaatgcaattcattatttaaattttactttttttattgtcaattatttaaaattttttaaatatatataatgcttatattttttttttttgaatgatcaattgttttattaa

SEQ ID NO: 113955 - DNA, 2408 bp, Cannabis sativa
  modified_base (2349)..(2349): a, c, t, g, unknown or other
cacagtacgtttaaaatcacgtcaacacgcatatgttagttagggtgttacagtaaccaagtgcttgatttcctttcgagtgaactgggtttggcagttcttataataatttgcgatcttcttaaagtacgaatgaagaggcaagatcaccccattcttagcgtgggcactgagtcatgcacagagccccttcccaggattagtggcaagatgcctaggggtagagaagaaggcttcaactcactcgaggagacccttctcatataggttcttcagcctcttggaagcattttgacaatgtttatctggactttgcagttgattccaagagtgtaagaatggggttgacatcaggatgggtttaaccctttctctaaatatgacatcaacctatagtttgtggccagtgattttaattctgtacaattttccaccttgggcttctcctaatggaacaaactatctcatgtctttgttaattccaggtcctaaatctcctggaaaagattatgatgtgatcttgaagccattagttgaagagcttcaagagttatgggacggagttaatgcatatgattttgtatggtcaatgtatgtttaaactttgagctgtagttttgtggacaattagtgattttcctgcttatgcatacttgtccgggtggagcactactggtaaattagcatgttctgtttgtctagaaggcataagatttagaagaataactgacgaacaatgcttcatgggacaccgatgttatttgaagaaaaaaattattcttggagaaagagaaaagaatatgacagaccaattgaattacgtggccctcctaaaacttttagtggtgatgacattttaaagcagttggatgaaattcctattcataccacaggtaaggcaccaagtaattcttctagaaaatgtaagagtggagagaatgagctgaattggtgtaaaagaagtgttttgtttgacttgccatactggttaaagatcttgttgtgtcacaatcttgatgtgatgcatataaaaaaaatgtatgtgataaaaatattggaacacttttagacattgaaggtaaatcgaaagaaaatttaaaagctcgtaaagattcgcaaaatttaaatattcgagaagagctttggctgaagaaggacccttctactaagaaacataaaaaacctcatgctagttacagtttaaccagagaagaatgcaaagatttttataaattcattcaaagagttaaactacgagatggatatgcttcaaatattagtcgatgtgtaacagataataaaaatctaggaggaatgaaaaatcatgattttcatgttttactttataagatattaccagccgccttatttccttttttgacagacaacattcgtggtactttaattgaactctaccaattctttcaaaaaatttgtgcaagaacattacaaatttctaacattgaagaattgagggatggaattataataattttgtgcaaattaaaacaaatatttcctcccatcattttttacagtaatggttaatctttgtgttcacctactcgataaagtattattaggtggtccagttgcttcaagatggatgtttcggacaacaagccatatgggtttgtacaagaaatatgtgagaaacatgtctcaacctgatggtttaatagtagaagcttttgttgtagatgaagttgtaactttcttgtcaagatacgtttctaacatagagacaagattctcaagatccgagcgtaattgggatttacctactccaaatcataagttagatattttcaactccaatttttcgttcattaagggcctctaccatcaaattgcttgaaaattcgagaaaagttgttcaatggtatatattgaacaattctatagatatatccaaaattttctcgagtaagtaataactttttttttttctaaattatctcaactctatattattcactttttcatagaaataaatttaaatatagtgatcatataaagttgttagaagaaaaaggtctttctgattcagaagttgccttaaagcacaaagaacaatttccttaagaataagataaaagactatcattagtgaaaacttactaaattcttaaattgtgagatcattcatcataacataaattctttcatactataagtatctaaaatgcgagttcaaaactcacctcttgccaatggtgattgaagaaattacactttataccctttttatattgtcctctattatttttaccctcttttttaaagtctatcattttttttttttaattattgttccaattttgcccatgtcacttcaagatactctcnatgtgactctcttatgtcagggtatttttggtacaatacatataaaaagaggtatgttt

SEQ ID NO: 113956 - DNA, 3258 bp, Cannabis sativa
aaactttaaatattatttttttaaaaaaaaaattaataagtggtttcttttaatttataaaattttaaaaatacacataataaaaataaaaattaaaaatatgactaagtatatgtgtaatgaacgtaacaatgacttagtatatatagttatgaaatcaaaggtttaaatctcaatatttatactttacttttcttttttggaagcatttacactttacattttacaaaaaattggttatatattcaatttgaatccttaccaataagatttgtctttagtaccttaaccatattgggaatgcatatgcttaacgaatcagtttatttttcacataaattaatatctaacataaatactaattttctataacataattaatttcacatattgagtatagaatacttacacagatattgcatagcgaatatgactcctcccgttcagtgatctaacccttggttatttctgttgttcagtaataaccagtggtgaactcaagatttaagttgagggaggacgtatttttttttgtaagtgagattgggagagggggtgtaccattttttttttctacatgatataacatgttaaaaattgatgaaaacttgtatttctatcatatcgattaaatgattctctatagacagtttataataaatatggactaaaattaccattataccctttaattatattttatctaaaacacttagttggtataatgatatttcagtaaactaatttaattgctaaatgagcggtctatcattaaatacttcaaccaagttcaaaggaaactgtcgctttacttctaacttagaagttataaatgtctaaatctatgacttatacttccactcaattatatcgagttcccgagatgtaagtatgagttagaccttagggtaagatggtaacgaacaagtcaaagaacttgaataacacgattagcttaaagcttaattatgtcaggattcaggtttaattaatctatgataaactaagtgatattgactaacaataattacaaaagtaagattatcatatttgtttttctattaatatcgatacaatccaatataaacttatatatccaattcaagcctattttaccaatgccttggaaaagtcataccacttttttatggtgcaaatagattgcatcatcgattatcatgtcaatgtaaattcagagtattgataaatcttaggagtaaaatatttgaatcatataattataatactttttaactctgatgacatcacaataattgtgaataactatatattctagatttaatagaatttaaatattaaacatataatcacgtaaaataaaatatgtgaaccaattaattgactctatcataaaagattttttattttctttattgaataaataaatgagattacgtagaatggtgttatttaggacataaaacctaacaaaccattgaagccaaatctttcttatttttttttttaatttttaattataattaacactatcaaaatacaagtttgtatcaatttttaataaacttttttaacatattatattatgtataaaataaagtgcgtcccttttcttacaagcaaaagttgaaggtggctgatgatgacaaagtcgagattaaaaaggcaagggttgcctaattataagactctttcatgaccaccattttcacaatttggcaggccgactgggacatatctctgaaggtattcgacaccaaataagaagaagtttgtgctaaaatcgtcgttcaagagaaagatgagctcgttgttgaaggagaagcagaggaagagtctctagatcaaggctctgcccttctatctgaagaacaaataacccacctgcccgataaaaatttgagcgtgaaacatgccattgatgagccatctcgcaaggagaagaagtccatatggaattggaagccattgaaggcaatttctcatatccgaaaccacatattcaactgttgtttttctcttcaagttcattcaatagaagggttgtctttgaattttgacgaagttagtcttttgtgtgcattggaagaggagggatggggattcagttgctcgacctgtgaaggtttctcaaggcttgttggagtttgaagagaggttgataattacttgctccgtctatgtgagtaggagcggaccccatcattcgaaaaagtatggtaatggcagattaagaagaagaagtagttgggttgggggttctggcctctttcgagaagaaatagaaagaaaataaaagacaaaggaaaaagaaaaagaaaaagaaaaagagaaaaaaaaatctaatttttttatataatttttaaattatttttattatattaaaaattaaaattacgtagaccactaaaattttatcacgtgtactcttgtgtacacgtaggcagtccaccatggtacttaattgagagttttagacggaagtataaagagcaaaacagaatgtgagtttggtaggttttgtcgtcaaaaaatcagttttggtggttaagtgttaaccacataaagttcaggtgattttgctgccaatatccaatttttaaaataccaaaaatactatgttgcatacttgatggatcaattgagatattataaaatcaatactaacctactaagtcttcctcttcagatctctaaaataaaagtaaatgaattgattattaatcgtatatataattacgatgagacaatacatatttataattaagataatacataatcgatagtgcaatactaatctactaagtcttcctccttagatctctaaaataaaagcaaatgaactgatcattaactatatacaattataatgagacaatatgtatttatagaattagtaaagactctcatcaaaaacttaagctaactagaattcacacacataataacccataaaatataaagcactaaactatatggctaaaatgataaaaattagagtaatttacagcaaaactctccccaactatcaatttacttgcaaaaaatcatccaacctcatattttggtggaaaaatcctccaaagtactgtttcgtttacatttttaaggtgtcgtctgtacagcctcgttaagtcctaattttgtccacgtgtcactgacaagtcactaaaaaatcaacctatgtggccatattttacaaaataaaaataaaaactttaagagtaatttgcggcaaaatccccccaactatcaatttacttgcaaaaaaccattcaa

SEQ ID NO: 113957 - DNA, 4100 bp, Cannabis sativa
tatgtcttttggtctcctcagtgttgagctttctcttgcattgttgctatttcactttgattggatgcttcccaatggagtgaaaaatgaagatttggacatgactgagtcttctagagcagtccttcaaagaaaaaattttcaacaagttattcctatcactcaagaactgtcaactagcactgcaaattaagaggaattatgaacaaacaatcaggtgtacgtttatacatacagatcaagacaaggagatcaagtcatcaacaaataaaagtggagatgaggaagacttggttgatgttcttttgaagtttcatgagactgaagatcatcataagttcacattaactatggacaatattaaagcagtcatttttgtaagctctcaatatatatatatacatagtttgtcaacttttatatagatattattatcaatttttgtgaaaattaattaacattcttaattggtgacaaaattttcagaacatatttggagctggaagtaatgcatcagcaacaactttagactgggatatggcagaattgatgagaaatccaagagtgatgaaaaaagctcaagatgaggttagacaagtctttggcaaaaaaggattagtgaatgaatcattaatcaatgagatgaaatatttaaaatttgttgttaacgaaactctaaggttgcatcctccagcttccttgttagttccaagagaaagtagaaaaaagtgtgagattaatggttatgaaatacctatgaaaactcggatcattgtacatgcatgggaaattggaagagatcctaaatattggattgaatctgagagttttatgcctgagagatttgttgatttcaagggaaataattttgagtatatcccatttggtgccggaaggagaatatgtcccggtatgtcatttggtctcgtcagtgttgagcttcctctagcaatatttttgctataccattttgattggaacctccccaatggaatgaaacatgaacaattggacatgacagagagatttggaattataatctctagaaaaaaggatttgttcttgattccttctaaatatgatccaccttctatggccaaagcaatgatgatataaagtagtttgtcttaggctgatctttttttttatatatatatatatatattttgaactctttatatgtcagaatacacatattctgactgaaataaagtaaatgtatcacttttaaataattatatcaataaatatttactaaataaaagttctacatatgtgttttttttacttaatattattattaatattttgaaaaggggaaataaatttctaaggcgaaaaatttacataatatataccaaaaatttgaaaaagttcaaaattagaaaaatacttcaacatgaattttttatttttttttttatttttacgctttaaattaattatttacaaacctttgcagcaaaaataataaagcatttttctggttgttttatagttgtattgtagttatcatcaaattgtttttctagttattttttattttttttttatagttgatttatagttgtcataaggttaatatttcgtttttttcttattttttaccaagcaaggtgtatttatatccgtatcttcttttccggtacgtaaaaatgtattcatattcttatcttctttttcacaaatttaatctatttttcctttttctatacagacgaattttattaattctcacaaccaccactctaactggatttcattttgctgtgacttccatggtcggtctcatctaatgctaccatttattctgcatccaaattacatgtacctctctgggagcttctctagttctccatagttgcaaacatgtccatcactggaggtgaggctccaataatgttgttggagataagacaaattaattttgttagagctgaatattcctttggtgtatgcatgcataaagggtgtaccagaagagagaaaattagtgagctgccatcgttgagtgccatgacgaagaaaagaccaactttgtaatctgtgaggagagtgtgttcttgagtgttcatcaatgtatgttcaactcattttatgtgtaatctcaaactcaaatagtggaagtaggatgtaggagacacattgtctctaaacctggataaacttcgggtatcttttttctagtttaatttgattaattttctctactacttcattacttttaattgcttgtgttacttgattattattacattggttcggtattgattggtgatcaaacatattgcattattgtgtttcataacaatagccagtgtagttagaactagtaggttgttaaaatgttaggaacctaggtagttaatgttagttggttcctatggtatagttcttacaaatgaataggtctctaagagcatcaattttggaaagtttttcactcgcgaataccagtaccggaaggagccttatccaatgatagttgagtccagataggagttccaaaatggctatcatgccaagtccaagtctagtcttcaagatagctagcctcactctaggatggtgttctagttggctagttgtccctcctgtaatggttgttccagatagtcgactccagctgttctatcctatccagaagcataatcagcgagtgtccttggtttgagagtctgggagatcatatatgctctcggaggctctgatacttaagctgacgtggagactttgcttaaagaggagtgtgttaggttagttaaaaataactaataacttaacaaccagctcatttcttccagccactgactttaggatctttatcctaaggctataaataccaccttgtcttgttattacaagatggaccagagacaagattcaaaacttagttcaaatgatattgagagtttgagagagaaaagattgagaggtagagagaggggtacatagaaaagagagagattgggttgtaatttaactacttaattaaagaaattataaaaaatacttatgtttacactatatcaaaaataagtttatataaaaattatttaagctaaactcaaccttttttatcattttttgccgatttttttattattattttcttttcagctgatgaaacaaccctaatgagagatttttctaattaaatagaaaaattaagaataaaaatttaatttttctaatattacatatttatggttaatacccattaaaaatgcaccgatatatataatatagttactcaacattaacccttttaatagcgtaaatcattgtagcttgttttaatattcactactttttttttattattaactagggaataatattgtgcttcaagcggtttttatattatttgggaatcaaattttatattttttagtaattttttttaaaagattttacttaatttgtattttaaaaagaaaaatatattatacttgaacctataattatcattattattatttaaagtgtattacaacttatttatttatttattgtattattatatatgcatgtatagtaataataattaaagaagataggtatgtgtgtttttttgtctgttctcttattaaattgttgtgatttcattattttttcttctagtatataattatcagttaataaaagtaataataatattagtataatattcattatgctatatacaaaatcttcaataaacttaattaattaataatgataataatagcataatagtgattattatataacttcttcattaaaatgaaattgaaataaataagaaattatatataatgttaacgtaaagctaattggataggatgaatagaataaaaaattaattaaacttaatttttttttttttatgtaagaattaacttgaaaaattaaagaagcaaatattaagaaaaaaattctcaaataaactaccacatagatagctattatatatatagttgttttaataaaaaaaaagttgaaaaaaaacacaataaaaagagagaaaaaagaagagaagacattattattattattattattattattattattagaaagataataataataataataataataataaagatcggaag

SEQ ID NO: 113958 - DNA, 3174 bp, Cannabis sativa
agttctagaaaattagaacaaaaaaagaagcccaatttgttatttttatgtgaaacgttatgtaataaaactagcatggaatgcatcagagtccatttgggatacgaaggttgttttgttgttgatgctcgtggtcatagtgggggtctggcgttattatggagagatgtcaaggaggtggtaatacaaggcttctctttcaaccatgtggacgccatagttgagcttcaggggtttcttccttggcggtttacaggcatttatggcgagcctaagcgggagctgagatacttgacctggaatttatttcgctctcttaaaaatgattgtaatctcccttggtgccttatgggagacatgaacaacttgggttcgcttttggagaagaaaggaggtaagaagtatcctgaccgtttaatagatggattcaatcaagctttgggagactgtaatttgatagatttgcctcttgttggttaccctttcacttgggaaaaaggacggaatagcaatgactggatcgaagaaaggttggacaaagctttggttactaatgattggttgtctatcttccctatgccgattctatacaacttggagattaccaattcggaccactgtcctatcttgcttcttttaaaaggtacctatccaacttcttcttatcgctcttttcggtttgagaatgcttggattcgtgaacctctttgtaagcatctaattgaggggtgttggttgggctcgggtctcatgaatattcaagataaaatagccaagtgtggggaggttcttgggaagtggggccgtgacattactggcaactttcgccatcggatcaagctttgtaaaaagcaaatccgagacactaaatgggggcgtgatccgtcttctatccaactccacaaggaaggaaaggataagctatctgagattttggctcaaagggagacgttttggaagcaaaggtcgaaacaatattggcttaactctggtgataaaaacagcaaatactttcactctgttgcaagtgcaagaaaacgaaacaatagtatcagccagctcaaggataacaatggtgtttgggtcgattgggaatcgggattacaaggtgttatcaaagattatttcagcaatttattccaatcttctggaacgaatttgggaacggttttggacagaattcggccctcaatctcttgtgttcaaaatgaggagttactaactcctatatctgaggatgaagtcagaagcgcccttttccaaatgcatccggataagtcccccggcccggatggcatgactccggcattttaccaaaagcattggagcattgtcggagatgatgtcgttcagtttgttcgggagttcttcgtttcaggcaagttcccagattccattaatgagactcatattgtcttaattccaaaaaagaaaaatcccacacaagtgagtgatatgagacctatatccctttgcaatgtgctttacaaaattgcctcaaaggtagtggcgaacagaatgaagggagtcttaagtgaagctatttctgaaactcaaagtgcgtttgtttctggtagactaatttcagacaatgtcatggtggcctttgaagcaatgcattatttgaaaaggaagaccaatggaaggaagggctatatggcgattaaacttgatatgagcaaggcatatgaccgtgttgagtggggctttcttgagtctattcttcgggtaatgggcttcagtactcggtggattgggctagtgttgagctgtgtaaactcagtccgttatcatgttatcaatagtggtcaaaggatagggccaatcctccctactagaggtattcgccaaggctgcccgctatcaccttatttgttcattgtttgcgcggaaggcttgtcctctttgattcgccactatgagactactagactcatcacgggttgcaaggtagctaggagtgcacccactatctctcatctactcttcgcagacgacagttatgtctattgccaagcctcagaggaagaagcaagtcatgttctccaactcctgcacacctttgaacaagcctcgggccaaaaagttaatctgcacaaatcctccgccttcttcagttcgaacacaaggactacatctagaaatcgaatatgcaccctgatgcaaatccaagaagcaggtaatgacagcatgtacttgggcctcccaagtatagttggccgaaataaaaatgcggtgttgggatttcttaaagagagaatgaagaagagaatcaatagctgggagggtagatttttatctcgagctggaaaagaggttctaatcaaaactgtggttcaagcgctgccttcgtatgctatgaatgttttcctatttcccataggcacttgcaaggaattagagaggatgatggcaagtttttggtggaaatcgaacaactcgaacagtaatggcagcggtatcacttggatgagttgggataagatgacaaagcacaagttcgatggtggtatgggctttcgtagcttgagggactttaatttggctatgcttggtaaacagggttggcgactcctatttaacacagattctttggccagcaaagtttacaaagctagatactatcctcatggagactacctaaccgcggaacttgggtcgaacccgagctttatttggagtagtatttatgctgctagagacacggtcaaactgggtttaaggaaaagaattggtcttggtgcaacagtaaacattacatctgatccatggctccctattcttgatcatcctacaccagttccaatcgtagaaggccttgacaacttcaatgttagtagtctctttgaagttaatacccgaaagtgggatgaagacattgtaaaagatctcttttctccccaggatgcggctattatcttaggcattccattacaccactccatcgttgatgattcctggtattggcttgcagaaaagaacggtttttattccgtgcgtagtgcgtataactctctccaacaacttaaacaccattcggattcccccgaggcacttagcttctggaagattttatggtctctcaaagtgccccctaaggctaaggatcttgtgtggcgagcggcatcaaattgtctcgcctcaaaaagaaacttatgcatcaaaaaggttttg

SEQ ID NO: 113959 - DNA, 4146 bp, Cannabis sativa
cccgccactggtggtggcattgggtcttcattttgggcagtctgtatttgagtttggtcattctgcacacaacgacatagattagggttagttttcctgatcaggaattctatctctcttttcaagtgctgatatttgtttgtatcatggccgaaatcattataaaatcaacagaactttgaggtgtccctcttgttgatgtccttcttaatgggaggaggcttcttgtatgggacaacagcttgggttgccatgtagattatttcgagagtttttgtcaggagggtgaagcatgtgtacttctcctccttctcctttttgttttgtggtgtaggggggattcttcaccactactctcttgctcaagatcttcttgagaaatagcaggggacttgtcatcactatctccctgctcgagttcatattgggaaatagaagaggagtctatttcagtagaggcatcaggtgttgatttttcttcactctcctggtcaatgtctgtttgagactcaggaaatagataagcagtgtaatcagttgcttctaattgagcaactcctctgaccttcttaacggcttcttcgagcttcatcaaacaattcgctctatctaaaaactgttgaatggtgtatactgagttttaagtctttccagaatggactcattattgttggtccaattgttgtttccatgaccttggtgtcttcactgagtatcttttcctacgtagtggcctctaagaatcattataggtaatcctttagaggttcatcttcttgttgcttgatacacaccaaatgattgggctctattggtctgtgccttgatggggagaattggtcatagaataatttcttaagcatttcccaagaatcaataatacctagggaaagcttgagataccactgttgtgctgcttcaaatagcatggctggaaaagtttgacaacgagaatcgtctcaaatgccttgcaggttagtatgtacttagaagttgtgtatgtgagagagagagagatggtcttctttgccagtgtatgggtgccacactggatttctgaactttgaggggatctccaaaatcttaattcgatttgagagaggtgaaaatcgctctcgatctaactcgtactctgttggctttggagtagtgacacccttaaccaaagcagcaagggtgtcaaactttctcctacacacatcatgtgtggtgatgtttgtattagttggtcgcttcctattgatgtttttaagcaagctcttttgtcttccaagtcagagatgttgctgttttatggaatcgagagactcgaaactacccgatttcgagtaagtcactttgccagaaaagtgaaaatatgaagttgtgacaaaaaagttcaatttcaatagaagcatggcactcactaaacctacattctgtagagagacaatagctacatccttgtttgcagaatgtttgataaaacataacttaaataaatttaaagaaagcgagtaaagcttgcaatcttgcagtaaaaggataaaagaagatgacatatggaccaaactaaaaatggcttgaacaaccataagatagttggactcaaggataacatcctgccagcgattcgttttgatccaacttagcatctccttaataccaacgcttcaacataggaagcatcaactttctcatgtttttgagagaaaaaccaatcaattatcgaccattactatctcaagccacaccactaaccccaaataatacatctgacgactcaaagattactctatcaatatttaccttaatcttattgatctttggtttagttcattgctcacgtccacgatctacccccacatgaataaataaagacatcatcttctttatttgagacgatttccattgattaaggaccactcttactgaaagaataacatttgtagtagaaatagacttttcattccacaccacctcattataagcttttcagcataggctaccatagtcgcttcctcatgcatcgtagtattgtggtgctacaacactctagactaacaactcaatagtttcttttatttagaaaataggacaaaaatatatatttttctcataaaataatcatattgaataataaattatgatgatacattttataagctcaactaagtagtgatgtgtatagaaataatttttaagtttgagagaagagatttaagaagatgtttaacgtgaaaagaaaatatatagaaaaaagatagaagaaagggtagtagactgaaagaaaataaaagaatgagagagagggtgtagaatcaagctattaataatattaatgctatgtgtgtgaatgaaatttattaaaaaaaggttattaattttgtaaattaagtaaaaaaaatacaaattaattaagccaagttattttgtaattaatatttagaataaagtataaaatgtaaaaatctaaaaataaattataatttcttaatatgctatatttctacccatatggaaattatttatgatctaattaggatttttactcccttaattataatttatgcattatattgtatcccttgaattttttcagcatattaaaagtggtctctgaattattcatagtattgtaaagtagtttttatattttgttttgtcacatgtggcttacaaattactgacgtggttatttcgtctattatcacgtcaatgccatgtattttaaagcaaaaataaaaaaaaaaattaatattaatttttgataactttacaaaatagagttattttaccatattttataagcaaaaatcgtcttagttcttgactttttttattaatttattaagtttttaagtattttgaattttttagtcttaatattattttttatagctttttgtgtattttagagtaattttattatttagtattttattttatttagttttaattttatgttaattttttaattaatttttggtatttttaggggtatttattagccaaaatttggacaaaattagagaaaatatgaagaaagtggagccaaaatttcaaatttcaaaataaaatcagaattcggagtaggcgaattccactcgtgcgaacaacactctccacatcccagccgtccgcgggctgattgtgtggctcaagcgcacacgtgatgatcaccccagaccaaggcgcgtgacgcacctcatttcctcgagccggctgcagctttccaaccgcgtggaccccgcctgtcccccatgccagcctccatcagcgcgccacatgtcgacctctgcttcagccgccatctctaggagctctccatgtgcgccacttgttagctccacattccaagccgcctgttccaagccatttgtgttgccaagtgttccaaatgcataaaaaatgagccctgaatactaatttaaaaaatacactacaattttctattctcttacatttatttagctcattttctcatctcactattatctcagccaataaattgcgtatatatttttacctatttacccttctcatatctcacctacctcatttatgccaaaaatttctagaaaatattaaaataattaatttattaattattttaattcactcactttgactatgaatagagagttttagagaccttttgaagaccaaaaaacaacatccacataacaataccatccctaccacacacacttagagactcactccactacccttccttcattttctctctttcttagaatgtattttcttggtaatatttattataagaaaattatgagcttctaaacctcttaaggttgttaagatggaagatgaagtaatatgcaactaaatactacttatggtgtgttgattttccattatatgctttaaagtttatggaattttcttcttcaaatatgtctttcatctttaatatcatgtattttggattgttagcatatattttcacttcgttcttcattatgtaaaaaatataatttactttgattaagtgtggttcattagattgttcacacctaattcttagaatatgaaaatcatattttgtaacaccctaactagcctaggcatgttacgtgacttttaaacgtaccgtgcagctcgttgctaatcaacgaggtttatagaaatcgtgattaatta

SEQ ID NO: 113960 - DNA, 1321 bp, Cannabis sativa
gtatattcctaaaaaaatcccattaatttatgattacttgtcaacaattataggacacaattttaaccaattcagtcatatccaatcttcctattcagcatatcttctccttcgtggattggacttcacgagacagtccaagttatgtaatttagtgtaaactccccaatagatggaaaagaaaaactaaatgtcattctccaaatactataaatactcagtaaatcctacagattaaagggtgaattctctggcaaaacttgcttaggaaaaatagagaatttacgctcattgtattctcgaaggtctttctagctcaatgttacataataacattgacttgtggattaagaatagttaatgccccaaccacataaaaattgcttgtgtcattctttctttttctctttcaattatctatttgtttagtgcaaatttctttaattggttttccaaaaattttagtaaatattttggtgctttcattgagagttgaaagaaacagtggtaccatctagagattgcgttcagtaatcatggtactcacccatataaaatttggtcttcactatactggtcctagcaccaaggctaagaatactgaagatccgcatgaggcaaccagtcaccaaaaagatcaacatgataaagatcagaatcgagacgatcccataatcgaagatgtggagtttggagagaataattctaatgatgctgaggatgatccctaggatacaactgaagggccaaatctacctaaactcgaaattagaaaacccaatacctaaacgggcgtgtctggtgcatagttaaaatcgaaatctaaacccaaaaaaatcaaaaccccaaaggcccgcctgctgtgcaatcctaattactatatctaaaggtatttagtcatatttaaatatattttaacttcaggacttctaattataattgtttacaaatacaatacaaggtctaaattaacttttgtaaaaagatagattctaaattaattattcgtcaaaatacaacatctaaaattgcataaatgttccttactattaagattaaattaccaattgactttctttattgccataagtataaaattaattaatctagttacatatttgaataaaaaaattaatttttttaaagagttagaccaagttgaccaggtcaatccgccaactcggtcaaaccgaccaaccgaaacctgccaactcgtgacccgctaacccactaacccgccaacccgtgccttattagggtttgggttcggtttcatttttttgaacccgaaacccgcaaacccaaaacccggtaaacctgc

SEQ ID NO: 113961 - DNA, 4223 bp, Cannabis sativa
  modified_base (27)..(29): a, c, t, g, unknown or other
  modified_base (55)..(57): a, c, t, g, unknown or other
  modified_base (83)..(85): a, c, t, g, unknown or other
  modified_base (112)..(114): a, c, t, g, unknown or other
ttttttaaacccttatgtgtttatttnnntgtgtttattttattgttttagagannntgtttattttattgttttagagaatnnnttattttattgttttagagaattcatnnntaggatgttaatcaacatactttttagtaaatctagatcctggtaaaatatttcaaacaaaggtggtttcgggataggctagaattgatgaattgagcgcagacgttgcaattgatgtccattcaaacagatcgagatttctaggggtttttaaaaattgcaatggagaaacaatcgcagatatagcaatcccttttaatcgaataggtgatttgtacatacaagaattgaaggggcttcttttagcccttcaatggtttgacaaagaaaggttcccagttcacttcattgaaacagattgtaaatccataacagatgcattgaggaaggagcaagactattatatatagtgtgtttggagatcttttaacttagctaagggttttgctctcctcccgagcgtctctcttcgctacatccgttgatttgcgatcacgacaacttatgacttggcaaagaaggctttaatgttttctgaagcaatttgctggatcggtcacgaggcttgtgctatcaactccttcttttgtcttggcagcctccttaccataaaataaaaaaatataattttaattctctaacatttttttcaaatttcacaaatagttttattttttggcaatgaaatttcacagaaagtgcaatttattttataacaataattaatataattaatgatttaatattacaaagtaaactaagtatgactagacaacaacaagaatataatagaaaacttggaaagaaaaaaaaaaacagatcagcaaagcagaaaaacacgtttaaaatattttaaattaaaaatgtttaaatataagcacaattatatgtaccaaggcaagatgattatgatattcggagtttcgaaggttagagcagaagcaaatgcagtacacaatgttcaagttgagaatcgagatataacaaataatgactaagacgacacaagtcaaaaaacagcaaaaaaaatttgttttggttttgtttttatgagaaaacaaaaacaaggattaccgtaacatacatgcactttgtccgcagtatttttttttttcacacatctacttattacgtaggcttacttaaaaaatatcaaacatgtttattaaaagaagaaagtataggaatgtgaaataacataggggacttggtaaaactcttgtaatcaatgttaattaatattaaagaatatgtaatccgacgaaacacgataaaatatgagtagttgcgcaattatatgataaaaacaacaatagtcaacgacttactttatgtttttgacaaaatatgattagtacaggtgcaaaataatttgtattcctatatatcacctaaccaacattacatctcaaaatcatgtgttaaatatttttgcaatattaaacaaataaaacttctgaattgtgattcaagtttatcggattctccatcttgttgtggaccaccacgtaccctatacaagaatgatactaataataatacgtttaaaatgtcaaaaagccaacgaaataagcctggccaggtcattatcatagcgtttgaatactttaaataatgttttatacttagcgactataatggattataaatttatttacataaatatgtagcccatctactcagctaaacccattggtgtatatctactaaacgaaagttgaatctggttcttaagttttaattgtcccattttgttggatagacaaaaaaaatagacacaacccactcattgttttacatacctatttgtgtttttacttcatctatagtaacctaaccaaaaatgggaaattcttcctctactctgcctattaaaaccgtcttcaagctttcatcgcctctaccctcttggccaccaggtatatatttatattccgtcaatatgtgtttgtgtacatgtagtataattatgtttgaaattgtatatttttagttgaatggtgatcatgaatatattttacaggtgaaggttttgctaaaggaaccatagatttgggagagctagaagtttgtcaaataacaagttttaacaaagtttggtcagccactaagggaggaccagataatcttggggcaaccttctacgaaccctcaccaattccagaaggcttccacttgttaggattttacagccagcccaacaacaaacccctcttcggatgggcactagctgtaaaagacagcaatggttcatcatcagctttagctcaaccaattgactacactctcatttggagcagcgcttctcgcaaagtcaagggcgatggcaatggctacatatggcttccaactccaccagagggctacaaagccgccggcatggttgtcaccaacaccccacaaaaacctccccttgacaaggtccgttgtgtgcgctccgaccttaccgagccctgcgaggaggagacatggatctgggcacagaaaaaggcaccaaccatcgatgaagctgatggttttgatatctatagtcttcgcccgacgaacagaggaattgaattgcctggagtgagagtcggtacattcactgttagaaacagtggaagtactataacttcaactttggcttgtttgaagaatgtgaatcctaacaagaattcatatatgcctaatttggagcaagtaaaggctctgtttcgagcttacgctcctttgatctactttcatccggacgagaagttcctcccttcttcagtaaactggtattttgataacggagcacttttataccaaaagggagaagatcaatcatccaaacccgttggaatcaaagttgaacagcatggctcaaacctcccacaaggtggcgcaaacgacgggtcgttttggctggacttaccggtggacaacgatgcaaaagagaaagtgaaaaaaggtgacttgagtagtgctcaagtttacctacacgctaaaccaatattggggtccacgtttaccgacatagggatatggttattcttcccatttaatggtccggcaagagctaaggtggggcctcttgatatccctttgggtaaaattggcgaacacataggggactgggaacacttgacgctcagagtcagcaattttaacggagagttatggcttctctacttgtctcagcacagtaaaggtcaatgggtcgaagcttcggagctcgaattcggcagtggtaataaaccagtcgcttacgcgtcgcttaacggtcacgcgctgtacaggaagccgggtacagttatgcaaggaggtggagaggttgggattaggaatgacactgccaagagcaaatttgttatggacacggagaaggggttttcaatagtggcgggtgagtatatggggtctgcaatagttgagccgccatggctgaattatttgaggaaatggggtccgagaattgtctacgactcggcagatgaggtggagaagattcagaatgctttgcctgggaatgttaagttgcccagtgaaatttttggggaagacggcccaactggtcccaagctcaagcgcagttggagcggagatgaagtgatatgagaatactattattatttattaactccaccattattgaatattgattgtgtgttattgtgttattgttgagtcattaacggttatggaatatttaataatctataattgcacattttatttattttaatagttttgaaagggaagttatttgttttatagaaaagtaaaagatgagtggttgagttggtataccaattattttatctatacaaattattctctatggtcatagttcgttttagaattaaatgattttatataaaatatgggcaggtttttttgttttttttatttttttaatagattatgaaattttattaataactagctaaaataatagtctgcaattcaatcaggacatctcgctcattgtaaagagaaaattatattgtatacccacttttctttacttgttttaagtttaacctttatttccatattctttaagatatactcacttttatagacgatgtgcatattatatcccttacataaatgtaaattatgtgctacacttaagtggaaggtaaggatatattaagcaacccactcataaaagtggttagattttaataaaatataatatg

SEQ ID NO: 113962 - DNA, 1375 bp, Cannabis sativa
  modified_base (1313)..(1316): a, c, t, g, unknown or other
cgaacatttttgtgtggcaaaaaatactccaaattattgcaatcattacaaaagtgtcccttttggtacatttatatttttaagcaaatgacagttcatgcaaaaaatacacatatatgcagatagtggtctgttgataaattttaaaaatatttattttatatttatactattaaccgatagatatgcatgttcctcggttttcatcatttgaaaggcatatatatcatataatatatatcatcgagcatacaaaaacaaatattgaaaacagtgaaaataaggatgactgttataccttgtaatttagctatatagagtagatggatgttacacattcaagatgacaaataatatatatataatgatgatcaaataatgatctatattaaccccatatactggaaacaagtacctcaagatctcactcagaattgtctcattcataaagtcagatcaagagtactcgttcccattaacctcctattattcattattaatccactaccactaccactaccattaccagtactactgctacttctaataacatgaccacctccattaatattattcaacttggtaagctttgaggacgaagatggggacaaagaaaggcccaaactagtgcttgtatctatttcttgatccatttctaacaatccacccccaattctctctttattattattagtactattatttggtgtcaatttcaaagacaagtccaaatccaactcatcatgaccatattgatcagaatccaatgcctttcttttcagaatattatcaccttcttgctttgacgactgatgagatttctttggcacgatattattatgattgtgatgatgatcttccattgatgatgtggtgtgaccgaatcgggttgatgatgatgatctcggccatgatgatctttgaagcgattcgttttgatgatgaccttgctgcattgatctccaactagcactattattcaaagatgaaaaattattactcgtaataagcagtgtattattactatgattattatttctgagtaataatctctctgcaattgagccgtaattgaatccttgaactgatccatgtactgatgacgatgatgatgatgatctgttgttggcactgtcaagagcagccctaactgagttattattattataaatctggtggtcacggcctgatgatgatctccatgaagaatcaccatatgaggatctacattttattaatttgaaagagaaggaaaaaaaacacctaattaatatatatatatacacatactatatgggtgactattcaatggnnnnatttttattgtaactatatggttacaattttttttaacctgtaatagcaggttactaat

SEQ ID NO: 113963 - DNA, 4190 bp, Cannabis sativa
tttttttttttttttttctatttactaaattcacaaaatgaatcataaaaggttactaactaacctttacttaatcaaagggcaactgtcatgatatggtgaagacatccaattaaataaaggtaaattactgaatcacccccatcactaaacctagttcagaaatcggcttaggggtaaaatggtccacaaccacaaccccgccaacacaaaccatttcagcttacattacatattttatatcattaccaaattctatatttccccaagtgactaaaatatcctccgttgtatttttccatcgtcaccgagctaaaatcacagagatagcatattttacatttaacataatcattcacataaaacgtcaacaataatgataagaattataaaattagcacttataatctcactaatccatatttaaatattgcagtcgctacatttttcatgcaaaagcctcgtctagaaagtccaacagtcagatcaaacaattgcaagatgaacatggtaacatggtatctaacaagaatggaatgtgtgatattgtacagcctcggaggacgaccattgggctttatctcatgtcctatctacaattccaacaacaataacttcagaccataataaatttcttctaaaagaattcaacaaggatgaggtgtttcatgctttgaagactatgggaagtgataaaagtcctggaattgatggaatgtccgcaatgttttaccaacataattgacatatagttggagattcggttacaaaggttgtgttagatgttttgaataatagtacaacacctgttgctttcaataaaaccttgatcactttaattcccaagatcaagaaaccaaggacaatgaatgattttagaccaataagcttgtgcaatgtcatctacaaattgattttcaagatgttggctcttcgtctcaaagaagtcctcccatatgtaatttttgaaatgcaaagtgcttttctcccaaacagacaaatcacagataatattcttgttgcttttgagctcattcacagtatttaacatagaaagagaggttccaaaggattttttgctcttaaattggatatgagcaaggcatttgatcgtgttgattggtcctatttagcagctgttatggggaaaatgggtttcaatattcgttggattaatctcattatgacttgcttgcactcaaacacattctcattcctcatcaatggtactgtcacaggcttagtcatccctcaacgtggtcttcgtcagggggacccactctcaccgtatttgtttttaatttgctctgagggtctgtctcgtcttctacaatatgaggaatctgttggatgactaaagggtttggctatctccagaacaagtccaacaatttcacaccttctttttgctgatgatagtctactttctgtcaagcaaatgatagatcttgtggtgctatcaagaggactttggatatctatcatcacgcttctagacagctccttaatgaggataaatcagttatgtctttctctccaaatacatctaaccatacaaagcattctttctctcaaattttaggtacacctattagtgattgtcatgaaaaatacttaggcctacctgcttattctgagcagaataaaactcagttgttcgctgatatcaaagatcatatttggaaaatgttacatgattggaatgataaacttttctctattggtggaaaggaagttttgcttaaagcggtggttcaatccatcccaacgtatgctatgagttgcttcaaactatcagccaagttttgtaaagagatagacacaatgatggctcagttttggtggggtacaacacatgataagaaaagaactcattggaagaaatggaagtttctttgtacatcaaaatggaaggggcatggggtttcgatcatatgttcaatttaaccaagctttgcttgctaaacaagcttggcgaattttgcaaaaccccaatacacttttggccagaatattgaaagcaagatactttcaaaatgatgattttttgacagcttcctctgctagtgtaacttctttgacttggcaaggtatgtgttggggccgagatttactctttaaaggtttgagaatacaagttggtaatggtcttcaaattaggagtggtttagacccttggatacctgcccataacacctttacaccagttgctttttcaagtttagacagtaattgagttgcagtttacattactgagaattatgtgtggaatgtggggaaattacaaactgatttctcagctattgatgtagaaaatatactcaaactactactttctcatagtgttgagagtgattattgggtttggcattacaatggctcaggagtgtatactgttcaatcattggcttatacattggcctcacaagataacttctcaagctctcaatctttagcaacttggtggaaatcattttggaacttaaaattaccttctaaagtgaaaatttttgcttggcgagttatccacaacttaataccagttgcagcaaatttattttagagaaagatcataaattctaatacttgcagcttatgcacaaatgcctaagaataggtgggacatgctttgttcagttttaagcatgccaaaactgtttggcgtttctcaaattttaaatttgattttgtagcagccagccaaatgtttgaaggtgatttcctcatccatctttcgacattacataccaaatatgatcttgaaaagattatatgcacaatgtggtctatttggtccgacaaaaacaatatcgaacattaaaaatcacacaagaaaccggctgatgtttatgtaaattccatggcctacatctgcaactttcaacatgcttctagttcaacatcaattgtaaatgttgatcaaactgtagcagatcatttgccttggaaaccaccacttgctggtaaattaaaactcaatgtggatgctactgtactttcctcacaaaaaaagatgggctatggtgctttgatacgagattcaagaggagaggttttggctgcactatcaaaaccagcaacatgcaattttaagcgacaagaaatggaggctaaggctatgtttcatgcactacaatgggcaggacaattgcattttcaagtggaattagttgaaacagattccttggtgcttgttaattccatacatattttatcatcaagctttttatcatttaaggacttaattcttgatgatctaattttcttaatgtttgtgtatctcacgttcatcaacatgcaaaccaacccgctcatggtttggctaaacaagctttagtgatggatactgattgtatttggttaggggagattcctcctgctatattttctgttgttgtaaatgactctttaaatttataataacagaacttattctaatttttttttttttaaatcaacattattcaatttaaacatttttgtaatactttaatattatatatatatatatatttaattttaattaaagtattatatatccatttataattactttactattatatatatttttgtctgaaaatgtaaccattgttattctatatatatatattttttttattattaataaaattgtatatatttcttaatatttagcaatgttaaatttttagctttaattttttattaaaaaaaataatgatagcatcaatgctactgtataacattcacacatattcctagaatgacattctttttcctccaatggtataacatctcaatattttgccacttcatatatccacctcagcaagcatcctttaattttttactattggagatgctctaacacctctaacatgccattgatattatattgtgtaagagtattagtcaccatgagtgcttttagtatttctctgattttttttttttttatagaaaatcgtaaatttactagctaaaagtctcagttactgagcaaggtaataagtcaattgtaacagactccaaactgaagctacaatcaagaaataatatagaggctctagcaaagttacgagccattatattaactgatcgtctaacaaaataattaattaatttaaaattaaataaatcctacatcaaactatctaattcgacttgttgcaggagtatgtgttttagcttgtatgtaagttttataa

SEQ ID NO: 113964 - DNA, 2265 bp, Cannabis sativa
ttttttcttttaaaattatacatttttttctaacataagggccaaaaaaaaaattttctccctatggcccactttgtttcagggccggccctgctaacaatgatacctatttaaatggcttttaaggattttgagacctgatgtctctctctctctctctttccctagcttttcaagaatcccaaatttctccacgaaattcatcaaaattgcttgacttgaagaatttcctagccttgttttatttatagaaacctcaaagcaactctatagtggtttggaaataaaatattttatagacagtttctcaacttgtgcaagccttggtgttgatttgttgttagattttcactggtctttgtgttcttagttttcgagtgaaaccactacccctaggccctaacagtaatatctaactatttcataattcacattatacatgacttaaaagctataatattaaaacagattacaatacgaataaaatcgacaaaaagagattctaccttataatattcagaagtttgacatgattgcaagtacacactgtcatatattaaaaaactcatcatcaaactgcaggtctttgctgttgtgcctagctatcaaaaagttctttactaaatatcttcaaactttcatctaaagaaagaaatagaactaattgccccctctatgtcaagattatcaagcttttaaagttctataagcctatacccattactccggatgtatagaaattgtctcatcaataagttgtataaaactccctgtatgattatgaagaccatgatcccctataatcaaggtctcaaatattagagaaccatctaaaaatacacgaatacaattgttctgagaagaaagattagatctttgatatatttatgtattctgtcatttacccacgagaacaaatcaagagggtcatatttcttctccatacaacttgagggcctggtgtatattataacgtgatacactttgtttgatgaaagaaaaagaaacacatataaataagtaacgtttatctctacgtacaatcacatatgcaggggttcaccaacttcatcttcacggatacctaaaatgaaaaaaagaggaagaagctgttcttcagtattgtactaagtgaaaaaacaattactttactgaaaaatttgtgctaaatatcattgttttgaaagtttattttcttacttcctaaactatttccttaaatttcaacttggaggattttacaactctaaatcccctacattgtgaattaaaaaggtaggagagatggagagaacaaagatggactaagaaaacagaatgttaggggttatgtggctctataacttaaaaatagtttttagtttttaaaaatagaaaattactaatgagggttgttggtcaaatttttattttttatttttttttaaaaaaactgaattttatgaaactagaaaacaaaaatacatcaaaatgttattttctattttcaaaaataatttttttgtctaacatattatttttttacttttttgttcacatacccggactcgtatcccgacctcgatcttggactcgcacccgaaattcagaccttcacataaaacatggaaaagagattgatttttttccaaccattttgtttatttctatatatttgattatctaactaatgttatggttgtgtttgagtgaactcttcaatcttagttataacttattaaataataaaacaaaaaattgaattacacccttttattccttttcactaggagaaaaaaatgaagaaagaactattaactttcacataaaacatagaaaagagattaaaaaatacagtggctaaggttgatataagtagttagagaaggacataaaaaaggaaaagatgaatgtataggcagaactttttagagtacttggattaattctactaaagtatatttaactatgacataattgtgaaatatgctagaaatgaggaaaatcactatcagtcgacgcagcagaaaaatcactgtcgaactccaacacgggccgcggcatggctttagcatgccgcggtccgccccctaaatagcacaaaaatcgtatttttcgctcacgtgggtgttgggagtttcctagttcgaataggcatttaacatgtacgtttttctatcttttagtccttgaaagcctatataaagggtaaatggagttgatttcagtcaagcaatttcagagagaaaaaaagagagaattcatatgcaaagtggagagatcaac

SEQ ID NO: 113965 - DNA, 3253 bp, Cannabis sativa
  modified_base (3066)..(3080): a, c, t, g, unknown or other
ttctattatgatatggtattaatgttttatttattgttattattgttacattgatatttttaaaatttttaatttttttctagtgtaattctatttagttataacctcccaattagaatataatttacttgtctaagtgtatttttgaatagagattctactatatatatatattgcaaaaagaaagaagcatatctggaaatgggtattttagaagaaacggttggcaaaggaaattgagatctcaaatggttggaatccatgcctctggtgaacattactgcagttgtatatcaaacattactaaacacggattcaataataaaataaaaccatacttttatcattctcagtcattatcaacaaacatagaaacaaaaaattataaggtaataagttaagagcttgccacacataaccttatagagttggaaggaagacatcattttcaataagtttaaattgatagcattacattactaaattaaagtttataaaaagcgaagaatgagaacatagatgtgttccaatatcttcttctctatttttattttaaaaaatgtgcaattttattgaggaatgaacacagatattccctagtatctatacatagatagatagattagcttaggcaaaaatgccgcactagggagagttagggtgcaaacgttcaagtaggaaaaggggctgtaaaatatagaaagtgtgaaacttctaactcaacttcaaaattcgcaatttaatacccaaataaatacataaaagtaactagttcaaaaatgtctctgcttattcacaatattcgggacacaagcaatgcgtagttttctccctagacactagttcttcgtgatagcttcagaatgcatgtaaaatacctcaaaccaatagcttcagagccaatgtttattagtttacaaaaaataatttcaaaaacatttgctttctctggatgaagaaatatggaaccagtaacaagtacaaattgaaaagagcacagaacccaaaacttggtacttcaccacacaatgcaaccactttttctaggcataaagcaaaaacataagatcaagagattacaagtctaaactttacatatatctcaagttgtcaatattattcctgtgggaaccagaaaaatattaaacagctagcaacgatttcacacagaagaaaagtattttatttgcatgttgtatctgtaagcaattttagcataccataaatgattcactgggatcggcacattttcctgattgtacgatcacttcactaaacttattcaagcatttctcaaacaaatagaatccaaatcttgtatgtacatatcaaacaagacaaacattctaatgtattctacggtttaaagatggtacctaagatattcttctccactacacagaaatgatatgcaagcacttcaattgttaatcacaacgatttcatttccaacaattcaaaattacctcaaccacgcattatgatttctcccaaatttctccacttaacagtgcatttttaccatatctatataatctagaataagtaagaaataacaaaaggataattagtgataaaaaaaaaaaaaaacacacaaattgggaagacaactctattgatagggattaaggaaacacaacaatgaatacgaaacttgtcgtaataccagatcaacaatgcacataagactgcaaagcccaaaatttcacctcaaattctatacccataaaatcgagaaagaacaattgtagcgccaataaatgaaaatgaacaaaaaccctaaaataaaaggtttcctcatataggcataatcagaaatccatatgcgggtacaagatagatctcggcacagaagttctaaacaaagcagaaatcctaaatgtatcaccattcgattgtaatataaaagctaagaatccctaaaaaggacagatcaagaagatgcctcttcattctcaacatttgaatcaacaacactctcagtttccgggtgcgaagcaccatctgcgggggctgaaccagaggaggcggcggccctagccttgacaacatctagcattcgtttactgacctccttagagtagacctgaagaatctgaatgccatcatcctcggaagcagcagagctagctgcggtggagaaggcctcctcttcgatgtggcgggcggcggatgaggcctcttcagaaggcaaggtaccgtagcggttggagaggacagaaggggctgaaagagtctcaatgaggcggttcaccacggcgtctcgggtgcgctgggtaggcggccatatgctgaatttgacctggctaggcttgttggtggtcgcttcaagctgctcttttgccgtagcctccattgttgagtcatgctctgaggcagagtatgaagacggaggtgttacggcaatgctctcttggtccgacattgttatcagcgccagcagttcccaattcaatccaattcaattcaagggtcttgattgaatgcaagcgatactacattttatactcatcctgtgccactttctagtttctaatttattcactgtgcaattatcaaaaaaagtttattcgctgtgcatttactaacatacccttattacactagaaatattgtagtaagactaattttacattttttttttagggattttttaaatattatacttaaaattgattttatttacaaaaatacttttaataaaattatttacacaaatactgttgtgcctcgttagcatacataccaaaattcaaaaaattaccgaaaatgatagaaacttgtttccaaaaaattttgcttttcaggttttaaaaaaatcaaccatttagttgcttttgatgtgaataatatatcaattggttactttttattaagaaatttatttcaaaattttacacatatataaataataaaataaccattttaatatgtgagaaatatatatttttctgtctttgaaaatattaaaagaaactttttttgtttcttttttacattggggagttctatttgcaccccataaaatgataaatacaccatattattaaaaaaaatataaacttnnnnnnnnnnnnnnnattactcttaatatttttttaaatttttttcctcacattattttatgttaatttctatacttattttgattacattttcataattttttctaactcatgtatgtattttttttattttttttctatgaaaatttcatataatattttattataattttttgtcataatattta

SEQ ID NO: 113966 - DNA, 1680 bp, Cannabis sativa
aacttcgccatttttaagcctttggtctggtattccccgaggacctggttcgcgatcagttgtaaaagcttcaataattcaagttgtgttaacaatagtttcggtaatgtattgggtgattaaacaacttgacataaataacgctttcttgaatgaaacacttgatgaggatgtctacatgtttcaaccatagggttttaaagatccccaaaaacctcaagatgtttgcaaactccataaatcaatctacagattaaaataggctctaagagcctagtatgaccagttttgaaacaccttgctagactgaaaatttggaaattccatggtcaatttttctttgttcatattgaagcatcctcattatgtgattatgttgttaatctatgttgacgatatgattattacagggaacaatgcttcatatataaataatttcatcacaagactcaacaaagtttttctctcaaagacttaggtcccttgaactacttcctaggcatagaagtattttatcaatacatggattcatctatctctaggacaatatattttagagttgttgtagagacctaaaatgaaaaatttaaagccaagccctacattgatggttgctaatagaccttttttcaatacatgatggtgaacctttgaataaccaacaatgtataggagcgtgattggaggtttacagtaccttagtcataccatagttgacatttcattctcaataaacaaattgagtcaatttttaaaaaatcctaccacaacatattgaaaggtgcaaagagaatattaaggtacctcaagggaactatgtatcatgggctgcagatcactttgagtgatagactctgtttgataggttactcagatgtgattgtgcctattgtctgcatgctttaaaatccattgggggttattgtgtcttcctaggtgaatctctaatatcttggtcaagtaaaaaataatcaatggtagcaagatccaatatggaatctgaatataggtcgctaggtaacttggctgctgatatagcttggttagaaagcctgctagcaatgtatttcaaaatgaaaagtgctctagttgtttggtgtgataacattagtgctagtgctttggcttcaaatcctgtgtattatgccaagaaaaacacaaagaacttggcatacactttgttagagacaaagttctgcagaagaagttggagattcaatatgtcccctctcatgatcaaatagtcgattatctaacaaaagaactttctccttcaagattttaatttcttattgacaaactccaagtcagaggattcccttgtcgtttgagaggtgatgttaaaaaagaaatatttcgaagttcttatcaaggttgttgtgcttttattattctattttcagtatttcaattatttagtgtaaaactattttataagttttagaattattcctttggtaaaaggtctctaacaagtgtaattccctcagtggctttgatcttttgccatgtaacattcagaaagtataaatacaatcttttctctcttaactttcttgagctgagatttctgttgggaataaatgatagtattccaattctccttcaggatcaatatttgcagaaaaatacaatggggactccaaaattcctttctgatgtgaaagattagtcaaagct

SEQ ID NO: 113967 - DNA, 2160 bp, Cannabis sativa
atattttaggggtatttttaactacacttataaattaaggggcatcatagtatagtgtcataagtacagggactaaaaaagctaattattcatttatttacgatatgatgagttgttttacgcaaaattgttggaatggaaatgtagtgctttgtcactttctgaacagcctaattaataacgagcattaattaatgcctctctctcatggactcatgacacagtgatgatcataacatataaatatataaactacaattatttttttaaagaataataacaattttcttctgataggggacaggtctcatctcatgtgcttgattttacgtatttaagtttagatttaatatattccatttaatataaattaagtacctaacgtgatcgatatcattatgaaaattataactaaggttaattatatgttttttttctcttttttcaccttaattttctcatattatgagcaaatcagatgttgatttaaactacccaatcccgtcttgatatgtgatatatagaaatcatatagctagctaggggagtaaaggaatcaagatcttcggttaaaaaattgtctttcatagtgtattaaatcaattttattgtgacacgtcaattaatttgaccattttttttaaaaaaaaaactgtatagataattgattttttaataaatgaaaaattagttgacgtgtcaaacttaaattagtttaacacattatgacacacaatttattaacatgagatcttgattcggagtaaagttcaagttaattaagtttcaataacatttagatttaaaagctgtttgatttcctaacttaaaaattattttttatttttaaaattgaaaacagtttttaaaaaataataagggtcgtttggcaaaattttttaaaaacatctttttaaaaactagaaaataatagaaaacatcaaaatgttatttttaaatttcaaaaataattttttctgacatatattatattttacatttttgctcacatactcagattttagatccacattaaacctgaacctggatgagttcatgtcatggtatgatgttaaaatattaatttttttagtaagataaaatctaaaattagtaataaaaaatttatgtcaaatactattaaatttttaaaatgacaaaaaattattttttatttttacttttgaaaacaaaattttaagaactcaaagctgaaaatacagccaaataggctcttagctttcaaacaaaaaaatataacctttaggtttaggaaaaatgagtagtatacttctaaaaggggtgtttaattagtgtatttttatatcgttcggtatttatgagagtttttcactctaattttttatattttatgattgtgtagttatatggtaaattttagaaattatataaatagtttaccgtatcaaaattaatgttcaaaatagttacatatcatacatatatatgaaattaaaagcaatcacgtgtaataaaatatttaaattttaattttcagtattataaactagtcggaatttttgaaatttacagataatcctaaataattaacatacacaattataaaaaaaaaaaaaaaaaaattgaatgtgacgttttcttggaagtaatataagaaatgaattaattaatttcaatcaattcttttatttagttacattttaaagtattgaaatgtcattcagttggaatgatttttttatcattttagtaaaatgactatttcattttaatattttttatttttttttttatattttaaattttattctattcctattcattttcttattctcgttcttattcttatattttcattcttcccctataaataccacctaaataacttaccctatttttgtatcacgttataccaataattacattattattagaacattaattgagtggctagtgactgtgatgtgccgtgcatatatgtatactttaaggcgtgcattcattgatatattttaacacaaaatctatagctatctaaaatagagagctttgactcaaaatatgtgggtgcatatatatatactagtaaaaaattacgtgcgagacacgtatactaaattttatgttaggtataatctactttatttaaaagtgatacaattaataattgaaaaaaaa

SEQ ID NO: 113968 - DNA, 3828 bp, Cannabis sativa
agttcaggattttatttgtacaattttagaaaatacaaggtctattttgttaaaaatagagagtccaattgacaacttttacaaaatacaagatctaaaatggtatttaccctataatagtctaagtgaagagatgtccaaaggataataagtattacagaactctaatccatttggcctatcaggttgtgaaagaatccttaagaatggcatcagtagtacccttttttccaagactggctctccatgactgtgagatagaaggtctacattttcttttctttttttttttcttttccccaaatattttgtatgtaaattgattagtatttccagtaacataacatattattatttaaataaacaaacacatattttataattattccatttctcaaagtgtaagctgatctgttttttatttcaggatttaaaatacaaaaaggatggaatgttaatattgatgctagggcagtgcatcttgatggtacagtgtacaatgatccaagcaagttcaacccttcaagatttgaggtcaatttcatcctaatataaatatattatatatttataaaacaaaatataggatttattaattaataatgattttaaataaccataatcaggatgaatcaaagccttatagcttcttagcttttgggatgggagggaggacatgccttggaataaacatggctaaagccatgatgcttgtttttctccaccgccttatcacaacctacaggtctaatttttttgtagttataattattttatataacgaatgttaggcaaacttgactagctaaccaattatgaatctcttattaaaaagaaataaaataataacaagaatctcaaactttgactatataagtaattagtactcttgttagttctctcttcaaagcaaaagaaaaataataattcatcttgttaataatgtggatattaataattgaacattaatcaccttgtaacatcaaggaaaattagtagcagttataaatgtataatgtcactacattttttaaataccaaattcaacccatctaataatcgtgttgaaaactaaaactcgaatccaactcatttataaacgggttaacctaacctaacctgtgtaactcttctatatcacagatcatgcttaattttagttaacttatcaactcattaacatgtttacaacacttttgtttatcgggaaatcgattctaatgacatggacatcaatgtttgacacatggcaagaaggaaaaaattcatggagttaagtgtttcgagtcatagcagtcaactctgggaagggcccctagccctacacccaagttaactttaggagctctgaaatgggtatttttagatctcatcaagttattttcaagtcaccattcttcagtatttctgaaccaacaagtcaagaagactccaagtccgaagccttggaactgaaaggtgtcgatatgacatcctagaagccaacccgagcgcctagggtttcacccaccccaggctaacatttggactagagttttagtttttgaggttatcttagtgaacattgcttaaaacatgcacttcgacatgaataagacctgttacaaacacgttggaggcatcgaaatcagaatcaaaacatttcccgttgaaggcagctgctacgcacccaacgcccaggttgacctagtgatgcacccaacgcccagtttgacatattatcaacctagggcgcttccaaccacctttctaaagatgtttcctgggaattttcttcatcttcatctaaaatgaggaaacaagttcttttggaaaacaagctgatcgacttggaggccaaacaactgacccagcacccaaattgacaccgggcttggtcgccaccgcccaggttgacattttatcaacctaggtcatttccaacaatagttctaacgaagttttttgggcatattctctatttacatcaataaataagatacgagtgttttcgagaaacaaatggagccatctggtggctaaaaagaggacccaacgttcaagttgacttagggctagggtcccaacacccagattgacatttttttcaacctggtcaattccaagcatttttttcccaagaaatctcctatacattttctcttttttcatcaataataaagatacaagtgttctcaagaagtaaatgaaagcatatgtgggccaaaataaggacccggcgccagattgacactagtggtggtccttgcacccaggtagatgttcaacctaggtcgaatgtttttactactcaaacactattactactcagggcattcttcttatcttggtctaaaacagggtaggataccttcttcacaatatcagatgccacaaaagtatcataatgaatcccgaaaagctcaacaatgagcacccagcacccaacacccaggttgacatgtgaaatggtgcattggattctgctatccgattctagttctgtctcgagcatctaactatttttcatagtatttgagagctacaacttgtgaaaagtaaaattcacactttgataacctttttggcaaagtgaaatatcaacaaaaaagttgcaactcgagtagttttgagtctcgcgatttcgcaaatatacaaaaccttcgagaactggtgaacaacttcaccagaattaagaaatttactaactgatgtcacaatatcacttagacttcaaaaaatacaagtcagtcacaatttcctactcatacaacgactaggttgacgtcagaatctcaacttgggtgccggttgttgaacaacttttagtaaaacggtcataactcgctcaatattactccagttcacttgattcaaagtgggttcgaaagctattttcgaagtctttttatgtatatctcacattcatatcccaattcgaaagatttaatgtcaaaaatttgtccccaagtcaagtgcaatttttttttgcaaaaagcctaaaaatgatcccatagacgctattcgagcgccaaaaatttacgatcatcattcaaagtcattttaaccattagatcaccatcaatggtcaaaatttgctcagaacaattttttcatatttttttattatgttattaatattttaatggacatcctaattgagctattgtcttagtcaattttcttgtattctagtgagcaataaaaacttgaagtatacgtaactctatcactatagcgtcagggcgagtgaactaatataaattatgtgtctttaatattttcttaactcattacttatttcatcaatctaacgagaaagtgttggccgaatttctgcagcaacaacttttatgaaacatttaatagtcatttaatatgtttatctcctatttaacgaacttaataaaatttatatataataaagtataataaatataaaggtgcatgctttacgtaggtcattgtcgtattaatttcgagttaggcattacaacccgaaaaattgatcatttattaactggattagccttgtcaacccaaaaattactcaaattcatttacagcaaaccgtaacctttaaaggttcatgcgagtttcgagttgtattatcgtatttgatgcacttttacccttaattattcaacaccaaccaataaacgccaaaaagtcatgagcataacatacacatacaaagatatataaattttctgtatgtgaactttcccaattcatgcttattcaaccacaatgtatttatttaactgtaatgtctccgcttcaagccttcattgggcccttacacccatagaataatgactcttatacacgagtacgccactttggctg

SEQ ID NO: 113969 - DNA, 1414 bp, Cannabis sativa
tataggtaggttgtttaagccattttctaagcgatgcaacgcatggagtagatggagagaggagagtcaaccatggtgatggcagtggggtgatcactctcgatcccataatccataatcggacggtactcaagctcatcgtcatgttcgcacacgaattcgggtatttcaatctcactcctcttcacataatcccagagaaactccatccggatcacgtagtttagtttctggtacaagctgtaatgaattgaaatgaatccatttcaattgaccaatgaaagaatcatgagtaacatttttttggaacaaaataattctcatcatcacaatcaatgattcgatcttaccctccgctgaaaaggaaccgaccaaaggtggctaagaagagcctggactgtatccctggatgaacgaaataaacagcttctagattatccttaacttgagccggaatagcctcatagatagatcggagagttgagattccgggaaaattttcagaccgattaacatctgtgtggatgtacaccattgagaatggtttctcatcatctaagtttgggaatactctgtcttctagatacttgttaacagcttcactactcacaagtcgagctgataataaaatataattaatcatcaaaaacctaaaacatataatcaatcaaaaatatatgttcattaccagggaaaaactttccgatgactcgcagaatgttgtggccgtgtttatcacggccttggatcttgaacagttgaagtttgtcgatgaggttgagttgatgttcaagagaaagtgaagaagaaaaaggggaattcatattcatggtttgtaaagtgggagaatgtgatgcttttcctacccactctctcatatttatctttataataacaagtaatggtttatttatttaattctatatttaattgaaaagaggtttcctttcaaaacgtagaaaatgaaatatcagtagtgcaaataccaagcttgattgtgtgaagacaaaacaaaatattgacaacacaaagcattatccgtttgaattttaatttatgattttaaaatatattttttagtttttattttattttaaattttatataattaaaattattatttagactaacaaaaaattgacacatagtattttatttgggcttaacgaatctgttttaaaaaattaatggacttaaagaaaacgtaatctaagaaattattactactaatttttgaggttggggagtaaacttcattaaccctaagtttttggggactattatgtcctttctttttttagtgcaatatatatgagcttaatgtaagtaaatagtcctatttctttaatgtctatcttttaaaataataaaacaaatatccttttttttatttttaatacctaaaatatcattc

SEQ ID NO: 113970 - DNA, 1724 bp, Cannabis sativa
  modified_base (1662)..(1667): a, c, t, g, unknown or other
atggtccagaccctaaatgttatgttgagggcaattaatgatggcgtaagagacgactaaggtacagagatccctgctgctgtagctttgaacttgattccgctattgtaccatataccacccaggccaccgacacggaaaagaatgtcccgtagagaaaagaatgctttttggtaagcattatattgggcactataaatagttagcacttttttattattattgttatagtaaaatatagaaagcccaatattaaatagtaccaataacaatataatatttgatagtattataaatgctagatggcatttatagtacttagtattgactattgtaagatgtatgttgtttttatcttaaaataatggatcttatattctatacacactagtaatatgagactctctaataacatctctcctcaagatagctcgattataagtaattttttttttggctcactatccgcgaaccacaagtaactcttttgttctagtttttttagatttttagtagttctttttgattcactattttcgaatcacaagtggttcttttagaactattttttggatcattttttagatttttggtgaagtttttttttttttttttcaattttgataccttattataattgtaagatgtatgtgattccaattcaaaactaattaattgttagagcaataattcatacatcttatctattttattttcttcctacatactaacatgtaaaattttcttaataaaaatcaaatttgactcagtctcactcatataatttagttaaaaaccataatctttaaaaaaaaaaataaaaaataccgtttatcacggccttcaatttatttagcttcaatgttattggttccatgaccaaaagaaagaagataaagcacggccctaatgctcccctacagatgacacctcctccaccacaaaatatataatctttgctttgtttacttattatgaaatcgatctatgtatttgacatccacatgatgactatgtataatattaattaagagcatttattaattatgcttcataaagagggaagcaatacaattaaatattaagtttttaattcacaattagacataataaaagctctaatatcgaaccccaaccactcccttcttccacccaacaataataataaaaggaaaatagtcgttgtcgaaataacaaattaaaatccatgcaaaattctttcagaaaacggagaaagcacatgttatgccaccataaagaaagcacaaatattaattaattaaaaatgatatagaagataaatttaaacatattataaagccattaattaattaattagcaatagtcaaaattgtctaaaaagttgcttgacccccaccaataatgaaaaattcggtattatcttgattgtatgtaatgtatgtagactcatcgaatatatatatatatatatatatatatatatatttaatgtgttcatacttcatattgagaaaaatattatgtagattccctaaaggatggactagtagactctacatattttgtatttataagtattttttaatcataattttttaaaatttattattattattattatttacagaatattgtatgttgttatttagaattactgttgttaattccatttttggcatnnnnnnttgacaaaaatattttattattctttgtatatttcggctggcatatattgatatggt

SEQ ID NO: 113971 - DNA, 4239 bp, Cannabis sativa
ataatttaggtttttaaagtaaactgaatattttttaattaatttaatatttttattaggttctttgataatatttatttatttatttgttttttcagaattaacagaatattataatttttaaaattaatttttttatttaaaggggcaaaattttgtattggtcaaagttcaagcggtaaaaatgctaagaacctaataaaatgggcataattatgtaactgttatattttaagaaaaatttgtaacaagccgtatattttaattaaggggcatgatcatgtagtgttgaaaattcagaggacaaaaataataattattctattatttatggtggttttacgctgcacccttcaaaaattggatatagtgatgcacttcttttgtcgttttaatatccaggaagttattattttatttttttacatgacggtgtatattgtggttttttaaaatatcctgcaaaattttgagaaatacagaataatttataatacataaagtagtgttcaaacagtttaattctcacgtgtataaaataaaagaggcacgcgtgcaatatactatttaaactttatttttaacaccttaaattattttaaatttcttaaaagtttacacgatcttttaaataactactatgcacactatgatgtaaaaaaatttaaattaaaattaaaactatttgaatatcaaaaatacaaacgaaatgcattaattcacccattttctagcagtgcaccataaaattttctttttatttatattgatgtcacaaatgttattaagcaggtgataattaataagtaacaatttgattgttgctaaaaagatcattaattggacgttaccttccttcacacacatttttacatcgtattttgagacaacatatcacttgttgacttatggcatggcgtaacggcccagaggaatgaagcaaggtacgagaaaatataagctcagggaatctcaggaatagcatcaatgatcataggaaagataaggcacctatatgtgatgaggcctaacttattgttggctcaaatagctgacctacagaaggtaacaacctgtcttacccaaaaacaaaatggtgaagactctcactcagacaatgacgatcgagggccttttgcagaacatatactggaagtggagctcccaaaatgtttcaagatgccagaattgacacaatatatcgagacgactgatcccagagatcatttgtcaaggtaaacaagtgagtctgagcttctatagctttgggataatgttatcagtgtttccaacaagggacatgtggattccaaatagaagcttaaggtccatcagtgggccaaataacataaaatgtgtcgagcccacgatccattttgccttctgggagaacaatagcaaactcacccaggcgaagtttcgtcaagcctagtcagcattcgaaaggtctatctccgtgtatctggaagaggttgtcagtgtgtattcggaagcctgttatagtatcccatttactgccttgcacaagatcacgaattacttcctaaaatttcggacaaagaataatatcttagtaaaaggagaaattaggtaattggaaatcaagtaattaatatgtcactaattacccttgaatataggacatagtatgaacaactagctcatgataatgcctccacatcagcatgtacaaggtgcctcatgggttatatttcaccagataagtccaaagtcaatgtattatttgtaaataccctattaaagggaaaatgataactagtatgacctttacgacactataaatactcaatgaatccttcatgcaaagggttggaaaatcttgacttatttgctcaagaaaagaatagagtgattatacttattgtaatctcaaatgatttttttagccaacttcataatcagggcggatgtacattagaacttatggtggccttgcccccctagctttctacaaatgaaatatatgtcatatataataataattaacaatcaatattaaataaaacaaattaagttgaaaagtcaaatgtaagtatagtaaaatcaatagaaataaattaagtgaattactaattgtgcatttcaaaacgataaaaataatatttaaatatatataataaaatataatttttcttaatattaataaaatattaattacatttcaaaaagacaatatatatataattagttaaatgaatatgtataagtgtggttctatataaattaacataataatttaaagatacttaaaaaaatatgtatgataattttaattaaatgattcatatatatttatcttaatttataatatttataaaaattttaaattgaatttagaagaataatatattggatcaccaatgaatataattaataccatctacaaataaaaattttgttcaccaaaatttatagatatgaaattttattttgcatgtgtcgctcgttattggccctcctaaatatttaatcctggctccgcccctgttcataataatattaacttgtagactaaggctcattaacactccaaagacgtaaaaactcagagtgtcttcttcatatatttcattcttaattggattttcttgagctcttatatttaataattagttttttgaaaaacctagctagtaaattggtaacaaatagcaccaggtctgcaaggacaggtcaagcttcctcagagagtagtgccaccaccaacacagaacccttaaatgctccatttgtatgacatccaagacttgggtatccattgttggtatttatggtccatattagagttagaaaagcaaaagtgaatttgataaaaataatttttatctaatatgaaccataagcccaaagatctcaatataatatatagattaaatctagactaatgaaaagaagacaatacttcttgtagcctataaagggatcctttctatcttttagtatattacaatcatccaatccaagaactatcattgaagaattcacattgcaattttctaagctagcctcaatactcaagaatagagtgggatattagatcttataggatgaacaaatttatgtattacagtgtattctcaactcatgggatactataattgagatagtgttgaacactatctcacacacaccttgaatggtgtaggtttgtgagatgaggagagagagggagagagtgaggcgtgtagaagagagagaatgggagtgaaaattaattttattttctctcaacttgttactatatttctcatcaggtttttgttgtctatctatttataatactatatatcctatacttagtgtcataaaaaatccttttaatcatttattaaaataaaaaaaatgtctaatttgatttaaattcagaatttaaattcaaatataaatatctaataactgattaacagaaatcagttaaaccttttattttattattatcttttttaattaaatacattatccaataatatattcaatttcacaattaaaagataattaattaatttaatttgaattattttaaccaataaaataatcaaaaaaagttaacatgggcttttatatatcaccctacacatgtgggccatattttaaggtccataattaatttctcaattttgacttaaataagacttattatttattctgccaataaataataattgattaattttcattaaattcttatttcacaagaattaaaataaatattattttctttaaaataatatttttctctctttaatattatttaagaataatattatatttaactaattaatacagttttatctcataaaattaaatagttaaatattattaattgtacaattcataattgtcataaataagcaaaatattaatttcacaaattactattttttccttaagaatttatttcacatagaaattaattctcactcgaaatttgttcatcaaataaaacttttcctgtacagtgttgtatagaggtgactccgaaaccatagacctatatttcgaagatccaataaagacttgattattattgatatcatcaatagaataatttaatttattaattttattattgctccactataaatatagaattgcactctttgacaatatagtccatttatataatcaatatatgtagttcactctccaattattagttcataattagagttggtcaaaattatcattttacccttctaattatctcttgatttctta

SEQ ID NO: 113972 - DNA, 1446 bp, Cannabis sativa
attttttaaaaggtaattttttgatttggacccctaaaatgagtgggccctaggcgcgagcctagcccgcctatgctcagggccggccctggttgtgttatatgtagttacgtacagaataattatttcagtactatatttatttcgcatttaattaattgattaattaaataataaattggtaatattaaaatacgaaatttcaacttggacgaatgacaccatccttgccatgctgaccagggtggattattcctcggaaacaactaatttacagagtaagctggaatatccgaacagggtatatgccaccgtaagaccaacatcaacctcgcaaccagcttgcatacaccggccaggataaatgcggctagaatatccttaaaaatactttccataaatgttcaggcatccaaattacaatcacatccttgatattgtgggataaatttacaccaacaagaaataagtggaaattaaccatcctagtttcccttttagttttatttattttagaaaagtaaacaagttttccgttattttgagaagtctaattgataaaattcttccctataaataatagtggagtcatttactattcaaggatctgaaatcaattgttctagaactcctacattataaaattgtaagctttcgagagagatcaagaacttcttatttttttttttctcacaaataatacaagtagaaaagaattaggttattataccattatcacaggactgaacctttataaatctatgtgtttttatacttaatttttttcaattattgttcttcattctaatagttttaattgactcaacatcgttagttaaaaacaagattaacaatactgaaacagataaaaaaatttactagaacaaccattaaaactacataaatttccaaaagtatataacttaatatatcttaattaacatttctcataaagaaaaaaattgattgtgcagctattcatggaaaacgttatcttaatcctaataactctcataccaaatattatatagtttaattatcaaataattttgcatctatcaaacacacctttgacaaatgagtgaagctttgaaagtattgatttttcaaaaattctagaagcatttatcttcctgagaagttggtccgattaattagaataagaaaatcatgtatatatgtttataatttttcttacatgcacctcatcaccaaaaataaatatatatatatatataaataaatttattattatacatgcacgtatgctactaaacatgtagactaacatttatgttttcttttttttttttttttataatttttcttcttttagtattatattattatttagaattttaaaaactaagctggaatgtcgatcagggccggccctgggcataagcgggctaggcctgtgcttagggcccacctagttcaggggcc

SEQ ID NO: 113973 - DNA, 3992 bp, Cannabis sativa
  modified_base (52)..(56): a, c, t, g, unknown or other
ttttattttgtatttttttttaaatttttatagaaaaattattaaaataatnnnnnaatatcaatttgtagatttatattttttttatagaaaaattattaacataaaagtaaaatatcaatttgtagatttatgttttaataaaatattaaaatttaaagaattaaggagagaaaagaaaaataattttgaaatgattttagaacgttatgttaagggctcatacttctcctatatatgtattagtgtattgatagatactaaattgtaaataccatgagtaacctttattattttttatttttgttaaaaaaaatttcaaataccacatttgaagtttttgtttaaatttattattagcatttcaacaaaaaaataaaaataaataaaaaaaagaactcaatattcagacccttgtttttctcgtctctcgccccctttgccttcttccccaagccatcacctccatatattttcccagacctgagttcaacttctccgtatcaccttctgcgtagactccgactgccttgacacctaatttcaccatagccccccgaactctacactccagaaaaacgcggccaattcccgagtctttgtgccagaaacctgatctccatccaggagcgtggagaatcctgttaagagtgtaaaatcaaggtgagattgtgttgacttaaaagaaaagagatatgaagctaaagataaactgacaaatagtgaagaggcaaaggataatgatgaggaaaataataaaagtactagaagagggaacttaacaacaaggcagaaactccagcttgccgatgtccatctcaaatgcaaactggtggatgtagaaattcttgttggacatataaacaatttacaaatgatatacagacaagacagtatagatgtcctgaggtgatttttcattctaattaagtactcaacttctacggatttgtggtcttttgcttgcattttctttgagctcgcaaccggtgatgttctatttgatcctaacagtggtgataattatgatagagatgtcgtatgtaaagatgtaattcattttttccttaaattgtttcggtgttctatcagtgttgatgttctattacttttgttttctcgatatatttccagtttgcgaaaccccctgcctgcccagaacccataaatgatattttcaaggtcatcttgtttatcgagactcattctcagcgtctccctggcaaccaacctccatcacattatctcggacccatatggccatccccaagtttgatctcataggccatgactgtttcctagttttcattccagctataactaatctcagaggccatgattgtattctatcttcaggtaaggcttttacatcgtattttttctcctgttgacaaaatatggagttggtgcagtgttgtttttcctagaaaaactataacagctagaagatagggtgttactaataaccactcaagtttctaaattatttttttgctttatggcttgttagatccataatttcctcatggagattggactctgagagcaagcttgagaaaacaaaatgaaaactagtactaagtgtgtttggtaagagggtgaagtgggagaaaggagagaaatgtgatgataatagtcaactctagtgtaagtattgtacaactaaaaatggctcccttctttttactacatcctcctaccaagcaacacaaggctgcttttcaattcttctctcatttctcttatagcaaagaaaaaagtacttcccttttctccttcccttttatctttttacatatatggcagttattgtccaaatcatgattgtttgttaaagctgtttttggtttaagttttgtgttagtcaacgtgtgtaggtacgttttcaaaaggttgttggatcatttgcataatctctctatctttattgtgtattgtgttcttgctttttaggttgaaagtgaaaagaaacgtatacaagaaacttaaggatagttataatggaaatgtcgcttagctcaacaacaaagaagctttgttgaatagtcatatggaggaatctagtttcatcttcaaaaggagttcgatgattgctactgtgattgtattataagttacaatattcatttctatttcatgaataatgtgatttatgcattcataaattgtaatccatattgataatatttatacaagtacgaattctatagaaaatgtaatcctgttttgtttttgaaatgtagtgtcactactataaatttggcctttagaggcggtttttaaggtctttcagtgtcaattttgacgaaattcgctaccgacgctgatccagacaacgctataggattgaaaacaacttaagctaaaaagtaccgtatgacgtgagttatttcataataatcgacgctatatatactttatgccgtcaattatatacaaataactatatgtattaataactgacgttaaaagcttaaaaattgatgccaaacccgtaataattaatttttttcagtttaaaacctcttattattttagaaatttattttatttaattatatatttgttaatttataataaatattatttaatattaaatatttattttttaaaactaaattaattttatgattagttaatatacataaattaattttatagaagcaattaaaaaaatcacaattatattacacaaatattttaaaattagtctaagtgttaacaagttaataaatttaattacaggttaacataaaaaagggaagaaaaattcttatagcatcaatcgtccaagccttcgtgaatcaccgccagcaatcgttctatatccatgattgatgtactcttgacttgctaaaccttggatactaaaccatatctaagcgactgtaatgactaaatcgtcaagttctaatattatcgagcataaaacgtgaaaaagtcaaaaatcataagtgacatgtacggcacactcagaatacaataaaatctccataatttagaaattataacaaaaataactatttcttacattaggacttattttgtactaatgcacatatataaccaaaaaatgtaattgaaacactaattaataagctactaatttttatgcctacatatgctctcattacaacataatttgaccaacataatatatagattatttttattagttatataatcagtgtctcaattattgtgtgctgtatatttttactcatattctcttttattttattttttttaattagaactggtttttgagttagtgtgtattatttacttttacttattttgttgtaaaatggattctttttttatttaggaatttttttgcaaaaatatacataagatataaaataattacaaaaataacttaacaaatgtcaattacaaaaatattatcacttttatattatataatttgagatattttttgattatctctaaaacttacatgtatacattttaatgattaattaattatttaggttatattaatatatttgaataactttcaagtttatttttctaattaaataatgagttgtcatctagtaaactaccattttagtaaactgcttttaaaaaattatatgttttttaaatataaattaatatatacattttgattaattaagtaaagattagagttacaaataacttttaaatcattactaataagacatatttttttacaccacttagttatgattttgataagataccaattggttacttttgataaaatcatcaatttaaaataaaaagatgatgattagaccaaatatcttataatcagatatgcatatactcaaatatgccaaataaacttattagtttattttgacatattgaaacaaatttttattctttgtttatattttttgtatgtagcataccatcgtatatgctaataaatctattagtttattttggcatattgaaacaaatttttatttttcttttcgtatattggaacgacaatt

SEQ ID NO: 113974 - DNA, 7803 bp, Cannabis sativa
  modified_base (2174)..(2178): a, c, t, g, unknown or other
  modified_base (6635)..(6641): a, c, t, g, unknown or other
aaaaaaaagtatagtttttttatagtgtaaatttttggtataataataaaattttttaattatttaagcatataaattcaaatttccctttaggatatattgtaaatgtcactttattggttcttaaaaacacctacttttacctaaaaaaacacctgctctttttttcttttttcttttttttttttcaattattgaatcatattttatgataaagaattaataggggaagggaccattagtaaacaatatcttaaaataatgattttgatttcataacattttatttcctttcatttctcccattaatttattctgttaacgattacgctttagtaaatgtcccattagtagtttcttctaaagtacctctattagtataattaggtatcgaaattttaataatttatgtgacatttaattagaggtaataaaatagaaaagaaattttttttattatattttattgtttaattgtattttaaagtattaaaatatcatttcaatagaataattttttctatcattttggtgaaataaatattattcaaatgcaagataaaaagaatttattaattttttgtgcattttaaatttaatgctattctattcacattcttattcctattcatatgctttcatttctctcaactaaattaaagtaataacttttaggaacactactaaaaaattagactatctcaacagttccgtgtattactgtctagattggtgtctatcacaattgagattgatgaatttttttaaaaaaaaaataaaaaagtttagaaccaatctcggtggttcccgtgtgaaccgtcgagatagggtaattagtatcaggaagagtcgaccctagcaaaattgcccctgtctgtttgtccccgttcccaggtgcaccagccaccacgaaccaaccacactgttcgttcgtttccattcccagtcgcacgagacactctgtccagctagccatcgtcctcccgctccttcttctttttcttctccccactctagccccctcaaaccaacactaggagcagacaatgctcctccttaggcccatcccgtcctgtgtcgaccgatctcctcctccggccagcatgttctcattttgaaaacaaaaataatagtagcaagtgagttgttcattgatatttttcaataatcttatcttttttatttgaaacagtgagtaaaatttaaaatgagtttgtatttgaatgttataataataggttcaaaattatttgtgtgatcttcctacaacattaaagaaacttgagaattattgaagagcttcatttgtgtatgatttcatttttattttaaattttgtttaaaatgttagtttaattcaaataatttttatgtcaattaatttttcggtcaatagttatatttagaaagtgaactatgttattttgatgtaacttgaattgaaaattttagttttgtgatatgaaaaagtaggaaaaattatgtataatttttttaagaagaaaggtttcaactaccaacaccaagaacaacaagtactctaaaatcgtgggcgcgaggattcattagaaaatagcatcagcgatcacatagctttgaatacaacttggattaccaggccaccaaaccttactatcagcagcaggagatagagcaagtttgcttagaactattttattttattttttaaagggataattgtgacataagtcatcaaaaagtttaattcaatacagataagttcttaatcttgaaaaatagtaacaaaagtactcaagttcttaatttttgcactttctttatagcatctccaaaggagatgcaaataagtgatgcaaatgtaaaatacagtttagtactttatcaaaattctactcgaatagtgtgccaaattatgatgcaaatatctcacataagagcatctctaatggagagctataaaagtggtgtattgcaattttttggaatattttattaaaacttaactccaattgtgatgtaaaatgtgtgccaaatttggctcaagctaaaaatagtgccaaatttagcacaaaagataacatgggtcaaattttagcccacaataaatactatattttttaattacctcttagtcactaattaatactatttattgactttgaataagatatatttataagatattaaaatannnnnaataaaattaattattttatatattttgaataattaatgtaatattgacttttataactaatttacaccttgtgcattggaacacaaatacaaaaaagagccaaatatagttttatggtatatcttagtttaaatttaacccaaaatatacaccatctattggtgatggtcttacagaatgagatccaaatttggatcacaatatagcatgatgtaaaatttacatcacaataaatgatttgcttttatatttactattatgtcatttttaatattttattattaatatttagttagaatgttaatttacattaattgtttttttaattgtaattattttattattaaattttatatttatctttgtattattattatcattttatatttttaataaattattagatgagcattaaataacatattaaattttacatcaagatttagaattatgcattgaatcataatattaaaagttaatgcaaaaatatcacaaaactatattttgtgccaactatagatcaattttttgcatttcctattggagatggtcttagtcctcaattcaactgatttgtttcatcctaatagtgccacatgttaatatcttattggtccaactcataattttaatttaaaaaaaattaaaattaaataaaaaaccaaacaaattatcttaaaaatcaattaatattttttatcttcttttttgctgttttttattatcttttttccttttattctttttttctttataccagatgattttttttcttttagatttttccctacaaaattttttcttcattgttcctcatctcatttgtgagatatttttcatctaattacactactacgacatacgaagcctcaaatctgagttcaaactcttcttttccttcccaaatttgagttttaagccccgaatttcaaactccgtttgagaggctcccaaattcaacactcaaacaactaccctctattttctatcccaaaatacaataaaaatcaataataactcaaatctatagtcaagaatcaattgcccagccaaaaaactccatattctatcaagaaatgtgaagaacttagatctatagcaaaagaagagtgcgatctccatgcctagactcctccttcatcgtcatccatctcgaccctctttgttgtccaaacttgtagcaaatgaagttttttttccttagtttcgtggaaacagatagacatatatgatcttggtggtgatagtttgagtatgttgtagagagaaagaaaagatcgatgtggatatggtggtttcagattattggggtggagggtttttggtgggggaggtttctggcagagagtaagatagagagaaaaaaacgagatgacgaagaagaaaaatgaaaaaaagaaaataataataattattattattaatatttttaaatactaaaaaaaattaaatactttttaattaaaattatgagttggatcaataagatatcaacacgtggcactattaagatgaattaacaaatcagttaaaatgaggactaacataattacaaaaattaagaatttgagtacttttgtcgctatttttcgaggttagatatttatttatatgaactttttgggaacttatgcgcaattatttcttttaaaaaaaaaaaaaaaactaaaatatcattgttggaatttgaaccaactagcaactatgtgtaagataaaaaatgtaaaatgctattgcataagaattactttaatataattatgtattgttttacattttttttttttgaacaagaaaggatctttattcaaaaactaacaaagccaaacaaagtacaaaaccagaaacaaaatcagcagaaaaagaatcacaacactaccagctttctattacattaattatatgattatctaaagtctccttcttcataatgttgcagcttaaaaatctttgtttaactgccaatttgatttctctgcttaaggccccagccgccttgcaattgagctcgaaaatgcacccattacggtttttccaaactgaatacattgtagctaaaactacagcattcagaattctgtccctcagcttgttcgaaggcctggacaaccatgacttaatgttgctcggccaacagaagacaccacacaaggacatgacttcctgtatgactctctgcgtgtagcattaggaggtaaaaacatggctatgtgtttccatcacacatcacagtacatcagacagggcaaacttcagtaggaatagacatgattctgctgattttatctctcgttaacagatgttcattcataattttccaacctataaatctgtgttttggcaagatcaatatattccatatattcctcgcataggcagcactctgctcttggataaatgagacataaaacagtttagattggaatttacctttcctctccgccatcttaacattagcttcaccaataaccgatcgaagacgaagaagtttcttgtaataccagctggcatcttgtttaaattcagcctcccaaatgctttgacccttcaagtatatggcatttatccacctaacccataagttgtcttatttgctagatatggcccatagatacttggcattgttttacattttattatgtctaattctataatttttattgaaattttgaagtctccacttaatataaaaatatataattgccctatcacaatattatttctagcttaaaaccccaaacttaactctttctatttatcttattcttatacttagagcgacgttaccccttcccttctcatcttcctcctcacttcatctccacttggagcagactaacgtcggtgctaacccctccctcctcttcctcctccttcttttttgtcgtcttcttcttcttctttgttttcttcttctccatacacttatatatcactttatatgtacttatatacactgtttgttttaaatactttataaaaaaaaaataaaaaaaaaagcatgagagttttcatattacaatccaaaatccaaccctgaatttgaaattacaaattcattactaaaccagacgaattcagtacacactcacacatgaaaaccctaacttggtaaaaacccatctaatgttcagtcttatactgagagtttggtaagctagtaatctcgcccatctacttggaaagttgggtaattggacaaagatgtatagttggtgaggtaccctttcccaatcttattgagccagttaacctagttagatacttaacaatcctagtgagacacttaacctatcaaggtgcttaatatggcaaggtacctaaaattggcagtgtgaaaattaagtgttggcgcaacatgcctaagttgtatgttagtgaaccaaattaaaaaaggagaatttttatttatattgtttatttttgcaaattatagtcgcaccacgaaagatttgaactaatatttttttgtgcagtgctgccgatatgatgaacacccttaaattgtatattatatatttgaataaataaaatatattaaaaataaattaaagaaagtgagctttttgtgatgaattttagaaaagctaattgatgtgatttatattgaaaaatggaatagaattttttttaaaaaaaataatctaattaacatttcatcgaatccctgtgtattacgcattatattatatacttcattttgaaatcgtaagattttattaaatctattattaatgtttgttgacgctgaaaaatggccaacactaactcactagattggcgagatgaataatgtaagtaataatttagagagacacacaaaatttatagtagttcactccccatatcgcagacaatggagataagtctactttgaatttttatttctcacgagatggtaattacagaaaaaggctaagtatttaagctctagtttctatagagagatactctaaacttgtggaaagttttctaaatatgaaaaatgagctaagggagctcttattttatgggtgaatgaaacccataaaaatagggagaaaatatagattagatatttttgaccgtagatgatgatctaacggttaaaattagcttctaatggtgatagtcatttttcgaagcccagcgagagccgctgcgggtaacctagagcttatttttgtaacttccttaggggtgacatttagtgtcgatagcttcataattacgattgaagtgtgagacatgaattaatagatcattaaaatttctatgaaatgcaagttaaatcgcatcaatcgtaataatattgagcgagttacagctgttttactgaaggtagttcatgacttcgcgtccaggttgacatccagcacccaggttaacatcccagggcccaggttgagatatgatgtcaacctggacactaggtaagtgtaaaaacgtccaagggatgtactttaagatgcctaannnnnnntttgacatcacttagtctgttttttgtgttctggcacagctggtcaccaattctcagagatattgttgttctgcagaaatgagagactcaaaactttttatttttgagtgattttcccatgttggaaatgagaaatgcgaagttatgaatctgaattctctgacttcatgaatcttatttattgtaaaaactagaaggacggtcaaaacggaatcagaattagataagcagaacctagcgcaccagactatttgtcaacctaggcactaggtgctcattcttgagctctcaagatctcaatttgatatttccaaagttctcgaacttgaggatgaggtctcttaccctgtttttgaccattctagatttattggtcgaatcaaatttggtatttgagcaatcaaaactaacgcaccaggttgattgtcaacctgggcattaggcctaacacctggtcatcctgggcgttgggtcctatttctaggggctcgggtttgtggttttttccccaagattgcttgaatcttcattatgtttgatgacgaaaaaaatactcgaaacacttttttgagaacttgattagaaacaacccaggttgacaatatgttaacctaggcgttgggtcccagttatggccctttggaagttccgtttggtcttcaaaaatagttgaatcttaattttttctaaaaacaaagaagattcttagaagagttctcaaacgacatcatttgaattggcctaagttgacaaaatgtcaacctaggcatttagttagccccaggtgtcaacctaggcactgggccttgcttttggcactcaagaagtgttgtttcttccccgaatgtacatatttcaccatttttgatgaagacgaagaagatgtaaaagtcagatcatcgatctaatacttggaaggcgcctagattgaaaaattgtcaacctaggcgctacggttgtacaaaaaaatttgtaaaacgcccaaaccgaataacccgcccaaaccaaaccaaaaaaaccgataaaaattacaaagtgaaataacccgaaaaaattataaaccaccaaatctgttaattgggcaggttgaaaataggtccaacccgcccaattaaatcgaataacccgaccaactcgactttagattttttttttacttttt

SEQ ID NO: 113975 - DNA, 2633 bp, Cannabis sativa
ttacattgaaacagagttttatttagggcataaaacccaacaaatatgaacagtagtttcagcacaagaccggcatataggacaagaagaagaaattttcaccttcttggtgacaaggttaatgcatgttggcaaagaatccaagatagcacgccataggaagttctttactttaggagggatctttaattgccaaagcttcctccagaacccactgttgttgggacccgatggactgcctttttgggattgaaggaggtgataagcacttcgaaccgagaataacccagagctctctccacatcaagaccaaaaatttgaagtagcatttgaactcaaaggaataccaaggatcaatttggcatcacgggtatggaagagatcttgaataacatcacggtcccagtagcaagaatggacatcaattagagagctaactgaattattaagaaggcctgaatgaatggaagtgacatactgatttttcgggtcaggcaaccaaggatggctaagtatactagttgattcaccattgccaatggtgcgtacagcacccagtcggacaagtctttgagcatcccaaatactacgccacacaaagcttgggttgttacccaaatcagcagagagaaaatcagttgaaggaaagtacctggctttgaaaaatactttttttttgtatcaattaatcaaaaataccctaatattatatttcattaaaaagtactcacttttgtgagtgggttgctcaatataccctcatcctctacttaagtctagcacataatttacattaactttaggggtataataggaacatcatctataaaagtgtgtatatcttaaagaatatcaaaataaatgtaaaaattaaaacaaataaaataaaatggatatacaatgtaacttctacaaatattttttagtaagtgttgatgcgtaatggtgaaccaacaacaatgttgtttaataaatgacagatgttatataaaagtagtaaataagagtaatggacataacaattttatagtagttcggcccctttcaacaacaatgacttaagtctacgaagacttttattatgacttgttgttcgtgtgcgtttgatctgtagccattttcgattctcctctacaatcttagaaatataatgtttcccacagatggtgtcaaatattatcagaggaatttggacaacaccaaatattgttaatattaaaaaaaaaatattcaatagcagttatgctagtactcccttagaataatgtgaatattcaatagcagttatgctggcacttaaatgtaaaaaaaattcataattgactaagtcaataatgtgaatctaattaattaaaataaattaattattgagacttattatttggtatttatcgtaaatattgtggggatcatgagtccacaaaatttaggctcctaataagtagatttaaaatttaacaaattaatttcttaacttattaattcatcatgactttactatagatacagaatggtactcctaattaaatggaatgttctatacacataatatagatacactgttatttatctataatcataagcataatcataattgaaaattagaagagtttaagaagaaaaactagatgtgggtgtggattctcctcttctcttgagttctcaccttcaaaaccgcagtctaaatgtgttaaaaacaaactctaaaagtctctggccgccctaacaatacttgtgttgtcggggcagtggatcctgtgaaattgcgtcgcgtgctcagatcaatattttagccataacctcttcaatataactcaaaattagacgtttcaagatgtttctaaaagctaggaatgagatctacaactttcacgttgagctcaaggtccaattatgcacttgaattcgtaaaaaaaaaatcttacttatgtgtagttttatcaaatcaagctcgccaacttctactattttctaccaaaatatgctaaaatccctccaaatgactccaaatgcatgattagtcttcaaaatagcctaacaaattaaaattacactaatcaataatttaaaaaataaatttaggaatattgatacataaattggctatatttatataaatttaccatatttataagacaaaatatcgagttatcacacttactctaagaaagacaagcatttctctttctctattgctgctctgaacatttctttaagtttttgtattgtcatattttcatcttcattgtaagtcttatgtttgagtttgatttttcggctttaagttagtcgacgagtttttactgtcaacaatttggcgctatctgtagaaacgacaagctcaagtgacatcgtttcattacttgccactgctcaaagacgcctagatgctctagtcgtcttcaggacatcaatattaattcatctagataacactcagttgatcatctctagaagagagccacctacacccaaagttgaagaagtttgccagaacactcaagtacctctaacaagaggagacgacgactatcgcgaagagacagtggcagaaccagcccttagtcttaggaggggcctaagtatgttgattttttttagcataaggataaagattttttgttcttttttag

SEQ ID NO: 113976 - DNA, 4897 bp, Cannabis sativa
  modified_base (4828)..(4834): a, c, t, g, unknown or other
aaaaaagcctattttttctttttatttattttcaaagtctaaacccgtgtccatatatatgtgtatatatatataatacaaacaattaatccaaacccaaatacttctcattattcattcaattcaactcaaagcaaagaaacccataaaggaaataaccaaagcttaagcaaaaaaatttcttttctttcttaattttttcttacttaccaaacagaataatgatctcttcatggagacgccggagatcttgtaaccgtcgaccgggaaaagagaattacatgattcaaattgacagtaatatggagatggaggaattaaccgtacctggacattttcggtgcccgatttcgctagatttgatgaaagatccggtgactttagtgaccggaattacttacgatcgccagagcatcgagacttggatcgaagcagggaatatcacgtgtccgattactaatcaagagcttaaaaatctcgaacccattcccaatcacgcgattcggaaaatgattcaagattggtgcgtagagaatcggtcacgcggtgttgagagaatcccgacgccgcgtattccgattagctcgcatgaagtgtcggagattctgacgaagatgagtttggcgatcgagagacgagatttgaacggaattagggatttgatcggtaaagtgaagaaatcggcgaaagagagcgaaaggaataagaggtgtttcgttaataacggaacaggaaatatcttatctaaagctttcgaagctttttcatcaaacgacgtcgttttggaggaaatattgtcgtgtttaacattggttttcccattagacgacgaatccaagtgtcgttttataaactcaccttcggctttgaattgtatggtgagatttttggagtctggtgacttggcgggaagaagaaactctgttatgttgatgaaacaacttgtttcatcaacttctgatcatcgctctattggagcggtgatcgagataaatggggttttggaggctttggttaagcttgttaaggagccaatttgtcctacagtgacaaaatcgatcttgattattgtttatcgaatgttgattggttctttcgatgagaaaattggcgaaaagtttgttgaattagggttagttgagttactaatcgaaatgcttgtggagggagatagaagtgtgtgtgaaaaggctttgggagttctcgatcgcctttgtggaagtagggtagggagagtggctgcgcgtggccactctcttactattccagttttggttaagaagattcttcgagtttctgattctgcaactgagttttcgattaatatgctttggaagttattaaccatgattaagaaggatagtaatgagaatgatattaattatgaagacgagaagagtgtcattatcgaaactcttcaagtcggggcttttcaaaagcttttgttgctcttacaagtgggatgtggagaaaagttgaaggagaagactagtgatttgttgaagcttttgaatcttcatagaggaaggcttgagtgcattgagactaccgattttaagcaaattaaaagatctttttgaattaattaatatcaaatcatcattattattattattgttatactattgatcaccctttgattgggattaattaagttagttaattaattagctcaatctagaagagagatgatggaaagaaaaaaaaaataaggggggttgagtttttgattcatttttatgttatttaaattgtacaaaatacaatcaaagttacgttcataaaataatattaatatgacacaatatatagttcttgtatacagatcaattttttttttttgaagtgtttattttatttgatggtgatttgtgtgttaattatatatagtatgttaatttttatgtataagttaatttattaattatcttttaattaattatagtttgttgattatttagatatagtataaaatatatcgaagtggataataatttttatcagtgattaattgttgttgttacataaaattgaagaaaaataatttcacaacaaaactgatccatctgcaattaataactttgttttcattgaaatttaaagataatttaattatcttatatcctatatattattttgcatatcaattattaagcttaattagtttcattttctctcatgatttattatgagacttttttttaggaaatgatgagatgtttttttaagactataattataaaaaagtattaaaccaattgatattcttgtattatatatttccgtttaaacctaatataaatttttagaaccaaataaagataaaattaaaatcaggcaattacattatattaagaattataagattttatcttaaaatcatgttaataataataagtatgtagactatatttttatatataactcaatattatatcatttattttatgtgagacattatcccacaataacatatttttataatatatcaagattagcttaaattttttaataagaactatagaattagatatataataaaattaaatatatttaattatgttaaaagtgatttttataaaatacattttatatagtttcatcttacatacataattgttaggtagttcaaattccaataataattaatattttagttttacttttttgaaaaatttaaaaattaaggtataaagttttgaacttgtataacccttttaaattttaaaaatcctctaccaccacactaactaactctacctactattattaatttggctagaaaaatatttatataaaaggttaaaaagaaattatttagattggtcctaataatgatgcttttaattaagtatataagatatgacattttgtctaattaagtagtaattttttgtcattattagtagctagttttgagtattaatttaagtacatattaatatgtatatataaaaaataaataataatcatgcataaggatcaatcaacattaattgtttgaattccaagttggcttttattcttcaagggctggtcggatctgacgaagaaattaattaagaaaatatagatgaaaacagaaaagttgactataagcctcatgaattgactacttatatatctatatcttaatactactaaaatattaaatttattctgctatagtctatatatatttatacttatataacgtacgtacgattatggtacgtaaacttatagctaaatgtgatttttgtagctttatgaacatatttatctcttaaatgacttaattattatgtatcatctaatccttcaggttttagaaattataactaagtgattttatatataaattttaaatatattatttatacatgagttttatgtggttaaacctttttaattattattttgtttgcacttaacttcttaagtttaaattttagaggtaaaacactcgaattgtgttagtaaattaaatgtgttatctattttttacagttaactactaacatggactgattatgtatacacgtgacacgtttatattggtacacctaatgttggataaatctccatactaactgtcacataaaaaaataccttaaacaagttacaaggaaaataaagtaagattttttacaaggctcaacagaccattataattctttgagtagtcggttctgtttcacagataaaatcttttagttctctacaatacaagaaaataaataacaatattcaagactccaacaaactatcaacaactcaaggaaaacaaacaacagttttataactgtttctcaaccaactttttctcagctcaacacaacatcaacaacaatataaaaggagtatcaacctgcccattttcagagtgtgttcggtccaaccctaaagtgttgctgaagaaataattctcagttcatgagaagaaaaacagagagagttagagatattagtgttgtattatcaaagccaaaaatagagagaaaagagagaaaagcttgagattacctgctgacttttgtcactaggaatctccaacaccttgtaaccgattttgacatggatagtgaagaatcaaacgtctttgaaggaagcttgacggagatgtacccttgattttgaggggaactctgaaatcaatctctttgtcttattgctcttataattctgcctttattttttgagttacactctatcacaaccaacaaagatcattttagatttttgttgttactgttttgtggttgtttatttctatgtgtaggttcggtcatagaaaactcttgtagagcttgaagaagaagaatagaagggctgaaggaggaataaaaaaaccaacagtaggttcagctttttgagagctcttacagagcttgaagaggaagccaacaaagagaaagaaggaaggaaaaatgggggactacgctgctgttcgaaggcttgaaggaggaacaagttttggttggtagggtttcaagcaagaagaagagaagaagaaggaggagttcgactgctagggttagatgaagtagtgatttgtgttgctaggggtttgcagctgaaaagagaagttttatactgccaaaaacggcagtgttttgagggaaaagtctcttgatccacacaagatggaaatgtcaagtttgacccttggtttttgtgactttggggtattggtgtagggacatttcgggtaatgcttaatttcctacccctaatattattatttaaaaattataaaaaattatttcaaaacttataatattttttattttttaaaatatatattttttttttataatgttatataattttaaaataaattttgaannnnnnntattaggtgtaccaatataaacatgtcatgtgtacacgagtgtacacataaacagtctatggt

SEQ ID NO: 113977 - DNA, 4222 bp, Cannabis sativa
  modified_base (1416)..(1426): a, c, t, g, unknown or other
  modified_base (2489)..(2492): a, c, t, g, unknown or other
aaaataatatagggtgattatacagtacacccctttaaaagggatgtactgatgcaccctctacttatttcggcatccaaaaaaaatttttagtcttagttttttttcatattcgtgtacgttatagctatttaagatatcctacaaaattttgagaaattcagaaaaatttttaatatagaaagtaatattcaaacagtttattttacatgcgtataaaataaaatagtcacacgtgcaacacactgtttgaaccatgttttcgacgtgttaaattttttagaattttttaaaattttggaggatgtcttaaataactataatgtacattactataaaaaaaaattgactaaaaattatttacgatactaaaacacatagagatgcatcggtacattataaaatttgccaataatatatatctatgtatataaatgaataaaaagaaaaaaattcagcaaaaagaaaataaaaaagaaagacgctcaaacaaaaaaaaaagcaaaacaaaaaaaagtgtttagattttagtgaaaactttatatttacaaaaaagaaaaacaaaatggaattaatgaagctatttgttggatgcaggtggtgcacgcgcctgggtgaattgattttgttgaccaattggcaattggtcggcattcataatggagaggacggtactttgtgttgctatatcacattaacgttataattgtaattaatttacctataacgtatattaatgatgaaaaaaaaataatctcttatttttttttcatatttatgtaaatacccctaaaatttagagataattatacaaaatactaattttgtacatttttttttatatatttacgttcaaagatatatattttttaatatttttacagagttctatcaaaataatataaaagcaacaaaaaaattacataagtataatagaaaagtaaacatttaaataaaaacaaaaaataacatacagataacaaaaagttaataataagcaacaagagtaaaacataaaactatattaaaagaccaaattttctgtaaaaaatgatttttacactatatactgaaatttcaaacttttttttactgtggggtggaattttttttttcaaaaatactgtgtttttgtcttcaaaaatacagtgtaagtttcatattgtgtactgtgttaagtttttattgctgttttacggttatttgttagttgttgtactgttgtttttaattaaattgtttagttgttttacggttattttataaaaaaacagtatttttgtaaaaaattctgtcccacaataaaattataaactttgacccaaaatctagtatttttataaaaatccaaaaaaaaaaaaaaacataaaaataataaaaatatttaaaattttgtacaaccgtatttttataatnnnnnnnnnnntttttgtgtatttgtgaaataactcttaaaatttatttaactaaagaaatacatacaatttattagtactaatcatacaaatattaattctaacaaaaacatatacgtattcccaaaattcgatattatttatccatgtactgaataaaataaaataaaatgtttcacacatattattgtgtatcgaatatatctttctgtcctatataaattataagttgacaaatttaaaactaaatgaaaagttgacaggtacaccgtacacagtacactactcaaatttctcttctatgactatagctagctatcagtatcatacaacattgtagttggtctataaataatgtatattatgttttgacaaattaataccaaagattaataaacaaataatttttgcaccatttcccttgttttttccatgtctgaatatttacatatatctttatatatataagtgtgtatacataaataaatagaagttggtattggttgttcaaattttgtccaaaaaaataaaaataaataagttggttgattaaagaccaaataagagctataaaaaagtagttagtaatatataagatataatataaggcaggaattttctgatagaatcaatggatcgatcttcacaatcaaaatatatattggattaaattatagaatcaatggatccatctttataatacatattggattaatttaacaatattaattatagaagataaaaagtacttaacaatgaattcctaagattatgataattaagacttgaatgaggaacaacatgacaaaaacttagcactaactaattttaattcttctttcagaaaaaaaaaaaaaaaaaacttattttaattctaataagaatgccattgattaatatgcttaatgaatttaatatgtatataagactccatattccttgggggattatatttatagggacctataatttatatttgagaaatgttagagggtattagtggtgtctagcattctcttatgtgtcaatatcgctattagtctaactaaatatcggatcccatataatttaatnnnntaatttttaaggagtatcgctagccaatcacaacgcgaaatgttgcaaaagtgctagacactactggtgcctaataacaatgctctttatatttatatatattattcatttataacatataacgatgatgggatttgcgatgattgataaagagcatgcatgcatcacatggaaagaaaaataattgaattgcatatttattatgttatcttcttatgcatagcatgtgcatgcatttatgggctggtttcaaatatttattattattataattttttagggaaaaatatttattttcacagggacacaatcctcgatggtggtaaaggatatagattttgagttagtaaaatttacaactcatttcttgctcttttatctaatgttgataattgtaaataatttggagacactaaagttagcttagtggtgagcgatggatggaaaaaaggaagagttcatgagttcaaatttgatacatttaacctattaaactattaattaattataaaataccattatactacactaaaaaaaatataaatttatcatttgataagtctttcgtaataacttgttgacaagaaatcacctattgataagaggtatatctatttcctctgctcttcgccgagtgtgtgatgttagtgataactgccatgctcatttttctgagtgcccactttttaagcaacttttgcatgtaattaagttttagcttagtattagtaatgctatttggtcgaagtcttgtccgaatttactggtgtagttgaatatattaaatgagatcgtaacctgctttataatgttgtgtttggactacttatgcggcaacaatttattactttatttggttaaattgaaatacttgtatttttgagcaaaaaagtattgacgatctcttatgtgaataatttaattagagcagcacttaaagccatattacttcttattgataggagaaaaattaagagatcaacaaatttttattttgtttgtaatatgtaagtgaatcgttctgttgttgatttatagattgctctattttaattaataaaattctcaccttaaataaaaaaaaaaaatatatctattattatttaaggagaagtggaatgtagatatttaatttaaatttttggaattttatataaatattagtttgtatataaaaaaatatatataaacatattacttcattatatggcacttcatgaattatcaattaattatgttggatcaacggaatttaaaatttgatttacgccaaatataaaataattaaaatccgatctcacacataaattattaaataaatttaactatattcaggactcataatctataaatatacgtattatacacatttataattgggtatgttgatgcatattaattatatagatcaatttacgtatttactgaaaattattttttcttaagttatatttgacatgatatttcattactcaaataatagtaggacactgagtactaagatgatatcttttaacaattctataaatatatatatatatatttatatatatagggacacgattttgtcccgttattgtattttcacaaaaatatgtattctgtaatgtacggcagcagggtctcaggtacgtaataatgggtctcagggtatgttactattttttaaccttaattactcctagatcaaccccagccctcagatgaaataactctcccatctaacggct

SEQ ID NO: 113978 - DNA, 2765 bp, Cannabis sativa
taattttaataatgcaagtaaacaaatgtaagagaatgattaccttactattgattcccattacttattagtaaacatgccattattgtacttttactaatataacgatgattaaaattaattaataaatacacctaattatttaaaaaaaatataaatttaaataatttttaaaaattactctttaatatttttttaaaatttttctcacattattttatgttaattttaatatttattttaatttcatttttataattttatctaactcatgtatatatattttttatttttttaaaataaaatttcatataattttttattttaattttttctcataatatttaaaatataatttatttttatgtgataggtatattttttaagaatatgaattagaagaaaaaagttaaaaaaaaaacttaatacaattaaagatataaattttataaaataaaaattattaaaacggggtgtctttagaaatttttgaggtgtaaataaaattttcctaacgcaaattttatttgcactcttaaaatttttagacgccatattttgataattatatctttttttttacgtgacttatatctttaattgtattaagttcttttaacttttttttctaatctatatttttgaaaaatatacctaccgaataaaaataaattatcttttaaatattatgacaaaaaaattaaaataaaaagtacataaaattttccttgaaaaaataataaaaaactatatacatataatatagaaaaaattatgacaataaaatcaaaataagtattaaattagcataaaaacaatatgaggaaacaatattaaaaaaacattaaaaataatttttaaaaattatttaagtttttttttttttttttaaatgaggtgcaaatagaacttccctcgagaaaatgagagtggtagttcttttttgtacctcatataattataagtgcacataactattaaaaataattagaataattttaaaaatttgctcttattattttttttcacattttttttattttaatttcaatactattataattttatttttatatatatatttttagaaaaattatatatgaatttttattttaattataatatataaaaaataattatttttatttgatacatatatttttttttacaaatattaaaagaaaaaaataaaaaaaaataaaaaaactattatagattaaaggtatttattttatataaaataaacaccatgaaaataaagtgttttataaaaatttggagtacaaataaaatctgcctttaattatcttccatggatgtccaaatattatatccaagcctcattaggaaaattaaatttgatcataaattcgcctatgtttggttggaaagaaataaaaaaaatgtatatctcttatatgttgtttggtattagactgcatataaaatacggtttgagattctttatttatagtgtaggtacaatttaaattttcgccacattatgtattgttttttaaatttaatgtttacagttcaaatcgtaccgcattatatattataaatataataatttttacaatataattttttcttcatatctaaacacaactcggatatttacaaaatctaaatcatataattaaagttaaaaagattattcatataaattattctcacttttaatttattcttattaatattaacatattattattaatatataaaatatataatatatattatataatattttagaaataattcaatccaataacttgattaaagcaagttattcagtataattatttacttactaaattatcaattatattttaatataaaaatgaaaaacgaaaagaagattgttttttttaacaaaataataaataccaatcatgagtaaaattctatgtatacctaattcattaagtattagacaagacatattttacagacattattaaacttttgagagtacttgagaatgttcgagtaccttatatatatttataaataattatatataaaagatatagtaaataaataattatgcaatattaataataaaaaagcacatataattttttttttaaatgattgatcaatatatatagtgtaaattacacgagatatatatagattattattttttttataatgtaaatgttattttgaatttttttttttttgtaattttgagaattattattagaaaacaaggtggcaagaattcaaataaggttgaaatttgatctgcatatatacattaactggtggttaaaataaactcatgttttttttaaaaaaaaactcaggttgatgtggacaaggggtattactacagtaatgatatataataatgtataatgttattaataattattaagctgattgcctatatatatatatatatatatatattgtgggaataatattaattattcacctcttcctagtgtagtgagacacttaaacttagacctcatgtgacaccacttgctataacccccctataatttgtttttgtatgtttatatagttaatggtttaatttagactgtacttcgatctgtttcgataataaggaggacatttcttttttaatttaattattttttatattaatatatatttagaaattatattagagtatgagtgtatatatatattaataaagttttattttaaaattaattagcaatgagaaaaatataatttatacatttatatatactaggtgattgttacgtgccaagccacgt

SEQ ID NO: 113979 - DNA, 1854 bp, Cannabis sativa
  modified_base (1787)..(1818): a, c, t, g, unknown or other
ttccaaattaaactaagcagtctttacattggacccatccttcgaaacgtagaatcagcacgtggtcttccgccaacattttgactgtcagcactttcttacctcggagggtgtctgtagtttttgtcattattcttatattggctatcattgtggttattattttcattggcaagttgattaattttcatgcctttgatgctagttttcgcctcgggcttgactttcagcttcgtattcatcatacccattagggagttgcgctagctaaaaaccttaggttcatctcgtcttaaccttgatcgaccttgttattggcgggcgttgtttctattttggtcctatgcatggattcatcgatttccttagtacgagaccacgtgcccccgagatccttcggtgcattaggcgggagctacctctctcatgcctttcgacctaggttagaatttttctagtcattctgtctaaggtaatgacctggttggacttgctcgtcaactagtatgagagggttaatattttgaggtctttggttggtaggtccatttcctcgagcaagttatctttaattggtgagccattcctcaagaccatgggtaggtccatcccttggaacatagggctcttttgtctctattattgtttcccctaggtggatgaacatcgattctttgcccctcaatctatcgagaaaactatttgatcaaataagcagctttctagttgagggagaatcatctcaagtatttttatatactccctagagctagtaatctcataaatatctacaatattgattgggctaagttctcaagtttttgtccagtatgcattgctgctatattggttcggaataccataatatgagttgctgctagtaacttaaatgtgaaatttaagataccaactatcaaacctatgggtaataagattaacacaattttaaatgaaaaaattatactggctactagaaaatttaaccaggacatttcgatcagggttgaggacggttggggaccacctataaaaatgatcaatcttaccttagggagccccttcacgagtatggacagcttctcgagggacggtggctttaataaaagcagcacaagcctctttgtcatgtttttcttcctcgagaggaaccttcactgacgaccatgtggaatatttttgctcctttatgtccatggtggactaatctttgccaagagaaccactagccacttggtttggctcatgaagaagaaatcttgaggccttcatcccaaatgccaaattaaccaaaatttgataataattcgatacaatttcagatgtaatgggttttaacatcatctctgtcagaggaaaaatgagtgttaagataaaaataagcacaagtgaaatcatcataaaataaacaggaaaaatggagtatgaagcttacaaggcttttgaaaggacatatgagcacaagggtgaagccctgttgtctaaaagaattgatccttgaattctttcttattagggagatcaacaataatcctgtgatcccctgtacaagttctgaggtagaagaaaccttcagaataattcttcctcaccggacttgccatgagggtatacatgcaggtgatttcatatggctcgggaccttttcatcccagcatatggtatgaagaccttaaagaggcaagaatcctataactatttggatttaattggagtggagtaattcctacataattgcaataatctttaaagtaactcttcggaggaaggatatgttgggttttatgccnnnnnnnnnnnnnnnnnnnnnnnnnnnnnnnntcaatttagaagtgaattatgattacatgtatgtta

SEQ ID NO: 113980 - DNA, 4437 bp, Cannabis sativa
  modified_base (50)..(53): a, c, t, g, unknown or other
tttgtgtttgcttactcatgcttcttgtttgcactcaacatgtgcgagannnntatcgtgcctaacctttgaacttgtttgcctgtaggtgcgtttaggctgacttgctcgctgggtgtgctagcaagtgccgcacgttccacctatttgggggagtccaaataggtcgcccgtgacaccaaccatattgcatcacctaatcaggtgagcctatacctacgctcggtatccatatatcactgtcgctcgtacataacaaggtacaatgcccgacatattgcataaatcaagtgagcccctatattatgtccatattatcatcacattatcattacctaatcaaacaatcaataatttcagagctagtcatgccatgtggtacattatattttcttacctcaagtcacggttcaggtatgttagctgacctgcttagagaacgatcgataatattgggcccttaaactatcccgctccaagaattatctatcgtgctactaccggagcttagatcactaggttttgggttgaaaattgaaaaaaattgatataggatgagaaggttttgtcgaatggaggagaacaagagtttcgttcgttcgtgtactgttttttgatataacttataatatatatatcaactttctgaacgataactttttataaaaaaaattaatattataataatataataatattaataaaaactttattattaataattatcttatcatttcttagctactaagaaacttctacttctagggtgctacatcaaattccacatactcataattaccctaatactgatactatcaacttatcacaatattctcatcaattctatcaattaaatatgttatgatatttctggcccccgatcgagtctctatggtcgccaatcctgaaaatatttttattccacatatagttcatattacactcacacatgctatataaatctccgtaattcataaattacgcctatttactcacttatagccaatttaaatttttatgttgaagtagatcattaggatcataatcccacttattatctagttaactgataatataaatataaaccttaattattaactattaggcttattcagatattacaccactagttgctatttgacacttgttagagaactgccctccaaatcaaagtcctttgctacaacaaactgttttctaaacatcgcttgtagatccttccaacattggatcaatcccagagataatctcttccaccaatcttccatgaacttgcttaaagttagtgaaaaacaaaatcattttgcatcatcactggccttggcgacttgcatcatgtgattgtacttggacaagttatcctcggatccatcatgccttcgtacaactccatttgtagcattctaaagtgcttcgacagtggtgcatctatgattctcttcacacacggttctgtgtcttcttcttctgagtctgataaagtaccattttttttttatatatcttctctttgagcttcatcaactcttcaactttgctttctaagcattgagttttgtcgcttgaagattcccttctacgaacatgatcattgacgtggtttctcgaatcattctcgcgtggtctagctttctctattcttgctttctcttttttctcatttagtcttcttccaagatcatttgtagagagacttccgctattgccgtctaacaccggatacacctcctcaatatcattgctttgacttttagagttgttgcgatgatgcttgtcctttctagaagcaaacttctggactctggcatcagtcttatccttttatacgatgttgcctctaaaattaatctagtcaccctaccttagagcatggttccttttctttttctgttgaggttagttgatagttttagacttcttttgtcgcttagttgtgggagccttcaatgaagtgtcacccattatccctttccctttatccttgtggagatttgaggttcctaggatccactcttctgggagcattagttgttggaggtgttttcacattacggattcttttgatcaaggttgtcatcaggacctctattcttgtcatctttccgagcagtatctcattgaactggtctcgctgagatagtttatttttagttatttggatgttttgggccatgataaccacgtgatttgtctcgtcaagttttgtcttttcctctaacaacactgttagtggccttgtcctatcgatcatcccctaatgcatattgaggatcatcctttgagttgtattattgatcatctttagcatcatcagaactattctcttctaattcataatcttaataagagcgtctaggtttgcatctttaccgacttgatctttgtgatgacgaatcacctcattctgatcttctttatcccctacattggcattaggatcagtaaaatgaagactagatttgttacgggtgagtaccatgattacttgacataatctctagatggtaccactgctttcttcagctctcaatgaaagtaccaaaatatttactaagatttttggaaaacaaattataaataattagaattgaagaaataaataattaaaagagaaagagtaagaacagcacaaatagtttttacgtggttggggtattaacgagccttagtctacgagttaatgctattatgtaactttaagctagaaaaaccttttgaaatacaatgagcataagttctcaaatttgcctgagcaaatattgcaagagaatgcaatccttaatctaaaggattcgttggatattcatagtatttagagaattacacatagtttttcttttccctctattggggagtttatactgaattatataacttgggttgtctcgtgaaatctagcccttgaaggagagaatatactgactaggtagattagatatggccgaattggtcaagattgtgttctataattgtaggcaattaatcgtgaattaattgcttggtatttgtttagaaagtttctcattttagcttgatacgatcttctatcaagatctaggaacaattattttcttatttgtgtgcaggaataaaaaggaaaagtggactatataatccgatcgtagagctaaggtacgttcctagaagatcctatataatttgggtttagcccaaattatcatttttgggattcactggtggccctttgatggtagcctgaattccacgtgtcccttgccggagacatggataacatatttattattgcaaaagtaattacactaaaatttgaatgcaatacttgaccacaatacattaagtactcacttttatttttacacacttaatgctcacacttaaatatttatacagtctttgtatatgagacacttggttttggaacactcacttaaacacacttgtgcacacaccatttgtgacgtcctaaggtcctatatatagaacatcaatgtcggtttgatcaaccgacttttactttgctagaaaactctagctattacttcaaatgggcttggcccaaaaactagatatagttagtgactattgtttgtaaaaaattttacaaacctattttctagtcatttcttgaagttttaccattttatgggataaatgttgttaaatttaaattactctagtgatggaagaggtagtagtgacttcaatacatgacacacaccatcatttttttaatgtaaaatttgagtaatataaatttgtgttatttttatgattatttaatgtaataaatcattattaagagcatcctcaacagatagataaaacacatttttagtaaaaaatttaagagtaatttatggtgtaaatatttaaatttattcttagttgcaaataaatatctaaatttagtttttgacacgaataatacttaagttatatttctgaaacttcagtagatacctggccgtcaactaccaagtcaatgtctacgtgtcatttttttattggtatatgtaaatgaatttttaaataaaatttaaaatttaataatttagaccaattagtgaatgtcgtgtggccattgacttgacacttaatgacagaagttttagaaatataacttaggtattattactgccaaaaattaaacttaagtatttatctgtaactgggagttaaatttaaatatttacgctaaaaattactccaaatttaaaaaattagattaaaactttctcttttttacttcacttcattttgagctaaaactttagctacattttatttgactttttgactcttttataacaatctctcactacatatacttttgtataatataattatataatattttattataaatatgttatttaaataatatagataaaaaatatataaaaaaagaggcttttttatttttacacttcaaaacagttttttttttgtattttt

SEQ ID NO: 113981 - DNA, 5131 bp, Cannabis sativa
  modified_base (52)..(53): a, c, t, g, unknown or other
  modified_base (5089)..(5102): a, c, t, g, unknown or other
tctgtttctttattgataattgaatggtaaagattacattgaaatagagttnnatttagggcataaagcccaacagtaacttcttatgtccatttgccaaagttattagtatgagtgtacacatgcaactaaaagcacaaaacgttttcaactaagtcttacgagggaaacgcacttgaattctttcctcaaaggctaaacttaagtatgaatctgtagataagatgggtattcggccaaatttcttgaagaaaaaaaatatgcccgaattccttcttataaatctctgtggacttcctataagtttagtccatcgggctgcataattaggtaaaatgttaaactaacaaggaccgaaaattcctaaaagtttaaagcagtcatgggcatggctcctgggactcaaccttgtgaaagaatcaaaagcctaaggaagatgtgtgaaattgcgaaggctcccttttgcgaaaggaaaccatctccgggctaactctaaatgggtggttttttctaagtaagagattaactggtgggaagaagcattacagctctgaggatgaaagggtaaaatcaagaaactatccctggatcgattgagagatggtaaagactagcgggaaggttgaaacactggctattggaactagatgtctcaacaacacagtcagcccctaaaaagtctaccaaaataaatctccagcaagaaatgacaaaacaccctatttaatattacgagtagtccctacggccagggcaaattaatattgtctctgggacttataaagtgtagcaaaaagggggatatatataaaaaaaaaacaaataacaattcaaaaggcctactacaagtcaagattgggtgccaccaaatggattcaggaaccccgcaccaaacaaccgttccaccgtctcctagtataagtcgtaaacaaccctcatgacttgtataaggcgagtctgctgagcgtagttggcctccaatagctagttctccttctttaggccttcaacctaaagcttggtttcattgagctcggctagaagggttttgttagcattgcccacgtcacggttatctgccctgacttgttccagttctgtcaccaacatgccgaccttctgggaaatcctctctgtcagcaaggccacctgttggaatgggccaagatgaaagagtccaagtattaaaacagagggaagaacataacaaaaagaaagaaaataggaagtgaatgtctcgaggccttaccccgactgcctactatttggttgaatgggtcagagcgaggacatccatgctgctggaggaagcccaggtctccacgggtagttttaaggcgttccacaccatttgattcaaaagctcggtggcgaagggggcagcctttcttcccaccttgaaagctagaagcatttcaaaggcttcaatctccacagttggctcagcagggggcaggccatgcatgccatctgaaatctcggccttacggaccgctgagggcacggtgtccctcctccaaacttacagcttcttcgcctccaagtgccccttcagggccttcttcactctcctctccttctgcatgtcgagagggttaaaaggaatggccttccttgggaaagtgaaccccactgaaggtatttttggcatggctgaggagttgtataactgaggttggcctagcctcagcggtggatcgtgatgctgggggtgggcctccgtttcaaaggtggctgcctcaagcctttgcctttttttgtcagaagcactaccacatacctctttggaagaaccagtcctctccattgctgacctgatgtatctgccagacattaaaacaaaagtaaggaaaattcatgcaacataaagctgcaagactctcatccgtctcatgatggagactgtaggcacgatatcaatatccccagggcatgtaattgcagacaatacgcacaattccctcagaactcaacaataagttaacgatgaaggaaacttaccggttgataagagaaaatgaggccgatgattttaatgttgcgtccttgccgacgagatatatgtctgagtatggagaggtgaagacggtcttgcaaggcagaggaaagagcgaaactaaaggactttggtacgacgggtagcgaaatatgtaaagtgcaaaatgactgttgaaagtatttaatgggtacaaggaagaggtgcctcccaggagaagcaaacggttcaactcgtttacccaaaaaaatttgccggttggataagtgggaagctgagaaggtgtatcgcctcccaacggttggctcacatcattgcatgcattgtgaaaagcactcagcaaatggaaagtctgctcaaatcaaatcaccgcagtctttgggcatcccacagaacacgcacacaaaactcaaaagtcagcatttaaagccttgataagaaaatagaagtaattataccttttgaatattgacgctttagttggcggctgatgacgtaatgtaataaagaggttgtcataaatcccacatgctcgaaatctctcaaaataagttactgcaagctcctagaccatggtacgcccataaagctcgagggtaaatgttatccgcattttcataagcacaacacgtggattttaatcaaggaaggataaagagtcattagctgaccagtttcctcaattgacgctccgagaagataaaagcatcaacttcgtgggaaaagttttcgcgaagtggagttccctgactactagtggcatggagggtgtccgtgagctgaagtctccctctattccagcaaccaaagccatatgttcccaagaagagtatggacttccccaaaggggccaaggtattttgagactcactacgacgggctacgccttagtctgtgtaagccttacttatacgtgtcagactatggacctggcaatcaagctttttcaggtacgatgtcagaggttgtctcctatgacaagttatcgtacagagcatgcatgtacttgtgtacctgactaaatgatccaacaggtagggataagggaaattcaaaaagaagaggccctaagatgacacgtgtatgaggcccagcctatacgatctgacgccttaaatgccatatgagaaaagtgtcacctaccaatccaacggttggatttttccccaacgatgattcatctaatgtatcacatgcgaagaagttggcatataaatacccctgaaaaagcacatgagaggaggacattttttcagaggaccttttttcagagggaagactcattcttcaccatcctaagcaaacacgcttttgtaaccctgttatcaactctagaatattcttactaagctttctcttcttcaagaggaacaccgtgggaaggagttatagtccattgtatatctatttgtataaacaattaccggccgatgagcttaataaaatggactcgtggactaaggatagttaatgcctgaaccatgtaaaaatatcttatttattatcttgctatttattctatctttactttcctaagctctaaaaatatttagctactgaaaaactcgataaacacacataattaattatataataatataattactcaagaactattaatccattttaattagggttgctaatctatttactaatcctggaatattacaattcaacatggaatggggattcaaaaacatactcttagtggaaattcttgaagaatagaaataattgtccaaaattgtcaaaatcgatgcccacctggtagttttgagaggaacgggcttagttcacgtcattaagtcaacctcacacaaatgtaaagttgacctggggggaaatgtttacactaagagtagctctgatgatgtggacataaatgtttgacacgtggcaagaaagatgacatctcagagttgtgtagtcccgagtcatagcaggtcgacttgggagggggtccctagccctacgcctaggttgactttgggaactccataatagaagttcagtctttaataacttgaatccaacttactatctttcagtattatgtaccatgaaaacatggagcaacctaatccaaggtccaggagctgaaattacacaaaagtgcaatccaaaagccaacctggtcacctagggtttcacctggcacccaggttgacatcctcaactagtattcaatttctaagaccgtcttagtgtaaaatagtaaaaattaatttggtacatcaattagacataccacgaacatatttgaggcatcagaatcaaaattagagcaagttgatttttgtgagcacttgaggcctcgaggcccttagcaccccagcgcccaggttgacaatctatcaatttaggcaccttccaagtgtccaatcagagatccaaattttgcatcaaatttgtcttcatcaaaaataaggaaatagatcgttctaaaggaaaaacatcaactcctaggcacaaataataggacccagtgccctggttgacacttggggctggccatgcgcctatgttgacattctatctatcaacaacctaggccatttaaaatggagttttttaagaattcttttagcatcttctctgccttcagaaaatattgagattcaactatttatggggaccaaatagaatttttgaatgggaaaatttgggtcgcagggcccaggttgacacctggaattgggcctagcgcccaggttgatatattgtcaacatgggctgttttaaatcaagttcaacaaaaagtgttccatacattttctccatcatcagaaataataaagattcaagcaagctcaagaagaaaaccacaatcctaagccccaagaaacagggcccagcccaggttaacttggtgttgggccctgtggccaggctgacaatcagcctgggacgctgtcattaattactcaaatgtcacatctgatgcgaccattgaatccaaaatggtcaaaaacaaggaagagatcccatcctcaagtttagaagccttaaaagtattaaaatgagatcccgagagctcgggaatggctacttagtgcccaagttgacaaatggtgtaataccctggaattaagnnnnnnnnnnnnnnaaccctaattagataattatgaataattg

SEQ ID NO: 113982 - DNA, 2326 bp, Cannabis sativa
  modified_base (73)..(79): a, c, t, g, unknown or other
acttacaattcaaattaacttttttgaaaaaataattcaaattaaaaaaataataaattttttaattattaannnnnnnttattttttaaaaaataaatatattattaaatatttttataatatgtataaagttttaattgtatacaagcaatcttatcgtaagagtatacaccttatatcataataaccgcatgatctaaaatcaatggtcaaaaaaagttttctaccggtaaggaacttttgctaagtcctactataatcttgccttatatttatatataaaaataatgatatattatatttatattataaatttgatttgagatattaataatcgttcgatcagttaaattataatttaataattatgaagtgaacaaaatgcatcctctaacaaataaaatccattatctaataatatataataatttatttatttggtcattatgttcactaatttggtaacaaaattagactagtctaaacattcacacataataaagtgtattgagccatctgtaaatcttatcctttgttgttggttttttttttttcctaataatttatcctttgattttgatacttatggtccatgatgttgaaagccaccaaacattataatagagtattattattattattttacttagaaaagaaaaaaaacaaaaacatgattcttatgttgatttttttatatgaaaagtttatatatgagtggaaaaaattatatatttctaaaatatcataatataaaatagtgttagttatctgtttttgaccacccaacaaaatttgaagaatcaaactagtcattattatatgtattatgaaaatgaagccactaattaattaggctgctaattataataataatcgccattgttgaaaaatatcaatttaataaggtggtggtaacaatttcaccttaattttcataagttatgattggagaattattaaaaggtaccattggagtttagtatatttctcagtgttatactgttattggtgtagtaaagtgtcgagtcccatatagtttaagaaaatagcttttaatgaatattgctcatcaatcgtggaacgctaactataaaaggtatggacactactaatgctcaataataatgctcttaataaatgtctattcaataacatgaaggattgagttaatgaagtctagaaactttcataagaaattaagaatattggattaagatagatagtgacattagttttaaaaaaataatgataatttgcggtgaaattactcaagttttcgtaagaatagtatataattaattttttttattagtggcaaaattacttaaatttttataagtgtaacaaaaatattgaagcttttcattgacagtaaaactatttgatcgtgcaataataatgctttgtgattagccacttcgccataaatataaaaaactcatttacaatatttatttttatttttatttttccatagcaaattaatatctactaaattagtaggggcggagtgctatattaaaaaatttaaataattttgacgttaatgaaaattttgaacggttacttctcacacacaaaagtttgagtaattttgtcacaaatatttcgtgaaagacgacaacaaacgggatttgtgtaaaaccaaatttaactttgaaacaacagaaaaatgttatttttcaaaacatcatcaaatggaagataagataagagaaaagatttctttttctttctttgatagaaacctaattttgacttttgtaagccttaagttaagacaagaagaattttgttcaaaaaagaaagaaataaaaagattcacttgcacgaatgcaagtggaaaatactattagaaaaaaatttattaatattaataataattaaattcatacaatgattagcttgatacagctcaagtagaacatatatgtgtatgtaaaccctaacactatttgattcggttgaaagtttatgtgtaattattagtaagtgtaattattatttttaatatagtattgtttgacaaaataattaataattacataaaaaaaaataatttttatatagtataattacatttaattctcataggagtatgagaattgaagagtataatcgagggctctcgattatatccagttacacaattactatataattacgtggtcaaacaaatatgcaaaattaaatacaaataattcctttctaatgggatgattacacaacattatttttttgtaatttttttatatttatacgttcaaatatttttatatatatatttttacggtattttataaaatcaacaagaaaactacataa

SEQ ID NO: 113983 - DNA, 4071 bp, Cannabis sativa
caaacaacatccaatctgcacaagtgcggattttgaattttccaatccaatccaatccgcacaattgcggatatccgcattttgcagattaggttggattggatcggctattttattgacactcctataagtcactttgtaatgactcatattctaactttgtatatctttgactagataattagattgttgactaaaagtttctctgcgtcgacgagtgtcatagtgtgattctaatcactctttaaaaaaaaaaaattaggcatgagacgaaaatttctaactcaaacccgactcatttattaatcatgctaaaaactaaaattcaatccaattcctatgatagcgagttttcctaacctaatcatttaactttaattaacacatttatataaagtttataacctcttcacaatttttatgtaatattttataataaatataattgcacatattttaaataggatattattgtgtcattttcaaattgagtgtatctacccaaaattaattcataattcgtttaataaatgggatattcgtgtaaacctgtttattacatgcaaattttaaatcgccttatcatatctatttcattttgctacttcttttctacgggaagcataaagacttcaattatattaataaaaaataataatttttataatctcatgaacccaacgtttatatgcaaaataaattaattaagattattctttcaatatttctatcaaatttattatacaattgttattagaaaaactttcatcgactcattatttattattattttttttcaaaaaagaaaaaaaaaactttcaagttgaacccgctacagatcccgccggtaggcactccctaccttgtaccaaggggtggaggttcgagtaggtacgaaattcagccttctcaaacctgtattaagctcaaatacttatgtataaacatacattttctgattaaataaacaagagaaagaaaatgtgaatggcttgaagtcttatattttatatgcaagtgtgtgactgaacttatagatttgacaacccgatgccaaatatagaggaaaaacacacccaacaggccacacggaaactttcttgattcctcattaaaatttgcaaaacaataagaaccaagtcatcagctttgaatgactaaatcaaagcaagaaccaaaaactaggatatccttggcttagctcactacaactatttctcttagattctctcctttgtacttttcttgctccaccccataaatcaaagtcatttctgatttaattgactttctttcccatttctggtaccactagaatttgataccagattctcaagtaacatcaacatagtatagtagattctctgtcaacttggtactccaaaactgtaattttctaaccctttcctaccataatcaagatagtttgtctccccacccggagactttcttaaagacactttttctcacttaccagagatagaaacaaccatagactttatagaccacatcacatggtatagaaagtgacacatttataccccagaaaattaaatcccatagcattcaaagccacaaaaccaggaaaaagaaaacagaacagtaaaagaaatgtaattatttaacttctttgcaacaaactttcagcgaaaccgtatagaaacctaaaagataccactcaaaacagctgcttataaatataaactatataatattgatacttgtatgtcttgtacagaaatatataaatatgtatacacatatcatatatttaagatttccagaaaacacatccaacctagaaaaattgtgatgatataattttatgcatccaaactacacccaccataatataacaacacaataatatatcttaatcaagtaacttccataaaacccacaaaatatctcggaatataaaataataataataataataataataataataggaaaaaaaaaaaaaaaaaacatgatgaattcaacttcggcaagaaaagcaacgtcttgattcttccaaagggcatcaaagttaagccatgtaataggtcacagcttttagagacaacaaagggtgatgaaatactggccattcaaattatacatataaaaaattaaagcatattttattattcaagacagtgtagcattttgaatcagctactaaattacaagtatcaataacagcataaagtttcacaatagccactaaaattaagaaaaataaaactgtttcagttcaatatctaccattaagagataaaaatcactgtttggttaacaatagaaactaaagtaagaataaacaaataatgtataatgtataattctttagcacaatgtagaatatgaatcaaccaatttttttttgtttgtttttgaaatatgaatcaactgaattattagaatcagctatataacaaaacagaaaaaatacacaatgcccaccaaaagtaaataaataatttcgaatttttattctgtacagctaatggaatattagatccagcatcagcatcaccaataataacttcaaaatcaaataatcaacatcatcgtcacaatcttgtatcaagctatagaaactttaagaaaacacaaggcaattcgttgagaattgcataaataataaacaggaaaaaccaaaagtgatatatgtgattgaataaaaaaaattaccataaaaaagttggacaaggagtcaaagtaacagtttgcactaaattatatcgatccgcctgaaaaagctggtgggcaggaacctcttttactcgaagaatttataactaaaatctttaaaaaaactcataaaccaaattattaaacatagattcatttgaattttgttagatttttgagtcagtattagtcaaattgttaaattaaaaaaaatgagcgaacgctggatgcagaggtttatcgatcgattcatgttctgtgttttcttgttcacaaaaaatttcaggaagagatcgatgaaccgctgcctccagtgacttcacccaaatataaaaattatataataataatcaaaagaagcagtattagctgatcattttctcacaatccaaaacgttaattatctattaattataaataaataaattaaaatgcgtagaccgtccatgtttcaagatccaacgtactttagactcttagagtattatcaatcaggattctcaaaaacacttcagatctaatcaaatttaaataaataaataattacaccctttggttaaatatatatgatgttatatatatagatataaagagaaaaagagaagatagagggaaccagaatggccattcttcatcatctgctgtacttctttctcttactctctctagtttcaaaggtctctgattttgatttgaaagaggcccagagagagagagggagaggaaggtgacgatactccttacggagacacaggcttctgtttttcttttttctttttcttttaattattaatattatttaatgcttttggcctatttaaagagtcgaccgagtatgtgaagttacgatggtaccctctgtgtccgtgcatttaaccatcgaggcctgtgtcttattgttaatgctttgctgtgattcgctccaagtggaggggccgtaccactatgaagtaggaactatgaaccagccgcatgacacacgtacgatgcaaagagtgatacgtgttataactttatttgttcgttttgcaaatgatgagtattttttttttttcaataatatttttctcttttagttaaaagggatattatcggctaaaccactctaatttttaagtttgtaacaggtaattataaaaattgaaattttggcaacataactctctgaaccatagttccatttttctcagcactattctgtccccaggctctgtttaagtgctagtttgacttgcgtggtacaatccacgtcagcaagttatgccaccgtagcattaaataaacccctctctcttgaaaaaaaaatagaaaattaaaatcataacaaaaattaaattaaataatatccctaaaaaataaataaaaaaacaaaaatatacaaaaaaaaaaaaa

SEQ ID NO: 113984 - DNA, 2778 bp, Cannabis sativa
  modified_base (1344)..(1359): a, c, t, g, unknown or other
tgttaccaaacggcaccatagtttataatattttgttatttttttagttgttttcttataattttagtttttttgctgagaaaaaatgtttttgtaattttgaaacattaaaatcatatttttgaccatttaaaaaaagtatttttgaaaaattatatttatataattgcaaaaaaaaagtataggtatgtaaataaaatatatatatataaaaaaaaatatttatgaaaaaacctttttttcttgaggaatttttttataaaattgagaaaagagaggaaaatatagcagtaaaagaattaaatataaaatattgcagtaaaaatataaatcgatttttttttttaataaaaaaaaagaaagaagaaaatatatatggttaaggtaagaattaataacatttcaaaaaaaaaaaaaaggttaagaattaatgaaagaaggtaacgaaattcaagaaatttgatggaactatgaattgaaatgatcaatggagtacataagggtaaaataaaaattccttttcttcttttttagtggaataaaatcacagaatgtatctcatcctattttttgtagttataatttgactcaaaagacttatgtctaaaatggggtttggtttgttaaccgtgaactgtgaattgtgcattgtgattcataaacaaatcataaaaccaaccccaatcagctgtgtgaaaatgaaaaggaaaagcaaccaaaatttatttacacaaatacaaatataaaatacaacacgaaagatactagatgagatgagagcattgggacttttatttctaaagatgattgatttactcgtaccaaaaaaataattacaatttcgaggagaaatgaaagaaaaagaaagaaaaaaactacctaaaagaatgcaaatatgaagtagtaatttatccagatgacctccaaatacttccctcctgtgaatagcaagcaattcatgaaaatccattcatagatgagcataaaacacaagcaaactcatgaatagatttccaaaacataacccctgatctaatttacaaatctaaacaaaacatttgaccacaactagctccatactaaagcaattgcctagttaattttcttaatttaatgaaacttaattttcttgtggcaagtacagaaaagttaaccattcttattggcagcacgaaaaagaagctctgcaataaggtattgtgcaggatccagtttcatatggtgaataattggttgtggtttggtgctgttggagtcaataaataagcactaccccatcatcatgctcatcaatgaaattggatggagtgggaggaactcaattccattattattattattatnnnnnnnnnnnnnnnnattattattattattatcattacttcttttttattattatttgcacttgcattacctaaaaagtagtagtcatggaaatgaatagtaccaaaacccaaaaacatatagtaaaaataatatgggtctaaagtattcttcttttaacattgtagttgcagcaataaattagacacctcttttgtttcttagttaagaaacaagaaatctttgtttgtctccttcctcattcttcctcttctcatctaaccccctcacaccactcaaaacaactcttccatcaaagttcttttcttttatcatgggtacacattttctttgatttctccagaccaaataatgcattgttatttgaagaacatataaatatacatatgatttatggatatatattagtatttgtttggtataagtaaaagaaaaaggagaaatggtgcctaaaaagacaaatggaatgctagctccacaagcacccactgggcactgcccattggctagaaagtagacaggagacagagtagaagacacacctcccaggctccaacctcataacactattttatgaatttcgccagtggatgcgctcatcacccacatttggttttggtgaaatccagagacacacacacaaataaaaagtttaaaactttcaggtgaaatccactctcgcaaattcctttctaatatcaataaactcccatttcatggaacattctcacctgataatatcacaacatcatataaaaaatttatggtatacttgttctttccttaaatgagttacataaatgatggttcatcaataacgagtgtctctaaattgtcatacatgttaaagtcaaatttcatttacatctgtactactactaacacgtcagtcaatggcacctcaagaaaactaaaaagataaaaacaaatgtcttcgaaatataaaagtggtggtatgcagaaactaatacagagaaacgaatgtataattcacatattaatccaagccaaagaggagagcagcaatcaaaacaggtacattaatatttgcttcataaataaaaagaatgtttctagacaagttgttaataagttcttgcatgaagtcaaataggttcccactctgattaacgccatcacctgcttctttttctattgatgaatgaagcacaaactgtgttaagtcaattgaatgcagagcacccaaggcattgagcctcacgaagcaggtgcacataaaattatcaatgatagttggtatagctttctcagccactaatgattcagttagtttgtgagtacaccaatatgatcactcctgtctatgtccataaccatttaaagtccctttttccaaatagtaggattaacatgatcacagaacacagactctctctctctctctctctatctctctctctctcatttaaagtc

SEQ ID NO: 113985 - DNA, 1887 bp, Cannabis sativa
  modified_base (46)..(61): a, c, t, g, unknown or other
ccattgaacatcattaaataataactatagagagagagagagagannnnnnnnnnnnnnnngagagagagagagagactaacaaagcgtttgccatgtttgtgaggagtttctgagagtcctcaaagaagagagaaacaacctcaacaacaaaatcaggggagttctcatcctgtagtttctttagctgcacaaactgatcgtccaagaatcccttctcaaaacataaacaacccacaatttcgtaagtcatttgaaacattcaacaattgacatagaaaaaaaaaaacacctctttataaacaaaatacacaacttaatatttaacaaaatacctcttgacggaggtagtggatgtaatcaaaccattgtttttgccactgagaaatagcatccatggtcttgtgtgttctcttcctctgttactttcaaccacaaaaattcaaaataaataagaacccagatgagatgagacgatatgtgaaggtgggcagatcttaaaaatgatgaaaagagagagaattgggagagaaacagagatgcctgaaaagggtttttggttatttgaaggaaaaaaatttaatggcttgatatgggtggaaaactcagtaagtgagttgccaagaacgtgttggtattgtcggactggtaattcaagcctttactcaattttgttccaaattttaattattacccaataattctccttttctctttctctctttttcttattctaaaaaaatatttaagtggttttgtgatctccagatagaatatatgtctgactttttgaccatttttctattgtggcactacttatcctttcctcatatccactcagacaatacaacggtcaaacgtttttttaagattaaaaaattgcagaaaaatatatatgactatatatctacagcagattgtgttctgttaatgtcctaaaataaatataaataaaaacgcacttatatttttatattcttataatttagacacgaaattaatatggtgtatggaacagtttaagtagtatttcaaagtttaaagaataaggaagtattacaactgtattatttcaagaagtttttgtaacagaaattaatacattagtgagagacttgaatttgctttgttaagaaattatggtgattttatttaccaaaaaatactaaagtaatttagattataaaccattttttttttttgttaataattttcctaatttgtttagtgcatgtttatatgaaaattagctagattctaggtataaagcaatagtaacggttaagagtgtcagtcagctgctacttttgagttttttccacatttgtatattgaaaactaattaaatctgtggacatttaattcaaaaaaataaaaacattgacatttttagttttgtcaacagaagaaataggtgtagagtgcttctcctatctcaatcttattgtggagtgggtaatttttatggggaacacatttatttcaacacaaatgaaattataattaataaaataaattacacaaaaattataataatattaataattcaaaacatacaatattatataaaagaaaatacaattatttaataagctactaataaactcaaaaaacacataaatatatatgtataataactaaaaataaataaataaaaaatttaaatgaggtctgtcgaggcgggaagtgttatcttcattcccactccgtttaatattcggagatagaaaattatttcttctctacttcattttttatttaagttgggaatccctactatattatcttaaaatttccatctctaaatgaaacatcaattcacacccttagtggttccgtttccctccttttcctgctaggattggaaatcctgtattttacatatcca

SEQ ID NO: 113986 - DNA, 1161 bp, Cannabis sativa
aaccaccaaaccaatctctatctatagtcttgatttttataaatttaaaatacagttttataattttgaaactttaaggaaatatttgtataaatttaatacacaaattcctatgttttagtattttaataaactttcctccaatttgcatagtattttctaaattcccttataataatgatcagaccacagtagaatttagtagacaagagcggacggcagtaggaaaatataagaatttagaagactgtgcgtcatgcttttcaaaggccaagaaattaatcaaaacaataataaaacatgtgagtcaacgagtagggtccacacagcgtgcacgcgtgccgagacaagttgaccccacttgcaattccatttcccctaccctaaccctccttcgagtcagaacctgaaagtgactctttctttgttttgaatattcttttttcctaatcattccgcctacccaaacactcacactgcacttatacacaatcacaaaaatactaaataatataataagaaaaaaaaaattaataacaacatcacccacttttccattttccttttttgttgtttttgttttttgtggaatgtttttttggttaaatgggattgtgtttagtgcaatgtttatgtaagtgtaatttcattcatatatgtttcccgtctaaatcatattttgacttttttggttttgtaatgttgtattattcttcggtgtattttcttaagcagcatttctttcttagatttttttttttttttgcttttctttccttaggttttgcgactttgcgtgtgaaagaacgagaccaaaaccctcttggcaattggccaattttttcattttttatattatttttcaattgtttttggaattgtgtttactgttgatgtaagtggttgacatttggtagtgaatgggtcaaaacatgatgatgataataaggtcctaataatatcatcaaaattaataactcatagcatattattctacattggttacaacaattcaacgctataccaaatataaaaaaatcataaaataaaatgaaatatttgtactataaatactatatcttttaaatgttttatactatactaagtggatgtacgtgtcgagccacgtattgctagtttcatttaagattttagtctttt

SEQ ID NO: 113987 - DNA, 3969 bp, Cannabis sativa
tttgaaaagtcaggattggtaaatttcgaaattgaccttgtttaaactgattaattgattgttggtgcagggcaaaattggtaattggctaatttcctacattgtttttggtttgagaattttcctctcttccaatttactttattgtaaatgtccttttatttatgattattgagtttttatataaaaaaaaaacaagagagagagaggttaacaacgagttatacatgtttgactcaaaaatctattaaagctttttccttttttttttttttttttttaacatgatgaaaattttcacctataatgtaatcaaaacccacttgcataaaaagtaaaactgtaatcaccacaacacgttttttttttcgattggtacattataaaacataacacagtccaaaatttaacgggactgtaacatatgtaaatatataaaatattatttatttttattttttaatattttttcgcataaaattaaaaaaaaaagctattttaaatttttgcacatccacgtatttattattatgcttctaaacttttcaatccattacaaataatccttcaactctttacaatattgtaaatttgtcattctgtcaagtattgtcacacatgttaaacaaaatggtgacatagctgcttagccaattatcacatgattactacgtgtataatttaacattaaaaaaaaaaaaaaaatactatttaggattttcactcccaaactatgacttatgtattattgtgcctcctaaatttttcagctcgttaaaaatgatccctgaactttttagtccgctaaaaatgatgtggcaattagccaagcagttatgtcatcattttatttgccacgtgtgaaagatacttgacaaaagaactaatttataatactgtgaatagttcagcgaccatttgtaacgggctgaaaagttcaggggcacaataatgcatatgtcatagtttggacttcacgggacaaaattcctatatagccttttaaaaaaataaaattatgtattttaaaaaaatcattaaattaaaaattaattaatgattaagaaaattacgtaaaattaatttacttttttttttaaaaaaattaattagacacgtacatgacgttgacatgacacgaatattgtaactagctaagcaaccatgtcattattttatttgtcacgtgtgacaaaacttgacagaatgatcaatttataacattgttagtagttcgggaaccatttttaatggattaaaaagtttagtagagaataatacataagtcataatttagggaacaaatatcctaagtaggctgaaatttttcgaaaaaaattgggagccatggcaccctccgcccctgtcaatcctcaacttaacaatcaatcttttaagagtgaagggagaagaaaataacaccaccatcgttacttatgttatatctacaaatatagaaatttgttagccttattaaacttggtttgaactcttctgagttttctatccaaaaatatataaaatccaccattgaatactttagtggcaccaacatgtctccaaaatgtgtggatgattccaaatccaatgcctgagaatttaattaggatatgattctttttaagttcaaagaattagatttaaacttaaacaagcttagtccttagtatggacgaagccatcttagactgaggtagagccattggctcacctcaaattttagaaatgtgtatatgtgcataaatgaattagggcccaacaattaattgatagaaatgtaaaaaatttcatcatatatattgtttatcattactaattaaaatattaaataaatttatatgtttatcacatataaatgaatcatttatcttcattacattttttttatcaaaaaaaaaaaaaataattcatcaattatcaaacaaatacaaaaatagtgccagaaaagccaaagccaaagcccctaattacagtataacctcaacaaataagttctctcctgattactgaatttcttatttttaattatttgtaatctgtaataaattatttactagctacattttgaaagaacactatatcaatatttatcattttttcaacaatatttaacaataattaaaaaaaaatatatttccttaacttgtatttgtttttttgctttaacacccatacccattcttgcataaattattattgggtgtccaactaaaatcccatattgaccaaaaattaggaaggatcatgtgtatataaggataaaaaatatttctattaatatgaagttttttgaaaaggtacccaaaaataaatctgtgaagatttaggcccaaagcggacagtattatacgaatatagatatacatggtgtctgacgattcccaacaagtggtatcagagcttggtttaagggccatcaagaacaacatcaatgtttaagaaagatcaagacttaatctcaaatggctttctcacattttaaaatggataagttcacggaagctaatgactttagcttatggatgattaaattgaaggctttacttgtgtatcaagggatttcagaagctacagatagagaagagcttaagaatcttagggatgacaagaagaaggtaaaggagatagaatcgaaggcacatagtgcaatacttcttagtctaggatctgaggtattgagggaagtgttgagtgacgatactgctgttggtctatgggaaattgacaacaatctatatgaaggaatcacttgccaataaactctctttagaagaaactttacactctcaagatggatgacatcaaggaaattagaaagcatttagatgaattcaataagatcatcttggatctcaacaacattggggttaagattgatgttgaggatcaaggtattctcttactcagttcattgcctaaagtttatgaacattttgtggatactatattatacggaaaggataccttgacaatgtcaaaggtaaaggctactttgaattcaaaataaacatagaaaatatccgtggatgtgcttatttaaataggcaatgtgctatggatggtctaagaaagaatatcaagaactcttgaggtagtagtggtgctccatgtaaggcgtttaccccaacgcattggagagaagtatacactagttggtggagtgttgatgaaggaggatcatttgaggggaggcaaggtggtcctttttttgaggggaggattgttgggtgtacaacaaaaatcccacattggctagaaatgggaaaagatcatgggtatataaggatgggcaatatatccattcgtgagagcttaggcctaaagtggacaatatcatactaatgtggagatacatgatgtctgacgattcccaacaagtggtatcagagtttggtttgagggccaccaagaacaacatcaaggtttcaagaaagatcaagacttgatctcaaatggcttccgcacggtttgaagtggataagttcataggagctaataactttagcttatggaggatcaaaatgaaggctctactagtgcatcaagggatttcagaagctattgacagagaagagcttaagaatcttggggatgacaagaagaaggtgaatgagatagaatcgaaggcacatagtacaatacttctcagtctgtgagatgagatattaagggaagtgttgagtgaagatactgctattggtctatgggagaaattggcaacaatctatatgaagaaatcacttgtcaataaactctatctcaagaagaaactttacactctaaagatggatgaaagcaaggaacttagaaagcacttagataaattcaacaagatcatcttggatctcaacaacatcggggtcaagattatgctagacatttatatgtataaactgaaacatatatgattaagtataaaatgcggaattaagtcaaacatatatacactatgaataaggatcgaaatac

SEQ ID NO: 113988 - DNA, 809 bp, Cannabis sativa
ataattttgctttaaaataatattttgcaaaattgtatcagtattccaaattcctattacaagtgcttacaagtcctaatctttttttaagcatataaatataattaggacagatgtcacaatcgattttggccagattctcttttgtgtacctgttctgaaaaggaaaaccaaaaaatgaggtaccttgttgatgtggtggtgtgaggataatgttgattttactagtgtcaacttttaaaaaagaaaatttaataaataaataatttcttaaagcattgaccataattgcaaggaataacgaaggaatatatagaattgtattttattctcacaaagataagtccggatcttgtcctatatgttgtacaaccaaaatccaaaacactaccacctactaattttaacaatattgaatttaatctctccttcacacttaaactttcaatttgctcctataagtacaatagtagcttttatctgagggaatcatttccaaaaactacactcatgagcctaaaccaaaagtctacacataaaactaaaaataaaattaaaagttataaaaagtcataatgcctattccattttgactcattctcaatggtatttttttttctctctcaaactccaagtactcattctcattcatatgagggcaagaatcgagcatcggatacgtcaaatatattatatattgtacataaggaaaaatatctttaagaacacatttggtaggtgttaaacacgtcatatgtactatataagtaaactccatcatatttagttcataaaaatttccacggttg

SEQ ID NO: 113989 - DNA, 3186 bp, Cannabis sativa
  modified_base (1666)..(1667): a, c, t, g, unknown or other
taagaagggagtgagaattgaagaaatcggaaagaagtacttcaaagatctaatctctatggcattttttcaaccatcaaataacgataagaaggagccatttgttgtctcaatgtctctttttaatccatcaaataaagataaggagccaacttttcaaatgcatgatcttatacatgatttggcaatctttgtttctggtgagttttctttgacgatgaataatatccataaatgttctcacaggattcgtcatttttcattcatacaagattgtaaaagaggctttgaccctaaagaagttgaggggttatttaaagctaagtgcttacgcaccatattgtggcgacaatatttaagtgacgatcagctaaaattgttaaagatcgaggagttggacaagtcattcccaggcttgagagtactatccatctgtgattttagcatcaccatgcttcctgattcaataggccatttgaagtatttaagatatttgaagttagattgttatgagattgaagagataccttacacaatatgcaagctgtataatttggagacactattgctggagaaatgtaggagggttaccagactaccaactaatataggaaatttaacaaagttgcgacatcttagtgttccttggagttcattagaagagatgccattgcaattggcgaagctacaagatctgcaaacacttagtacatttgttgtgggaagaaatagaaactgtggtggtattgaactattgaaagagtttcaacatctacaaggaagtctttctattagaggactacagaatgttcatagccttgaggaaacttcagatgcagatgcaccattattaaagagtaagaagtttcttagtcacctatccttgacatggaacggaaatcaactcagcccccctattgatcaaagagaggtactcagtgccctccagcctcatccaaacttgaaggaacttatgattaggcactacaaaggcaacagctttgcaaattggatgggagatcatcattgcttgtctaatttagtaagtttgcatatttcaaattgtgataattgcagattcttgccgtcattgggacaactgccttctctcaaagctcttatcatttggagttgtggtgtggtgagaataggttcggagttttactgttctacttctgctgcattacaaacaaagtccttattctttagatctttggagactttgaagtttgaatatctgtctaagctcgaagagtggtcatttatggaaggtggagttttttctcgtcttaagtatattcaatttactgagtgcaagagactcaaagtgacattgttaggagattattttccttcattgatagagcttgtaatacatgacagtgaggaagtaataccattattactcccaagagctcaactcatgcaggcccctttgatcaatttaaagaagattataattgaggattgttacaacttgaggcacttagacgaggcggcctttcagtacctcacctcccttgagaagttacaaatttataattgttatgaactcagatgcttgccaaaagaactacccacttctctctctgagctaatcattgaaggttgtccatggctaacaccacgactccaaagagagacaggggaggactggccaattatnnctcacatcccaaatatcactgttagtggcaagaaaatctagaggtatttctccttttctcttctcttttgtattatagtttgactcttctttttatatttatattattattttttgttttgtgatgttctgttgtaatgatttacttaaaaattgttggattttttaaagattgtggtatgattaatatgtttgaaaaaccttagctaaagaggctgcttggaatttaaataatcacatgaaattaatttttctgaaaaataaaaagaaaaagctactctaaacccattttgaatgatggagagaaatattaaattatatcctttcatttcatctcgcgcgctttacattgaaaaatgtgttatctaaagaaaatgagactggtcatcggcaaattctttctgaagcattattaatttgatgcataagtatgtgaagttgatgaagctagtagtagtagaagatatactacatatgatactttgtactgtgacagtgttataagatatattataaatatgtaaaagctataactctgtttttgcagggttgagtagtggaattaatgcttctgaatgaggactaattggattgagttgaagaatgcaacaactcagtcaccaccaaataaacacttatgatgaaacttaagctgtgtataaaagggtgtcattattgttacttcctggtcattaatataattgtaatgtaattcactaactagagaatttaagagaagatgagtggagtagggaaggcagtgccctactcatgcttatttcatctcaaggttaatctctactctatctgttatgtaacatatatttatagttactggtcataacatgtctaagatgtattgtgggaaaggttgtatgaggtcgcaaatgtcctcatgcttgtttgattgatctctactcctacttgtcaatgcctttcaaattaatagctataactctggtgttgcaggcttctgaatctgtcaaagccgcataagctagtttgcttttcgaatcggcttctgtcttaatctttggaagtctttccagatgcagatttggctacaaaactcgaatgacaaaaaagatcaactaattacatttttgtatgtttcttggcagaaattgtaatgatactgtacttttgaattcagccctaattaattcatgagaatccaacaatagaattatagattagcgtaaatctactagagtccgtagaatcgattttgaatggtatgatcttctaatttttgcatcaaaatttctctgaaaccttattttcctgatgatggggattcaggaatctaaaaacgatacgatgcaaaaatggggaccattacccgttatattaccaactgccaaaacagttagtaatatttattaactaattctaatttaatccctcatcaaataagaaattatccaattggtatccacatattaaaatcataacaatcatgcccttaagtcataaactttatttcaaaatagaccacataaatttgacttatttatttg

SEQ ID NO: 113990 - DNA, 3647 bp, Cannabis sativa
atatagttacatttaggtgagcgagcctactaggatttggattttggcccggtatttaggcccaactttaatcgatgccatcgagtccattgacgaaattgcgacccacccaaaacgcagccttgttcagtgccgtttgccacagtggtagtttcagtttcttcctcgttctagtaccaacgttgaactgcaaaaccctaacccctttcctctgaaacttggccgacgacatgtctactctagaaatcgaagctcgagagtatgttttaattttctccctgtcaattcgaatgtttttttttcactcattcatttattaatttcgttctgcgaagatagttctgaataagctcaatacttgttaaaaaaaaaaaggttgatacttcaactcaatggaattactagcttgaaattttttaaatttgtattgaaattttcgggaggtgggttgttatagaactagaataagctaaatttgggttctatttattttctaggaatgaaaaaacattgccctgttagacacttaatttctgctaaaatagcttatgctcttatatggttaatggggactgtttgtattgcaacaaaatctgacattgttgttttttgttttcttcgcagtgtgatcaagattgtgcttcaattttgtaaagaaaattcgttgcatcaaacctttcagacactgcagagtgagtgtcaggtatctttgaacactgtagacagtgttgaaacatttgttgctgatattaatagtggaagatgggatgcaatattgcctcaagttgctcaacttaaacttccaaggaataaattggaggacttgtatgagcaggtaatctagtccctctctctctttcaatctgaaagagtatattagtagtggttacaaattcatcataggttgtgaacctagaattttgtttttgatttttcttgtatttagtttttggtgaatgaagttgaaattcctggctgtcctgtactcctatttgtgcacattttaagacaaactcattgtgagttgcattaagttttttgtctttgttgtcaattatgtagattgttctggaaatgattgaacttcgggaattggatactgctcgtgctatcttaagacaaactcaggtaatgggtgtcatgaagcaagaacaacctgaaagatacttgcgacttgagcatctcctagtcagaacttattttgatccgaatgaggtattaattgtttgtagtttcagtttctctacttattttcttatggaattaatagcttcattgatactgaaagcattcaaaactgcccctgttttttttaaccgtgcaaattaaaccaccatatgagccttgcatctagaagtttattttatatttttaaatatcagtatgatgtttacagacttttttcatggaaaaataggcttatcaagagtcaacaaaagagaaacgacgtgcacaaattgctcaaggtttggtctcatttcttgtcttaatttgatcgagatctcaataaaaatataaatgtgtctttcgactggtaaagttgatgagatatttctgtttccattaatgaattctccttcctttttctttttcagcacttgcagcagaagttactgttgtaccaccttcaaggctaatggctcttattggtcagtcgttgaagtggcagcaacaccaaggtatatatacaatcttattgtgcattgacaagagaaccatattatcttgcaatctctttaaagtaacaatttgttctcccattccagggttacttcctccaggcacacaatttgacttatttagaggaacagctgctatgaaacaagatgtagaagacacatacccatcaactcttgcacataccataaaggcaagaagtttatgtatttgatttgatttacctgtgcattgttattggggtttcaatttttttcttaaaaaaacagattatatgaaaatttctacttcaagaattgaaatatgcaatattttgttatcattaattgtaactaatgttatttcatatccatcaaatgaatattgcattgaaacaaattttactatgaaagcacaaaaatgaccttttgtataaattttatgatgcatttggtgggattaaaattcatattgtggtggagctagaagatttttgttatttatattttcttgaaatttttatcttttagcaattttattgtatctccgatctcgtattacttttacaacactgaactcttcctgaagtcgtgatgtgttttttggccggtttcttggtacagtttgggacaaaaagtcatgcagaatgtgctcgtttttccccagatggacagtttcttgtttcctgttctgttgatggatttgttgaggtattttaagtggattcttgctgttgttaaatggttgagaacaatacgatgatatctaagtatatcgtattttgaataactgccaggtctgggattatattagtgggaaactgaagaaggatttacagtatcaggcggatgtgagttttttataattggattacttacagccattgctcttaataagtcctgtttagaacttaatagggtaaatattacaggtctctttagtcttgtttgttgcctaacaagctacattcatttgtaggaaactttcatgatgcacgacgatccagtgctctgtgtggattttagtagggattcagagattcttgcatctggatcacaagatggaaagatcaaagtacgtttcagtagggttttcctggcagtggatttttgtttgttaaattttatatttatttttctatttacatcttttctgtccaataaactttaaatccgagccagaacgataagtagctcaggctttgtccagtttcccttctccgggacaagtaatcaaaactgtgttgttgaacaatattgattcttttgtactttgcttaatgatgtttgtgtttagtagtatgcatgcaattaggttgcatcaatattcaaaatggcaatatgtagcattcacttggtagaccttagcatattccgaagttatatcttgatttcgtaatcttttgtacactttgataggttattttggtctttaatttcttttggtctgtggtctttgccttttcttgattcaaatagaagttgtttacttgattgaagaatttagtcatatattgattttgaaagctcaatgtaattgtatttttcacattcaggtttggcgtataagaactggtcaatgcttgcgtcgtcttgaacgcgcgcattctcagggtgtcacaagtgttgtcttttctcgagatggaacccagttgctaagtacctcatttgatagcacagcaaggtacaattaaaagcgctggttttttcaaatgcaaaagctctgttttgctccttttttttgggaagaaaacataagcttttcttatcattccatgtattctgctttcttgctgttgtcttctgttacttgtgttttcaatttccagctgttttatttgtaataatcactctttctgatctgagtatgctgctcgtgcgaccgttatacagtcagggacggagggactttagcccatatgtgggctaaagccctcactcaaatatatacatcaaattttttatatgtagatatatacatatattaattca

SEQ ID NO: 113991 - DNA, 950 bp, Cannabis sativa
attagtaaaacaatgtctatgtgttcactcattattggttgatgttgatttaactttgaaaaacattgaatatgcagcaagtgtatttttgtgtactgtacactaatacttatctgttcttgttacgaaaacttctcactcgaaaaggaaaaaaacagaacaagaatatctgaacataactcaatacttttgtctgtttcacaaagcaataaaaagtatttttagtggtatgtaggtgcagccaatgaaaagtgggtctaacctgaaggtaagggaaataaaccgtttgaggaggaggagcaatgacattgacattgtgggcatgatgaacctgaacctggagctgttgccttctccttcaagcgcaagtaccatagtggccttatactgtacccaaccaaacaaacaccaaataagaacaagattgccctcaaaactgaacgactgctaactcttcctttgtctgctgaatgagccattttcttgttctttatttgttacccaaaacagaagaaaggacaaaaccaacccactttgggtttatatgggcgaaattcaaataaaaaagaaaaagacccttgattagtagaggttattcgagatttgggtgggtcatcgtcatccatttaagctttcactttaatacttttctagaactgcgtgtgtaattataacaagagaattgaacagttgtcataaatattcggtgagaaatatgagaaagagggaatcaatggaggtcttttttacttgagatggaaggatcttttatggatgtgaaagagagctaatggttttttctgtaaagataaatatgaacctgaaaaagtattagaaaagagacttatatgggtttaatcggcagtagtgagactgaagtagacgacttttgctgtgtgtttataatcattgtgttggttttatattattttggttccaaagtaatcatt

SEQ ID NO: 113992 - DNA, 4549 bp, Cannabis sativa
  modified_base (4518)..(4520): a, c, t, g, unknown or other
ttagtataccatgtaaatttccattttcttatttacctaatgtgtctatttatcatgctctagtgcaatgggctttaggtaataggtagtgataaagaagttgtttgaaatggtagtattaaatgatgcttcatatgatcttaagttttttttttcttcttttgttaactctctcaagtctcaactatcttttcacttgcatttaattttttaagtttaaattttgaccgtgaaacttttcaaactattaaattacttgcaaatttatggtgtcatccattttacacagttaactgctaatataaattacttgcgcacacacttagggtcgatggtgagctaatttggatggaagatctttgatctctccttttaatgtactcaacgctacttttttctcaatgaaattttgttcattgttcaaaaaaaaaatttatttatatttgctattgtacatgtgtcacatctatattggtaaatctaatattattatataaaaaatataaagttatttaaaaaattatgacatttttttttatttttttaatattttatttttataattttctttaattttaaaaataatttttaaataataatattttgtgcactaatataaacatatcatgtgtacaagagtctacacataaatagtctatagtgatagttaatctgataatactttaaatttactcatagttcagtaattttaaaaattttacaactaaaatttaaacttaaaagattaaatacaagtaaaataataagatttaggccccgaaaaatttataacttgaagaatattattgatcaatcttaagagatcatgttattaaaaagaaatacggctataattggatcttatcaccaaattatcaaaggaaaatttacatggtatactaatttttgttattttttataaaaatactgttaggcggtattttttttcatactgcagcatactgtgttaagttttcactgatgttctactggtgttttttagtagttctactattgttttgagttgttctgttttgtggtttactggtgtcttataaaaatacagtatttttgtaaaatttttcgtgtgacagtatttttgtaaaatttccaaattctagtattttttgtaagttttatttaattatttaggagaatataaaaaaattaaaaaaaaaaaaaaaattctactgtggcctagagttttctgtagcataggtattatcttgtttcagtttgacaagtcaaactaacaacagtagcaaatataccaatcacaagtactatatccaaatccaacaattattgttttacgacattctcatttactccagaaatttcaagaatctgctttctgtttctgtggccacccaatataaatacaaaacaatttgatcaaacaaaccataatacataatcttaaaacatattatctcaatataatcttagaatgtctcttttacagtctctgctctccctgcaacgcagcgttttggaccctttgaatgcccagatgaactggaaggaaacttctgatgcccacgtgttcgaaatcgatcttccggggctgaaaagagaggacgtgaagcttgagattcatgaagatcataaagttgtgcatgtgagcggagagaggaaggaagaggatggagaagtaaaaggtgagaggtggcattgtagggagaggacaagtggcaccttctgtagacagtttcggttgcctgagaatgcaaaagtgggagaaatcaaagcttcgatgagtgatggagttttggtgattagggttccaaaggaagtagaggagttgaagaagaaaacgatgaaaaagaaggcagtacagattgatgctcccaaagggttaggccgatttgtttgttgcaaggcttagaggttaattatttgatttgtgttatatgaatataaatatgaacatggatacataggcatatttggtaaaatgtttttcttttttgataaatttcagtcacacatagctgtgagtggtattggtaaaatattgtaaatacagggtcgtgttgaagtttgaaagtctggggcttgtttgttccaaatatgtaaggtttttcttcttctttatgtttattttatttttaaaaaaaaattaatattttttatgagtgttgtatctttttatgagtcaaagtattgtggcgagccatcgcttcagcctccttggaagcaaaccatcctttaatgtgccaagcacaagtgtcctaaaccacttatcgatccccaaatcacaaaaaatcccttctagcatcaacaagagcatctgtattaatcttatacaaaccgattggtggtgacaaccaacaagggtgggcctggccttagtaggagaaagagccaaggactctctattcggatgcaattctaagatgtgaccacgggatcaagatcataagagtagaattattatgaacaaacttgtttctcctaaacaagattctccacaaaataactaaaattaacttaagatgtgaaattgagagattatacaaaacttgcaacgcaaatcttttttacatgataataatttcttttgaataattaattacaatgtaataattttaatattcaagaaacttaagagaaatgatatagtggatttacattttgggagtgtaaaataagagatagtttataatatataaaacttacagatttgatctttgattttttctttgaacttggtcttgacaaaagagatctcgtgatagtgaatattgtaatcttaatgtgttctttctaatacttgcactttagtattttaagctctattaagtttagaataattaagaatatataacacttcagaagaataatcaaatttaaacttaaaaataattttttttatttgggggcttgagagcttgcacttggagggagtttctcgcattagttagactataagtactcattaaatacagtagatatgtttgccctcctaatatattagagtagatatgtttgtcatgatgaagaatatgtctttcaatagggtagcttcttaggcagagaaaatgtttcattatttgctcgaggggatccaaaataaagtgttaatggttgaatctggacttgagtttttaatttttttactgctgttgttttctctagtgtcttcattgctttcatgtatctaacttttatgttctttttgtagaaaaaccccagaccatgggcattcttaatgaatttttaggaaacatcgccattcaaattgaggaagtcagggaggctgccaagctagccaagggaaaaagtaagtttggaacatctttccgaacacgaagcaaggaattagcaccctcagtcaaggtgtcggaggctgctctagatgctcaactcctagaagttgttcaaggatctcaaattcaggaagttgcggtggaagctcatgctcttcaagtgaaacctttgcggcaggtttcacttactattcaacaagtcattacggttgaagaagaagaaatagaatatggcgaggggatggtcttccctacgaagaggcctggataaaatattgacaaagaaggaaaaaagctaaaggctgaggttgtcttgcaactagttcaacgccgaaaaaatgaaagagaagaggtcaagtggagagaggctgagtagaaggaagctaagaagaaggatgcaaagaggaagaagccaaaacaaaggaagagcttcctaattaacaaagatgtttatgatcccaaatctcaaggtgctagacctagttttaggccacaccttcaaaatccttccataaagctcacacttcctctgcttcctccatccactataacttttccagtccgaccactagaattactagaagaaaactgggtccagctcgaggagtcaacttaccttttttggaagtgatttgaagctgagtcaactttaatttatcagagaactaatgtaattgattccacagaaaagtttgaattgtcttagataactctagatgttattatccatcctcccacaattgatagtgcaacggtctcggagacaatcaaatctagggtcagaagtgatctagtttcgttcgtggtggacttgttggagcaagctggtgacacctattgtcagcttggtgcagaaaagtgggacacgacacctagtcaagatccagccttccttgcttattctcttcgttaccaacttgttggggttagcattcttactcacatttaaaaatgattttgcttaacacttgtacttgtgcttgattgtatttcatttcttttagggaaattattgacagaaagatgctcagaagcagtagctaagatgtctatggagctagagactcttagggttgaacgagatgcctcgaaccggaagagagaggaagccttgactaagctgaatagagcacaagcccaatcgaaggatctggtggggcttcaggttaaagagaggttagagttggctataaacagtgttgtatcaacttacaaggatatgaaatgttgagaatcatggggttcnnnctcaaaaccaattggcaatgagtggagta

SEQ ID NO: 113993 - DNA, 2394 bp, Cannabis sativa
aataaatatgaaaaaaaaaataactttcaataatacaataattagtgggctttgggttagacattgacatattggacctaactaaatttaaaaattggtatttttataatgtgcggtgcggtttgaaccgcatattaaaaattcaaaaccacaaactgtactgcattgcgcactttagaaaaaattaaggtgttttaatttttagagtaaattaaatactctatttttaagaataaaaaaaaaataatgtaatgtttatcgtaaattaaaaaattaaatatttactaatataatttattagatttaataaatatttaatattaaaatattcttattgtattaataaaataatagaataataaagaataaaatatttggtgtaatttttagtgttgtgattggaattgaaataaaatttagtgttgcaatagtaattttttagtgttgatttaacactaaatttaggtttttccattagagatgcccttataatccccgctccttttcaaagttgtctttcattttagattttttattgtataatttttttaatggttctaataagtattttttacatatttcattaaaaaaatatgattcatcaaaaaaaaaaaaaaaaaagaagtaaacttttcattatttcttttcatatattacataaaaattaattttttgttacctcatgattatcttgttagaagtttaagacaacatcaagttaaagtaattggactttttttttttttttgagtcggaaaagtaatttttttttcaccttttatatttcaattaatattgttatcacggtactaatctttaatcaattctaaactaattttctctttcttttagtaataaaaaaccatctagaaaagaaaaagagaagaataaagaaatagaaagtgcatgtattccaaatttagatatcaaacccttctacctagttccccaatacaacaaaaatatatatatttatatatatttgtagaatttcataatgtttattcctaccagagaagaaggaaaagtaaaagtgggtgaagcttcattgatggtatatcattactttactcatcaaatttgtaattttgggttatgatcaatttggatgaacataaattaatgaatagaaacataaataatagaaagaaaagaaagaaggaaagaaagaagaaaagaatagagaaaaagggtaatgatgagggaagagtagtgagagtggttatagaatataaaagggaaggagtattggttagaagggaaatgggacccacagagagccccccatgaagtccggctttgcatgcgcagtcagggaattgggcccaacaccatacagtccccacgcacgtccatgcaaaagcgtggaattttatgccttttgtcggggccgacggacctacgcttcttatcctaaccctcctcacaccctatcctaaccctaaccctaacccaacactactttctctctcatatatctcctctcttaatgtcttaattatacataaccaaataaccaatcaataatttaaaaattcattgaaattataaatgttatttaattaggtatgaatttaaagaaagaaaaaaacaaaagacataataagaaaacgtggctcctaataagtagattataatagggtgtggttggtctggtctaaatcatggttgtatcatagacggtcaagtatccaataatcaatacaatggaataatattatgtataattagcagccacctcgaaaagttttatagtgcattataggtataatgatacgcttccatattaatgtatatattttcatatatgatattatgcaatgcatatatctatatattatttgtaaaatcacttgttgggcaggcttatttttattttttattttttggggatagaattgattcaaaaaaatcattagtggagatgttataatgacctagctagggcatccatccaatagtacgtacatacagtgtttaaagatcatcaaaaatatatatatgaatgtccttgtcttgtgtactacacatttcaagttcttattcatgttttttgttttttgtttttgtttttagagcaatatagtttcacgtacgcattgtacttggaataaaatatactagacatacacattattatatttagttaccaatttgatgcatttacaaagagatatttgtgtttatttaacacatatttatatttgtgtcaaagtattttgattgtgaagtgcttagttatcatatttagtaaagataataaaattaattatatttggtatttttaaattaattatttattgtattttataatttttgaaaataattgttgaagatgttatagttttattgtctaaattttcgggggcaattttgtcccatgtggctcgctct

SEQ ID NO: 113994 - DNA, 2293 bp, Cannabis sativa
  modified_base (2251)..(2252): a, c, t, g, unknown or other
ttccgcatttaattaatcacttaattaaataattaaactgagaatattaaaatacggaatttcaaataagaaaaatataaataaacaataatttcaaacaaaatatattattagatattaaaattttataaacactcttagatgacgtttggttgggaagaatgaaaacataagaatgagaatgagatcaatggaaatataaataggaatgaaatagaataaaatttaaaaaatgaataacccaatatacaagattttagaaacttttttagttttacgatttatttgtctcttttttattttatatatttcgttattttaatatttatgtttatgttaaatttttaattccatttttacgactcctcatttatgcatgaattgactattttcttagatcatcattgaaaaaaaaaaccactcttttacatgcagcttagcatagaacctaattatcccaatgccacgagaatttctaaacaaacatagttaaacattgaagagtatacattaattattattatattatggttgtgcggaattaaaaaaaaattaaaatttgtcataattaattttaactgattcttttttttttcttcttattgactatctaattcttgtgttttttttcttccatgttttgactttagcctaacgaaatttttctatattttaataaaataaaataaactaaagtaatggagaggaatgagtcgatagactacaaagcacattagtataaaaacgaagctaatcgtgaacgattttctaaatcaagctaataagcatggcaagtatgtgacgataagaatgtgaaaatggtttatgtatgtgattgaatttttgtataagattgagttactctaaggattgctaacatatagttgttgtatgaggttgagtttctctaagagttgctaagatagttatttttttatgagattaagttgctaacataatgtttgtataagggtttctaattaacatagttattttatgaaattgagttgctaaatgtataatgattgctaatatgatttttgtatgagattgagttgttgtaagagttgctaagatagtttttgtataatgattgctaacatggttgttgtgatattgggttgttgtaagagttgctaacatggttcttgtatgagattgagttgctataaaagttactagcataatttttttatgagattgggttgctagcatagtttttgtaaggattttctataatatgattcttgtatgacatttagttgctataaaagttgctaacataatttttgtataacattaggttgctagaatgattgttgcaataattttctataacatggttgttgtatgagatttagttgtaatgaaagttacaaacatagtttttgtatgatattaggtggctgcatggttgatccatctctgtatgtcgttatacatgccacatcgtttccaagtttccttggccactaggcactcccaaagggcatgtatgatcatttcctcctttctcgctcctatacactgcccacaatatttatcaacttccattttcccgcaaaacagaacactattagttgggagccactcatggctcactttccacagaaactacttgactttagggggaactctcaaattccaaaggtgtttccaccatctctcagtgctttctgtgtcggaattctcgtcaaacactctatcattaagagcagtaatatacccactacgaatattatattcaccattcttcgcaaagtgccagattagcttatctttcgtctcaagagagccttgttggattctcaaaataagctctacatcagctccacaaaagattgtcttaatgaattcaacatcccaatctccatttgctaatctgagatcaatgacctttgtgccaatggggatctccgggctgataatgggtttaaaactcaaaagtctaggcagccacttgtcctttgtgacatcaatgttttccccagacccgactatccatcgtgagccagcttccacaatctctctaccccaaagcaaacctctccataccgaggacgaagacgaacctctttcagcttcaagaatagaggaatgagggaaatagctgcttgtcaaaacctttccaaccaaagacaaagggtttctaataactcaccacacttgctttccaagctccccaatgagttttcttttttttttcttcgaagaaccccaccggaacctatgtgacagtcagtagtcccgnnatccgtaaggggaaataccgagtaagttgtgcaatcccaca

SEQ ID NO: 113995 - DNA, 2970 bp, Cannabis sativa
agtttgtttctgcaaaactgtttttcgcagtaacagaattacattctgctgctgcagacatatacagttttatatttttgtaatatatattgatatttgcaaaaactcagtttttcaacaactttcaaataataaagctatagaaagaaagaaaaaaaaatcctatatttttgttaactattattttttttttatcaagaaatgaaatttcattaatcaagctaattacaaccaaaacaatttatcccaataggaaagaagatccctcactacaagccctttacaaaattcatcacatatatatctttctttatgtagttcttttcatttacaacttattctcaatttgatattctgaaaacgggagttaaacatctatgtttaaaattacacaagttatgatttaaccaaatgtcataaatgacaccaaccaaagtcacactaagaatttgagctaccaaatcattcatcttcaacatgttcaaccaatatttaataagggctatgataatggtggagagtttgtaggtaggtgatatttggttgactgtaacggtcatcttaatggtaataaatgcctattacgtatattgtttgtttttttattttaacttttataatccattacaatgtaagaattattacattgagtattgtatttgtaatgatgattacatgccaaaactaatgtaatcctcgttacaattacaatccattaaaaaagtaaaataatattttaataaaagatattgtaaatagaggaatgctaatgacacactatattgcattctcttttacactctttataaatgagtgatatgtgtaactttttaaagtatgtttaagtatagttacaattatattcttttcattttttattaataattaaaatgtatcatcatctaatttacttttttatttttggacttttttttttaatttcttatatttttttactaaataatatgcaacatctttcttttaaattctttttttataataactatgtattattttatgttataaaaaataaaaaacactaatttttctttttctttaacaaattttgcatcaatttttttttcatattgtattattctttaaattattttgtgtttcatgtttgttataatatatatatagttatatatatataaagaaacaacaaaagataaaaataatctaaatgtgattatgcctagttaataatatgtgttagatcaatttacttttattttatttttttttaagtaaaaaaaattattttcatgaataagcaaaaaattaattgatttaacatatatacacatatttaattagagagaaatttaagaacaatttaagagtgtaaaaaaaaaaaaacacgaattttgttttttaaaagatttatacaaagcaaaaaaaaataataaaaaaaatggtgaaaatttatgaaaagaaatattttccatttcttataaagtaaatagccaatatttattataaaagaaattaaaagaataattcattatggtacatattatctattaaaaaaatgaaattttaataaataaaaaatataatttaattaagtttttttattatctgaaaaataaataagcaagtaaataaaatcacactttaattattagtaaaaataaataaattaatcattagtttttttaaaaaaaaaaactatagtaaatgagatgactcattttaattatcattaataaaaactaaataagagcataattgtaactattttaatttaaatataatttagaagattacatatgtcacttaattaagaaaagagtgtaaaagagagtttcattagcacttctcaaaatcaaaggtctatattactttttcttttgaatattttataattataaaataaaaataatagagttattttagttcatacatattttattcctttatatttttcatatcaaaccaaacacaataattctgatacaatattcattctaactacaaaccaaacattataattaattcttaccattcttattccattacattactattactattatcattacaccaaaccaaacactactttacattctcataccaaattaaatacgatataattttgattataatatttatttcaactacaaactaaacattataatcaattcctactatttttattccattacattaccattatcattttattataccatactaaacatcactttagggtttctctttcaatactggttaaatgagtgactttattaaggcatacgaacttttaaatatggcaatagttaagccacgtacacatgcatgatagatgagataagacaatttaattcatttatttgggttatataatatgatgaagaaattggtacatatgtacaaatatatattatgtaacatatttcatagacctctccctattacaacgacctagagtctggaccatttgaaatcaattaatatttatttatagagcatgcaatgcatggcttcgattggcctcaacaaatgaggacatttcgtttactcaaataaaaaaaaaatgatttcaaaaaaaattaaaagaaaaaaaaaatgagggcatttccttttttttttttttttgcttaacatttcattttatttggcatgcccaaaagtccttgtacaacaatcattattatttatagcgtgactgagtatatttgtctctttagctaagccaaaccaaacccattcttctctttctctccttttccaacaactacccaaatatataaatacataatttatactgcgtgagaatgacgattcatcaattgaaagatccaagacgatgttaagtggatattttttaaaagggaatggctaaaaaatgcttagtatcttattatgtatcaatattgttatttgtttaagagaaatgctaaaaggcaccagcggtgtttaacatcctcctatgtgtcaatatcgctattggtctaattaagt

SEQ ID NO: 113996 - DNA, 6332 bp, Cannabis sativa
  modified_base (266)..(269): a, c, t, g, unknown or other
attcaattagattagatcggatggaaaaatccaatatccaataaataattagattggatcggatggatccaaatctattagatgtgatccaatgaacacccattgtatgtggggcaaaataagcaaaagataagttttggtgagcctaaagagaagaaaattacttttataggggctgcctgccacccttttcaccagcgccggcctcagcaactcactcttcccgacagggacagcagctatcctcctctctctctctctctctnnnnctctctctctctctctctgacatacataggcagccgcagaaaccctctctctttctctatctctctcacataggcagccactgcaaccctctttcctctcggtctctctctggtaactctaacctgcaactttgattcctggtaaatataaccttgtacatatatatacatgtataggtaccttgatacaacttccatgagttgttggtaaatcagaggtgtccatgattgtccacaattgtcgaatcactgctcattttttaaatattgaattgactgagcatgacttctttggtgaaatatctgtgctaatttgacgatgatgcccaattagttgttgtgtttcatttgtgctttgtgaatgaaagttttacatttattctagctgcttagttaatgtagctaaggtgtttggttaaatgtttgaatgaaagaaaaaaaaaagctaatgtttttgctttggcagatggactagacatattagaaaacataattttggatcatgaactggaactatatatgtaatatgacatatatataatgttagattatggttttgcttttgttaagataaaatgtttataagcttttttagctagctaaataggccatggggggatttcctgccccaacaccaacccactcccacggggaacttatggggacagggtcaaagggatggggaatgcactctcctccccgttgacaatcactgctaactgaagtgagtggtgtgggctatttcgcgccagaagtttgttaagttactctgaatctctttttattcttctcaaacccaatccttcctcttttgttttgtttaatggtaacgtcacatatttctctggtgagatgtagttaggatattgcttgcttttcagtcttcttgagaaaaataacttatgtgcagcttagttgaattgttactctgttattacaatttttttgccttttcaataagccaacattgtgatgctacattgtttctgagtctgctgtctagttaatgaagtagagtggttgcacttttaggtgattgaatgttttctggtctgttagggatattgtttccgaagctatttagagagaaaaaagtgaagtttgagttctacttgtagatcatgcaattggatgatgaatagcttgagataattagttcattctggaactatatatccagtttgcaaggttttttccccttttgtgttaaatgatggaaagtggtatttgagttcaattccagagcatgtaatttggtgatatagattatattctcattacgcaactatatttcaattaaaaatgataatttgtgttgtgtttttcatgaagagttatgctaagagcatcgaagtaacttcattcttattgtctcagaaagattagaatcaagtgtgtgaacaatgttgccacctcggatgaagcaggccatcacagataacccaaagaagctggcaaatttgattgatcttataaatcttcctacgccattaagggagttcatggggcagtctcagacttctcgtcttggctgtttcatgcgtgtctggtcatatatcaaggagaacaatcttcaggttcttctgttctgcacttattttctttttctgttagtaaagtcgtaaactttgtaatgatgggcaacatacaaaatgtttatgctgtatttaataccagctagtgaattatatatatatatatatacttgtattcttttcaggaccacaagttttatctaaaatgtcttagcatatcatattactctaaactaattgatcgttgagcatctgtaaaatttcaatacatggattgttggaatgtctttatgcattgttttgattcaatttatagtgattcattaggatgagaattttatgttacaatataaaagaagcttaacttaatttttcttcctaggatcccaacaacaagaatgtggtcaattgtgatcataagttgaggagtattttattgggcaagcctcaagttgagttagctgatcttccttcattgatcaagcttcattttccaaagaaaacaagctaaattggcaattcaagacagcgcgccttgccttccttccacttccccaaggcgtatctcaagcaagaaacatcctcataacctcaattttggcatgttgtcataagttttgtattttgttttcattcttatacttgtaataagaaattaaaatcagcaatgctactttcctttcaccacttttgtaatgagaacaagccgaacttttcttattaattacttgtcaaggaaaaagtgcttttctttaaggggctaaaagtaaaaaccaagtgtttgttctagtgaaagttttaccattatcatgtttgtcataaaaaataataataaacaaaaaaaagtatagtaagagctaaacgtgaaagtttttcatactatgtaattttaatcaaaactcttaaattatgtaaaaacagtgtagtcaattatgaccgttacccaataacccatgactttcccctgcctagctattataatgaagagtacattaattttcatgctttcctctagacattacaattacacacgtgtgctatatacatactaatttcttttctttttatttttttcctacgtggcaatttattaatgcgtctatataattacatatgctgattcgcatctcataggattcctcctctgtcccacaaggcacaaatactaggccttggttttaaattgccttagtaaatttctagccgttggaaccaaaaattagacagcactgaactgtgtctcttcttcttcttcttcttttctcgaaagagtcgatcttcactttcgttcaatcttgttggcatatttacactaagaaagggcattttcataaccgaatcaatctaccccagtttaaattttgaaagctatatttggtattcacggccaagaaaatgaagggcgtgaaaggaaaactgctcaagaaaatcaaatcgatcaaacccgttggctatcttaagttccaagatcgagttcttcaggtgagtttctcaaatgggtttgtagattcttctcccaataatgacaatattcaagctccgagaaagtgtagtttcgaaggaacagaggtgaagaaaatcaaccggagttgcgtgacagtgcaagaaccagatgttatcgatgtggaagagctgatgaaagaccttgaagatgatgaagatatgggtgaagacttagacaacaaggagaacattggtccgaatatggctaagaagaactcgttttatctcaagcccaatccagagatttctatgagagctgaccaaggattaagtgagaacagggttttgaaagattcagaactatcgacaccagaacgtaaatcaaccccattatcagagatcgacatctcgtctttccggcggcctgatttgaactcgcttagcctatttgatccgagactgctcgatgcatttcatcaagcagttttggaacatatcagaatgagtgaagcagagagaaaaaacagagcagaggaaaataccaaagaggaagaagaagaagaacaggagccaccttcgaaagctccacggatcgaaaaagatggtaatgatgatgatgatgatgatgattatgaccctttagaagaattcgaagagaaatgtcctccgggtggttcagactcagtaatcctctacacaacaacactgagagggattcgaaagactttcgaaggctgcagcagcatccgctttcttctcgagagctttcgggtactgtatttcgaaagagatgtttcgatgcacttagaatttagggaagagttgagaatgatgttggatggaaaagcagttcctcctaagcttttcataagagggagatacattggtggagcagaggaggtgttggggctacatgagcaaggaaagcttaggccactctttaaaactgtcccgattgataggagtgatggcccttgtgaagggtgtggaggaataaggtttgtgctttgcttcaattgcaatggcagtcataaggtcattgctgaagatgatgatgtttgtcagtaccatgtgtgtcccaactgtaatgagaatggattgattatatgccctctttgttgctgaaacacttttttttttttaattgtgtatccatgatttttttcattcatattctttttgtgctggttggagtacaatttgtgggggattatttggccatataaatatatacttgtttcttttgtggattgaagtcagcttcttccttattcaatatgtaaaattcaaagtaagaaataaatggaagattcctattattttttcatgactgaaaatgccaagttttctttacatttctgccttttttctttcaagttttaagatgtgcatgtgtgtggattattccacaataaaaagagaagtgtattgtttaagactggaacattgatctcctatcaagcaatctgcaattttatcaaagtccaaaacatgtctcacttcaagctctttctttaagactttttcacgtacaaagtacaagtctaatttaatgtgtttggttcaagcatgtaggagctataacactcgccaagcttcccaattctgcttctgtggatgatcttgaaattttctgttgtttctttgattgctaagcaacaagattcaatccaaaataaatgcagaatctactagttgatctcctatcatccgggtcagctgcccaatctatatcacaaaaccccacaagtccaatgtgttagatattctgatgtggagaccaaagtgtaaggtgcccaataggtacttgagaattctcttcactgcacactagtgagattgcagagagttgtgcacaaattggcacaccttgttgacactataggttatctaaggtctagttacaatgagatattgcaggccaccaacgattgatctatagaattgatcactttctatgggatcactgccttgtgctgatagtcttagaccagatttcataggagtggagtttggcttggcaaactgcatttttgctctacacaacgggtccttaagatatttagtctgagagagatagaggccttgacttgtttaagtgacttcaatgtcaatgaagtacttgatttacccaagtcttttaaagtaaaaatacggttcagatttgatattaaagctaagatgagagatgagttgttgcctataattagtatatcatttacatagatgagaattagagtggtatttccatggtggtgcttgagaaagagggattgattagctcttgaagatgaacccaaaggaggttaaagtggaagtaagcttctcaaaccaaacttttggagcctctttgagtccatagagtgctttatgtagtttgcacacaacttgaggttgacaagcatccttaaatcttggtggctgcaatatttacactttctcatatagttttcatttaaaaatgcattattcacatccagctgatgaattgaccaagatttagacaatgtcaatgtgagaaaaattctgatggtttcaatgtggtgattttatgttctaaataaaactcatgtcaatataatcttatttactaattaataaaagattgaaaattattttatttttcttgattcacatgttactttcataattatatgtttaatatataattttttattaaatctcaaacatattgtttcatgattatagtgttgtcaacacagtgaaaataatcatgatcatatgcttcaaactatttagtttcacaatttatcagtgcactagatttacattgacgtgataatcagcgatgtagtttgcttacacttatttaagtgaaatgtcatttctagagcattaggaaagtaaacttgtatcagatgtatcggttatacatcagactagatcgatattgatagtagaaaatatattataaacttactgttatatctttataagtcgatgtcacttcgttgatcttaggtcaattaatcttaatcctaagatatttaggttctaggttaattattgttagatattagatgtatattagctgtaaaagaattagatatttagtagatattta

SEQ ID NO: 113997 - DNA, 8823 bp, Cannabis sativa
  modified_base (30)..(34): a, c, t, g, unknown or other
  modified_base (8771)..(8778): a, c, t, g, unknown or other
aaaagaggtatgtttcaaataaatataaannnnnaggtaaatttgattaattgatgaataaaagaggcatttttcaacttacccctatattaattccaagaaataaattttgaatgttatagtcctgtacttatattagaaatgaagagtattcttttaataatagtaaaaaacattatcaagcaaatttttctactattcaaatgtgatttactcattaaaagaagaaaaatacataacaaaatatgatttgcaaaaataacagacagaaaactactatatatgtggggttgtgaaacttgcactttgctcaatccagtaagttttttctttatctaattttctttgagtaacattctgtactttggaaaatagtgtgaacttggataataaatgctcagcatctacactcactggacatactcaaatggtaaagtcctcatcactcttttcgaatccttaaaaccataattttatattcttgtattagtacttgtgcatataatataatgactttggttccttattagtacatccttaatgggatcatcatttgttggctttggctttcttataatttcttaacatttggaaggtttttcttttattattgtggtagagttttcagagatgttgatggatgtttcaaatgctgagatggtgatatcacataataaccgacgccataggggtcttatggcgtcggttgtttttaaccctttagcgtcacttagaacagcgtcggtagcgaatttccccagtaccgacactgaaagcccttaaaaaccgcctctaaaatccaattttgtagtagtgatcagggatgcactaatgctttttctacctgtttcagcatctagaataattttttagtccaattctttttttcatattcatgtaagttatagttatttaaaatattcaataaaattttaagaaaatcagaataatttacaaaataattttaaactatctatttaagtataaaataaaataattatctgtggaacacactatttgaactttatttttaacgtattaaattcttttcgaatttcttaaaattttgagaaaaaattaactaaaaaatcattggtaataaaagtgcggggttgcttagaattttccaaaaagtaaatataaatagaaaattttataatttaccctcttaaaaaagatgcaccgatacatatctatccgttttagtattgaaataattttttaatttaatttgttctcatggtcatataaattatagttatttgagatattctataaaattttaagaaatttaaaaaattttaacaggtcgaaaattatattcaaatagtgtgttgcacacgtaaatattttatgtataaaataatccgtttgaatattattttttatattataaattattttaactttcttaaaatttaaatgaatattttaaatagctataacaaaatctaaaaaaaattcagacaaaacaaataaatggtgatcattacatttacatcccttttgaaagcacccaatataaataatgaatatttagaatgaaatttgaaaaccaagcagcgtccctcttcctcttcttcctcggccaattcatcggcccctagtatacgaccacgacgagggtttcattatcttctctgcatcacaaccggaagtcaaggctgaaatcctcactccccggcgacgctcaccgtctccgccttcttctccgccaccgtctggtatgcagtaacccttccccttacatatacattcaagttaaatcacataatataatactaatataaatatatatatattatgtgtgtgtgtgttttgtttttgatttttgtaggtgatttttcaaactagtttgaagcatattttgttaattaattaatttaattgcaggagtgatgatagtactaataccagtttgggttgcattgcattgtatgaatctatgttaaatttgacacctttatatatatatatatatatttttaaacttgcttgggaagtgtttgatgaaatgtctctctctcttttcatttcgttttgcatttatacagtttgttgactaaagagatagcccaattgaataactaaggagacttagaaacaaaattgctgttttggtctgcttttgataagcaaaggattgctttgtagccatggacttttgtttcttgtatgctacctacttggccttcaaatgtcttgatgggaatttttcatagttttaatgtatgctcttgtcgtattgtatatatatgtatcaaatgtgtatatatagaaatggggatatttgggtgaaatcatcaactattttattttgtttatgagagtatgatatcattataatttgaatttcagattaacaccacaacgccattcattagcggctgaaactctttctattctctaatttcggatctaaaggtaccttattctgtttgtttgctatgagattattgctgttcatttagaaactctttttctagttttttgtgtgaatttgtgttaaatactgaaactttctttttggtttatgattttgtagataattctccaaactattattatttcataattttctttcggtactcagagcaatgaatgtgggtgaccttcacaaggtttgggaaatcaaagtcttgaaaaagccaggggaggaagaagctaggaagattcttgagaatgtggccaaacaggtccaacccattatgcgtaaccacaaatggcgtgtcaaacttcttactgagttttggtatagttttatatattaatctgatttgtaggtttgcagaaagtcccattcttttaataacaaattgctttccttggttttttatatatggtatgaaattatgaatggcagccccaaaaatccgtctcttctcggattgaatgtaggaggaggtattcaagtaaagttgaggcttcgaaggccaaatagagactgggatttcttcccctttgatcaaattcttgataccatgcttcatgagctttgccacaatgctcatggccctcataatgccagcttctacaaactttgggatgaacttagaaaggtatttatttgtagacatatgcatatatagctttcgttatctttagtgcgacttttaaatttcttgtcctgtgtaccctcttttgtttttgggaaaaaaaattgttttttatatagaatatatatgcacatctaatgttagaatttttcttttcaagtgtatgatgcaatgtgttgagatattgcccttctttttggctagaaagatattgtcttttaaggttgatcagtatggctcttgaaaccctggattatcaatatgaacttctgttgttatcatttttgtgctcattgtgtgtgttctccattctggattatcaatataatttttacagtatagggaaaaggggatctttctgtgctagtctaaccgatatgtttgtctttcaaacgtggttatgattagattaccttaagccctgtttaccagttttccagtggggaattcagtaaaccaagtttaggtgggggatttcatatgcccaataattgtatgtgtttcattttcttttatgtgattgaggaatttgacgattttacaggaatgcgaggacttcatgtccaagggaatatctggcacaggtcaagggtttgatcttcctgggaggcggttaggtgggtttacccgccagccacctctttcttcacttcgttcaagtgcactttctgctgcagaaaagagaaaccgaatgaattctcttctaccatctggaccaaagcgtcttggtggagatagcacaattatggttgcacttagtccaatacaagctgctgctatggctgcagaaaggagatttcaagacgaaatatggtgtggatctgcgtcttgtgatgcttccgagtctggagaaggtagctctgataatccagcaggactctcaaaggttgatagcactaatagtgcttatgcgtcagactcaatctctcgaaaaaggagccgcgaatccaataactttccctcagctcaacctcctaattttatagatttatctgatgcttcaccatccgaatccatacgtgatctcaattcagacaataacagacaagaaactaccatgtgggggtgtgaaacatgcactttgctgaatccagtaagtttttacttatctattatgtaatctcttagttggaatatgtttcatagtttcactttatgctttggtccacaattatctggtcccatgttccataccttttttcttacttactattctccattgttgccacctaatacagctctaataacattctctttggatgtgaacattaacatctgttgattaatgcagccattggctccaatatgcgagatatgcgggacaccgaagccaagggacacgagtaacaaacacaaactctggtcctgtaaattctgtactttggaaaatagtgtgaaattggataaatgctcagcatgtactcagtggagatactcaaatggtccacctgtggcaaccctaccgcctaacctcggcacctaaaatggtaaagtccccactcttttcggttccttaaaaccgtaattttccaagttggcaaataatcttctttttactatctgggagttgcattctcctgtatcattcttatactacttgtgaatataatgtaaataaatattgattgatgaaactcacagccaagtaaagaaaatttgtatggattcttccacatcatcttctctgcaattttcaactgttaactgaaatatcagatatgctttttttggttttgggttaagatataattaacagaccccaatgaatctcttttctctgctatgattcttttgtttaatcacctgagagaggtaactcaaatagttttgagtccttcttgggtactcatatggtaattttgtttatacatgaaaattaagttgtaatgttaatgttatttatattgtttttgagctttaaaaaattgaatttgtaattggttggtaatgtcaaagtaaattgtcaaatagcaaaaaaaattggaatagtttattctaactaaaccccctttaatctttgttatggtttctctttcttatcttatcttataattattgattaaattttgggttattgatggataataaaatgagtttgcttccatagtacacccaatttaattttgtgtctgttgatggcatagcaacaatcactaaatggggtcatcatcacaaatacccaccacatttataattatttatataatatgatttgtcccatatatatacaaattcattttgataataataataatcaaaacctctaaacataagatatttttggatttatgatattaattattttatttggccatagcaaagcttgcaagcaattgtatcaaatcaaccaagtatataatagctcacgtgcgcatatattagtctatgaactctatatacaatgtttgtatgataaataagtcaaatggctatgcaattattattatcattaattttttaaaaatatattatgatactatttatttaggggagtggattttgttctgccaaaaaaaagatctcgttcactttataaaaattaaatcattattattaaaaagttatttaaaatttttgttcctgaaggtcgatttatgtattattgtactcctgaacttgttagcccgttaaaaatggtttatgaactattcataatattgttaattaattattttgtcaagttttatcatacatgacaaataaaatgacgacatgattgcttaactagttaccatgtaatgtcatgtcagcggtacttgtatgattaatttaaaatatgtatttagtttagttttatgtaatttttttaattattaatttatttttagtttaataattttttaaaaaagtttaattttttatattttcttaaatgttaaattatacacatggtgctgatgtgataattgactatatggtcatgtcataatttaatttgtcacatgtgacaaaacttgacagaataatcaatttacagcactgaatagttcatggaccatttttaaaaggctaaaaaattcaggagatgcaagaatgcaaatgtcatagttcaagaacaaaaattctaaaatagcaaaaaaataagacaaaaatcctaaataacatttttttttatatatattatcatactatttacttaggataatgaattttgttttgccaaagaaaagatcccgttcactttataataattgaatcattagttaaacttattgaattattgttgattattggaatgataagtatattgaattaaacctaaaatacattaagctttaaagtagtgctattaagtattaagtgtctaatattattataaagtgataccttataaatgataagtaatttttttataataattattaaactaaaatatatataacccgatattaataatatgacacgtggtagtggtgttaggtataatcagtgtcattttctaaattttaatctaaaaatacaaaaataataataacaataaataacaaaatgtatccccttataatattctctactaacttggtccccaataagcatggaaatcactctctagtgtattagcaatagtgcaccaaagttataggacctaaaaaacaagaataaattgtcatctaaagtcaatgttttgatattagttttcttcttcttattttagtaaccaaaatactaaatatttgagtattttataagtataaatatgtgtcactatcattactcaaatactaataataataataaaaaaatcttataactaagcatttgcaattaaaaatatactcaaatgaatagtgaaaattgagtcacaaattcacaataattattaaagaagaaaaaaaattaaagtgggtgtggacaacttgatcataaagtcatttttttttattaataattaaaaaaaataagtatatcaaatgacttatttatttaaagtaagaaagactaagaagagaagattaaattacactaattgatattttgatatttgagcaatgagcattgacttcaatggtgaagaagagaatctttaacaataaagattacacttttgttgactgtttggtaaaatgctttgattttctttactagtttttttttgggtaaaatgctttgattttttctttactattattatatgactcatctcataaatttttgtaaaaaaaaaaatgaatgaagagcatttttcctatctttttcaattattttctgaagttgttctattttcaattcatctaatccacatacacaaaaagaaatattccattgggccaaaaaaattcacacaaaaaaaaagaacaaaaaaagtgtggtccctttacttcattttctatctagattagaaattgttgtaaattatcatgttgctattttttgtagagctttgttattgagggttagtggtgcttagcaccttttataggtggtgtctcacgattagttatcgatattgcttaaaagttattttcttaaattatattggacccgatacttaattacaccaatagcggtattacaccgaggagggtgctaggcacctatggtgcctttagcaattctctctttttttatataagaaatgctaaaagatattattggtgtctaacactctcttcggtgtcattggtataattaagtatcagatcccatataacttgataaaataacttttagagaatattgctaatcaatcgtagagcgccacctatagaaagtgttgggcactactggtacccaataataatattttttattattattattttaaaatatgataccctttattgccaattggcttggttgcaattgtttattaaaatatataatacaagcaaacaataaaaaacaacaagtttatggaaatatatattttttctttctttcactataagcaatttataaatatgcaatatttgattttttttttactctccaatggacattgtacattgattataacaaagtttgtagtaaaatatatattttattttatttttttatttaaaattaagatgatttgcattaattttaaagagatattatactagttcaacgcatcctaacaaattatctcaataaaatatttgattcatttatcatgacataatttgatgttttattttacatttttttttagatttattttaatttattaatacttaaattactgcctttcaaaaaaaaaatagtattagtttagataaaactttttttattagattttttccccactgaattaagataaaaaaagcaacaacaaatgcaatttattgttttttctctcacttttattgggataaaaatgttatttcactttattatattttggttatgttcaaaacttgggtttttttttttttcatttcttttaatcatcaagtttttgttttttttttctttccaaacgtacaattttattttaaaaaatactgatattttccttaaaaaaaaatcaatttttgtgtatgacacaaagcaatagatttgttttcctaagattttacaatagatttgttttttttttccatgctttattaatattctattacctgtgaaattagaagaactttttatcaatttttaaatcaaacaaaaataatttagtattcattttttttctcactaaaatccaaattggaaaactccaaacataaagttaatattcatgtagatggaaaataaatgaggaaattacacttagtatgggattttaaaagnnnnnnnnataaatatggcacatttaagtttggccaatttatatggtattttt

SEQ ID NO: 113998 - DNA, 1287 bp, Cannabis sativa
ctttattgatatagaataatctggattatattgaaacagagttttatttagggcataaaacccaacagctttctacatgggaaacttgaagaagaaatatagatggttgaacctgatggctacaaaagcagcaaaccaaataaagcttgcctcctaaataagtccctatatgggcttaagcaagctcctagacaatggaatttgagattccatgagttcatgacaaaaataggttacacaaggagcaattatgatccttgtgagtactacaacaacataccaattttgctactactatatgtggatgacattctcattattggcaagaacaaactagagattgacaaattgaagctgcaacccagtgcagagtttgaaatgaaagatttgggggaagttaaaagaattctagggattgatatcaaaagagaaagtcccaatagtatatctctgtcacaaaccaattatgtccaagagatattggacaaattctgcatgagtgatctaaaccagttactactcctctagcacctcattttaaactctctcagtcacaggcaccaaagacggatgaagataaggctcaaacggacaccattccatatgtttcatgtgtgggaagtctgatgtattgtatggtctgcacaagaccagaccttgcttatggtctaagcatggtaagtaggttcatttcagatcctggaaatgaacactggacagctgtcaaatggattctaagatacctaaagggcacaatgaacctgggactggtatacaacaataacaacaagaaaactaccgaggttgagggctttgttgactctgattatggagggagtatttacattagaaagtccataacagggtatgcattcacagttctaggtggatgtgtgagttggaaattaaatctccaaaaggtggtagctctatcctcaactgaagctgagaatatggctgcaacagaagtaatcaaagaggcaatttggctaaggggtttcacatcagaatcaggtttcaatgtagaagacattgtagtgcactgtgataatcaaagtgcattacccttaatgaagatccccatgttccatgaaaggtctaaacacatagacatcaagcttcattttatcaaagatgtaattggaaaaggtgaagttcaagtaatgaagattggaacaaaagaaaacctagcagacatgtaacgctctaaataattaggcacgctacccaaaatgcttatgaaaccctaatctcctaatcgggattactaattaaaatagcgcagaa

SEQ ID NO: 113999 - DNA, 6857 bp, Cannabis sativa
  modified_base (3029)..(3032): a, c, t, g, unknown or other
aagtgatgaaaatacttttgtttctttattgatatttaaaagataaagattacattaaaatggagttttatttagggtataaaatccaacattagcacactgtataacgataatattgtgaatttttaaattaaagaaaaaacttaattattgttttaataagaaaaaacttatcttttaagcttttttcactcagcatgtgaccattgtagagctgagtcttctaaagcagaaatatactagtcaattaacctgcaccatacataagatttgagagatcaatcaaacttagcaaattaaaacccaactaaaactaactattttgccacaaaaaaaaaagtaacaaaactcaattaactaacaacaaaagataaaaaataatgatataaaataatagaaaaatttctcgaaaattgttaaaatataaataaaagcaagatttaaaacttatctgtaaaaattgataatagcactctttgaggttgtatccatgagcaaaacgagtcaacaacatactgcaaactagccaaaaatatgatacaaaaaccaaacaaaatggcacaaactaacccaaaaatatggcaccaactagccaaaaagtgaaacactatatccaaaagtactagagatcttatcttttattttttattttgatcaagaaaaagaaacttcattaatcgaacaaacaaattacaaactcaagcacttctcacaacaagatgtaaatatagattgtatatgcttaaagataggaaatgttctaaagtgaaagtagagttattacaaagattgatttgtaaccagagatcttatcttaaaataaaaagaaatagtaaaatcactaagatacctaaattaataaactaaaataaatttaaaaaatatttgattgataattaatataattttgacatctttttgggaagtcacttcccctcattttatcatgtagatgatttctcaggtcaccccctcgtggcctcgccttttcgctcttgtacctctcgtatttcgcgtccaaccgctgcgacagatctgccgtagacaaattatccccagaatcactaacaaaagtcattccatcttgattgacgaaatcactaggaagatccactcgtcttctaggcctaggaatcttcatcgatggtcctttcggtgcaaccctatctcgagggttagaagggcgtccaggctcgaaagcgtcagtggccttctgcatcctcgagggttgctcgactggtggcacatctttcgattgaggtttaggggcaattttttgcgagggtttgcctaccttgcctttacccttgtccatacgagggttcgcctaccttgcctttacccttgtccattcgagagttatgggttcctgcgttattctgctcacgggcttacccttcagtcatctcttccacagacggttccccgtctgtccaggtcaaaccattgaacttgttttgaagttgctcaatggtttctttcatcttagcagtaagcctttgttgttgctctagggtcgcctgtgttgccgctaactctttggttactcgtaccagactagggtcacgctcataatacaaaccatccttatagtatccatctttatagtagtcactatcatcgtcataatcttcagtattttggccatcttcatgaccttctacaacattttcattgttcacttcttgatttttcgccagtggtattcctttttgggttttctgtagcagctacgccccctccatcatttcccaccggtgcatcggctgcgcgagaggtaccttcctccataaccgtatctaacagagttcctttgccagtattgtttcgcgtcttcaccatgatctaaggacgattaacaccaccaagcttaatttcggctctcaatgaaagcaccaaaatgtataccgagttttttagaaactaaatagtttgagagattaaagaagatagcaagtaacgaataataaataagtagatttttatgtggtacatgcgttaatgatccttagtccacaagtctatattattagcctcaatgggcaagtgttttcaagattatgagatattacaatggaggttactttgtttcttttgttagagaaactgtatgtaaagaattgttccccttgccttaagaagaatgaggctatttataggcacacatggggtaaagggcataccctttacctacctagagtttcgtcttccacacgctactaaggtttgtactacaaaaggatgatctgaccattggatggtggcaaccttcttcatcgtgtggtgtacaacaactggtgaggactttcgtacaaccttggacatgtgtcgcgcagaggtctgtcctttgcgaaatagtctccacccaggcagttaggcaaaagcatactcgagggtgcgtacgcgcactaccacgatctggcacagtggacaagatctgattctgtatcagaaaaaggtgtaaccatctatggaacgatattttgcaagaagctgacgtgtccaacgtctccaaaatccttaccgccttctgggatcctcaccgaaggatgttactcccggaggccatcgtctctcgttgcctcctagatcaagagttgtttcttttagttacctcgaatgacttatgtagtgaccatgttctcccattcgatcatgccacgtgtctaattgatgaaaacttggataacaattttaattataatcaaattattgcggcaatgaattgtatcaaacaactctagaaaatatacttggtccaactgttactttttgggaattttctcctacgttatagactttaagtggcaatcttattgtcatgggtatgaaagctatagttgtgttagttgtatacatgttatgttagttatgacagttattatagttacttagaattttagttggctttagagtaattatcaatctacattaattatcttgtgtacacctatataaatgggctatatggaggagagaggagcgtggttccttaagaaaaatggggagaatatatatatatatatatnnnnatatatatattaattaattacaatatatatttataattaaatgtggtgaatataaatataataataattttgacatatattggttaaattatctaatacatattatagaaatttaaatgcttaataaaaatatataccccatcaactttagttctgggttggtctctgtatgcaagaaactaaaactataaatctagtcaaagaaaattatgcattatagaaaataagtaattcggtataaaaggaaaatgtttcattttctttcattttattatcagcattgtaattgttatatgagtcgccatatgacgtgtacggacagaagtggggttgcacttagcgtagccgcgtctcttacaaagttgaacttgaatttgttgtttaattcttacatggagcgagtctgcaatcaatgcttttagttttagtccgttttattctttcccagacatatataaaataaaagtatacaccaaaaaattaataactttacatttttttaaaaaaaaaaaaaaggaaaagttgaaaaaaaaaatcattggggttggcgttgttcatcttagacccttatcaaaacaaaaaccaaggcaaagtggtattaattaagtgattaaaccaagaatgtaaaaaataataaaatttctaggtaacataataatttaagaaaaaacttattccctcaatgagatttgagagacagtgtgccacagttaacggtagattacgttgctaaaatgtcccctgttttgttttgaccctttcgattttatccattcctttatatatagaagcacacatggaacacggaggtgctcttcctttttccttctcatcaacttctgtgatggaatagtcacataaaatggataaagtaatatattagaaacatatatagagacgaacgaggatataattatagtttattaagatgtaaattagatatatatttggaaagtaatcgagtatcttacatacataaattaaatacatatatattttatatatttattggaaaatgagaagcagggggagatggatggagtagtggtgatataaataaacatggttcttcttcttcttcttcttcttcttcacgagaaaaacctcaaaactcataagaaagagtgtaggagctgtgttagagagagaaacagaagaacatagatcagttaagaccctccactccactctactagctactaatatttactcacttgaacaagatcatgactgaaagtatatgtttcttcaacaaggtaatttgcttagattaaagttttcttttgtttcttaatgtgtgcttcttttttgccccctaagctagctttcataataaaaaaaataataaataacgatgtaggtcttgttatagattattttccttttattgtattttaagaagtgtattgtggtattacaacaaacacaattataggcatattttttgatctgattttttcaagaaagatccattctattgccgtttctctcgtcatatatttctccatttggacagactgctttgacagagaaaacagagaacaatatcaacaacaaacatgtacatcatatcaccttttattttatttttttagctaaaaccttctctttttcccgttaatggagatttttaaatggaagacaccacaatatggtcctttctctctctctctctctcacacacaattcctgtgttcctgaattgttttattatcacatttattaattgctcatgatgaattacaggacacactggtcatcaaaaccccaaagaaatctccattgatattgagaatggtggttctactcttttccatggtttgtggagtatatatatgctcgatctgtttgaagcaattaagtccccacactaaggctaagttcttaaacatcaaagttattgagcatgaaaagttttgtcccttttcgggtgatctttacatgcattatccaaaacctcaaacattcagaaggtataataatgaaaactaattatgtatgttttctcggcttcttttaatttcgtcaaatcgagattattattcttattattgttatgtgttttttacagggaagaatgtggctgcaaccctgttgggtactttgctatactatcaatgcagagatctgggagtggatggtttgagactttgttgaataatcacaccaatgttagttcaaatggggagattttctccgtaaaggaaaggaggagtaacatctcttcgattctaaagacaatggataaagtttataaccttgactggtttactagtgcttccaagaatgagtgttctgctgctgttgggttcaaatggatgctaaatcaggtaattttacctccaatgcatcaagatttattcatcttttgttaataataatttatttaacatattacaactcctaactatgtatgtgtggacattagatataaatcgattatttttatttatttatttggtgggcttgttaaacacaaacatatatgccaaccattttgtaaagtatggaaaagtgggaaactttaacaggttgtaccccaattacaaatggaaagggagtttgttatgttgggccatgtttaaagtttacgttatgaatcatatctacctgtatttcagagattagtaaattttgtattcgaagaatattatgtgtgtatgtggtgtcagggtgtgttggccttagaaaattaagcaaatgtagcatacaggaaattgaaaagacaatcaactttcttttcttttctttttccttttctttctttcttgatggtgctttagctttatatatttatatatgtcaacagggtttgatggagcatcacgaagagataactgagtacttcaaaaagaaaggagtgtctgccatattccttttgagaagaaatttactcaggagaatgatttctgtactcgcaaattcttatgataaagatgctaagctactaaatggaacccacaagtctcacgtgcattcaccattggaggtctctctctctcatatactgggtcatgtgtcatcaccatatgcttgttttatatgcatttttctgtgaatataattgcaggctcaaatacttgcaaaatacaagccaaagattaacgacacattaatgataaaagaactgaacaaagcaaatgagacaacaaccagagcattagaatatttcaagacaactcgtcatatggttctttactatgaagatgttatcaacaaccggaccgtacgtaatgcttatcactattaattaacttgacttcctaagaacttggttaattattactgactttataaattaatgcaactatggccatgcagaagctgaaagacgttcaggagtttctaaagttaccttacaaagagcttaagagccgtcaggttaggatacacaccgcccctttgtgggatcaagtccagaactggcatgatatccggaatgcactcaatgggacatcatttgagacatttcttcattaaaatttactaaggcttaatgcaagacggtgtaaatatcaatttcatttcagcatcaatttttgctcaagagagattctagttaccattcccatttctggtgtatttatataaagcaatttgtggaaacagaaaaatatgtttccagacaactgtttttacttgagatgtaactaaactatctacctatgctgccaaacaacacgttcaaattaatctctttccaacagtttgtcttaatgacaaaaattaccaactttttttttttttttttttttgttgtggtaaccgataaaggttaaaataacaagggtaacaaaagttacacaaaaggtggggaggtttctt

SEQ ID NO: 114000 - DNA, 2554 bp, Cannabis sativa
  modified_base (49)..(67): a, c, t, g, unknown or other
  modified_base (2518)..(2518): a, c, t, g, unknown or other
aaaaaaaaaaaaataatatatattttttaaaaaaaaaaaaaagagagannnnnnnnnnnnnnnnnnnagagagagagagagagagtaaaaagtgtcgttttaattttacgacaactgaaaacggtaaaatcgtataaaaacatgtcgtttatacttttgcttaaataaatcatgatctcgattcgaatatcttttagggtttattctgatcgataactcgtcccccattcccaattcctttattttctcaaattgctcgtttcgaaggtactttcctttttcctcgctttctttagttctaaaattttttgtgaaagctgagcgtttagcgtgcatttctttaattgggcatttaaatagggctaaattatcataatgagtttaaagatatctatggctgtattgtttacaatattgggttttaggatatatatgacaacgacaatgaaacaaatttaagttttttctagttcttgtgataaacttgatcttattatctgcttatatttgtttctttgtttgacttatagtttgagcaaaggggctgagtctgattgatctgttttgtatagagtaatgtgaagtcaaaagtttagaagattagatttataggcaattgtctggtatatattgaaagcataagcatcaaaattcatgctttattaataccctgcttttgaatttgaattttgattttgatttcatatatgtatagttttaatgtcccatgatcttcttgttttcagtcaatatttgatcttgttaaaaaaaaagagtcaatatttgatcactcaattacttggtataattatgatgtttaacagtctgttattacggacttgttagtgacctttgcaaataatctgcttttgaaaattgctagtgcaataacatgactttggggtaaactaacattagatgatcagcctgtgttaagggtttggtaacaaaattcatgtttttttttcatctgattgatcgacacaatttggttggatttgctttttcttttatagatggaatcaaatgcagaccctgagaaccaattgatgattgaagcatcaccagatttgcaaattgaccctaaaagagcccggtttccgtgctgcattgtatggactcccattcctgttatttcatggttcattccttttattggtcacattggcatatgcagagaggatggtgtgattttggactttgctggtccaaattttgtgtctgtggataactttgcttttggagcagtggctcgatacctcccaattagcaaagaaaaggtataataaggaatttgcttggcaccttatagcacttcaccaaatgccatagtgatttgtattagcttcatcattattgccagctcatgcttctccatgattttgatcagcggtgtcatgcatttccttgtccgagtttgtatattagtgaggatcaacagcatgatgaacaacctgaaaatgagatattgacatgggatgatgcaattcggaagagcacgcaggaatttcagcaccgctcttacagccttttcacttgcaattgccattctttcgtggccaacagtctaaataggttacggttcaatactggtgggtggaatgtggtgaaccttgctactttaatctttctaaagggtaaatgggttaacagagcttccatggtgaggtctctcttaccatttcttgtagttattagtattggacttgcttttggaggctgtacctttctaatgttctgggccttctttacctttttccttgttggttggttcttctttggtacatacattttcaagaatttaattgaattgtaacttctgccattacatatttatatatcaattaagaagattgtaaagctttgaccacggttcttaaaatggggaagaagaagaagaagaagaaagacactgtagggattgagtgctttttgagtgagagtatattgttaattcattcattttgggaagatttttttaagtgtggtactctggacacaagtatacatcatttctcataaccttattgatttgaaggacataaaaatatgcactcttaatgagaaaatactatttggtccaatattttcatttgtaaaagaggactgatattcaattgaaatataatatcttcaagttatataatccattcaaagtgtcataattatatactgtattttaaatactgatcatccttttgtaacaatataagataattctgaaaattgtaattattgtatttaacgaaaacctctaaattatagtaattattgaaaacttgttcattctattaaattttgcccagtttttaagcgggttcttcatgtagtcataattcatagtgcttgctccatatgtagtcataaagaatttacaagtattaattctaagaatacatatactcctgatcccattctgaccttgatatgtggaattgatttgctccatatgtgctgagattattcgggtgacatggtccaagcccaataattatattatttagggaaatttacatgntatactaacttttgccattttcttacaaaaatactg

SEQ ID NO: 114001 - DNA, 4683 bp, Cannabis sativa
  modified_base (628)..(641): a, c, t, g, unknown or other
  modified_base (847)..(852): a, c, t, g, unknown or other
  modified_base (963)..(978): a, c, t, g, unknown or other
ttgtcatattgtttctcttagaattaattaaagcaactattgtttaattaatattattttaaattttaaaagattttgtatgatatttaaaattatacatttttactaattttaatgaataaacttttgataaaaaatctatgaataaatttgtaataactctctcattaaaattattaattaaatttaaaatacattagcaaaaccaaaataaagaaaacgataaaaagaaatctcacttgtatgagattatttatcccccctgctgaatgtgataaataatcctaaacagatgagattagttgaattagttatttaaacttccagtatacccacacactggactggacagattagcctgtctaatacagtctattcctgtgtaccaaatggacccttatgtttaactgatggaaactacaccatttcttaaaggaaaacttacaaaaatactgaattttgagttaacttttacaaaaatactgtcacacggaaattttttcaaaaatactatgtttttataaaacaacagtgaaacacaaaacagaataactaaaaacaacagttgaacaactaaaaaacaacagtagaacaacagtaaatacttaacacagtacacagtataaannnnnnnnnnnnnntttgaaaaaaattccgccccacagtataaaagtaaaaaaattagaaattgcagtatgtggtgtaattaacccttcttaaatgcaacttaactctgcaaataaataatagataattacatgagatatatttttacgtttaattttttttttttatatttttacggttttccataaaaacaacatgaaaacaacaagaaaattacatnnnnnnaacatgaaaataacatcaaaacaaaaaaaaaacatacaaataagaaaaaaatcaataacaaattaacaagagtacaacataaaaatgtcgtattttctgtaaataaaatcnnnnnnnnnnnnnnnntatttaaaatttcgtgaaaccgtatttttgtagttttttttgttgtttttgtgtatttgtgaaataatcccaataaataatataattacattaaaatgttatttttcgttatgaagattcacatttgatatgggctgaattgtaggcccaataaagacaaagcaccaaaaacttcaaaagcccaagtaggcatcgactataaaagcgagagataataactttgtgcaataccctaactccgtgagcagcagaagaagaaggacgaactcaaggttcaagccgcctctgctaccatgaaggtgattcttatagctgattcctctgtttcatctaggatttttggttactgtaacgttatggtgctgattatatcttcctttgcattttgcagttcaacatcgccaaccctaccactgggtgccagaagaagctcgagatcgacgatgaccagaaactgttagtccttttctgaaacttatttctttgttagtgatttgtgatcatatctgtataatcgtctttgttttaagcgaatatgtgttagtttgtactatattggcagctaaagagtgaacttgtagcaattttgtttatgatattctgtattaaaggagactatttgtcactatatatctcgaagatttaatttaaacaagactagtggatttgtagctctttagtgtttttctatactattgttactcatttctgtaattttaaatctagtttagaagtgatattatttttgtttgcggttcggagctaggttattgatttgttttgtacatgaagttaagtatgattattttcattttgtagttgatagagctggtgttgtactgtagctgcttacattttgcaatcttttgttatagagttgctgttgtactggagcttcttacattttgcaatcttttcttttttagagctgcggttgtactgtagtttcttacattttggaattttttttttatttgcagccgtgcctttttcgacaagcggatttcacaggaagttagcggtgactccttgggagaggtttataaattgtgttttctgtgttttacttttattgcaatgtttgttttcctctaaaaaattttgttgttttgttgacaggagtttaaaggatatgtattcaagattatgggaggttgtgacaagcaaggtttcccaatgaagcagggagtcttgacccctggtcgtgtgcgcctcttgcttcacagaggttggtgtatgcttttgtttgtgtgtacattgttattaaagtttggagaaaatatcaaccgttgtcaattccttttaatttccaggaaccccttgtttccgtggttttggaaggcgtactggagagcgaaggagaaagtctgttagaggatgcattgtcagccaggatctctctgtgttgaacttggttattgtgaagaagggagagaatgatctccctggcttgactgacactgagaaacctagaatgagaggccccaagagggcatcaaagatccgcaagctgttcaacctttctaaagatgatgatgttagaaagtatgtgaacacctaccgcagatcattcacaacaaaatctggtgagattcacaatcctcatacattgttcagttaatattccagtttgtgtggatgtgtaattgctgtttaaaaattaaataccagcaatgcagctgcggtaatctttcttatgggttttaccggatgtactttttctttttaaagaaatgcatatttgagcctaaacgtcttttttctttctagtcttaacacattaacagatgccagtaatgattggtcactccattgactttgcaatgatttctgaagcattaatactttgagactatcttcatgtttgcagggaagaaggccagcaaagctcccaagatccagaggttggtcactccattgaccttgcaaagaaagagggcaagaattgctgataagaagaagagggttgccaaatccaaggcagacgcagctgagtaccagaagctccttgcttccagattgaaggagcagagagaacgtcgcagtgagagtttggccaagaaaaggtcgaggctctcttccgccaagccatctgtttcggcttgaaaaagaatacaataggtttttgttaaaacatgagtctcattgttatttttgatattgttccgctctatctttaatgtagtagtgttgctctgaagtacttttctatctgacaactataatttctgttttgttaaaacttatgtgaggagtttgaatttgaatgaattttcgttggtgcactggtcttgcatcttcaacagacaaagttccttgtttttgctttactggctgaccatttatacttaacaactcttcaagattcagtcaatttaaatcttatatttggcaaaatttaaaaaattaatctaaagggttcaaattaagaagtgtttaatgtgttgtttttgttatgttacaatacccgtctcagttgtttgtcttttccaaatgtagagctctagctagctagcacaagtcgctttattatgttggtttgggtatagttttcttgatccccaatctatttgttttgttttccccgtacaggaataggcttcttccttttgggttatgacatgtggagtatgaaattttgtgttagacaaattatgccattcatgtttatgttcttgataaaacaacaacacgggttttctaaaataaatttaggtgtcatgggtcgtgatcttgttagctatgtatcataaatttacgattttgacgcaaatacgatatgatgacactaaaaactgcaatttaggttacaaaatgatttgtacagaatcatttgcaggttagacgcgacacagtttatgtgagttatgtatgtgttttataaattttgtgttacgggttttaactgtgttggtagttttcagcaaattcaagatctcaaaattatacactaacacaaattgttactcttagattgtatagaacttttgctgagattttgagattgggtaatttgatgcaattaagcttaaagaaaatattcacttactaaatgaattttgaacacatctagataggatatttcagttttatttgtaacttttccaattacatcgatgcttagcgacatctcataaacaatttttgacgtaaaggaaagcagcgcttaattataatcccataaaaaattaatttttgagataaaaataatgataaattgatgctcaacgacttatttttaaaattgatggtttagcgaaaatccatgaaacaaaaagtgacgcttaacgatagtttgcgatgaaaaatgatttattttgataactttacaaaatacacttttatcgtacacacaataatttgctgcaaagtaacattaaaaaaaattactgtcaccaattgctcacagccattaatacctttgtaaaatagtaatttggttaaatgctgctccattaaatactaccatcgtgaacacatgttagctctttattgatcctaacacgacaccattactatttttcaacgtatttaatgaaaccaaaagaaaaaaatataaaaaaaaattagcatataagtacaaaaataaaattgaaagggtaaataccattttggaccttctgttttacaaaagttaccaattggaccctgtgttttgttaaatgacaaaatggaccctgtatttttaaaatagtacaaatagga

SEQ ID NO: 114002 - DNA, 1100 bp, Cannabis sativa
aaaaaaaaaaaaaaaatagagttttggtgatgtattttaatagataaagtagagaagttattgagagtacttgtaaattttaaagaagctttaaaatagagaaggagtttagagcatccgattctgatgtagcgtgttttaagtttagttctttaaatattttagagattctctatcttaaagcatgtgatgtgagtgttctctaagagcactcacaacaattttttttactctatcttttaaaatacatcaccaaatctctattttttctattttacaacactcttttacattacactttacaccatacattagtttctttaaaatatatcacaaaaatcctacttttttaaaattttaatatattttatttatttcatatatataatattaacatatacacatatcctcatataaaaataattattaaaaatcaaaataattaataaaatatatttagagcctattttataaatgtaaagcatgagtaatgttttttaaagaaattttaaaatgaatgaatttagagtatctattgtaacgtgtttttagtacggttctttaaatttttttaaagttcctctattttaaagttgttgtagtaagtgctttaagtatgtgtattgattttgtttcgattgtgtgttgaatattatatctgtggtataatgcaatacacgatttatacatgtataataaagtatcaaattgtatgcttaattaattaaccttaccgtgttattaaatacttaaaaaaatagaatattactcattttctcttgtgaaaaatataataaattaataacacattctgttttcagtttttttttttttttttgaaaagaatataataatgcttaattaatcgaaaagagtacgtttccttgtaatctctttttttttttttgtaccaacattgcaaatgtgttattgaatgcaagcgaataatataaaaacttgtaggaattaactctgattttgagtaagtaggtagaccaaattccttgtttgactaaaattttaatgttgaattagttttggaggcaaggaaatggaaactttcaagcaatcttgcaataacacaaaaaaaaaaaaaaaga

SEQ ID NO: 114003 - DNA, 4572 bp, Cannabis sativa
tttgggctttgggctttataaggaaggtaggggaaatgaggaaagtaaagtggtggcgatgatatttggtattttataccaaaattctgaaaacaacgaaaaaaaccctaatttctcactcttctttcgttttcaacacatttcttctctctctccccgccgatgaggccactcctctaagccaccacgaagattcaccggattcccttctctcgccttccctccttccaggtttctttctttctgattttatgtgtatttatcgatttctgcattgaattattgcgctttttgtttcattcggtaccttattcatgctttgtaatactttctcaattataattctattcttcacttttcaagatttgaactgaatcacatgttgtgtgtattgttcaagattttatttctgttcctttcgagcgagaaagtagtttgcatgagttggcagggaggctagtgttgactctagattaaatattactattcaacttttttatttttgtgggggtaaacgaaaaatttagttaattatgatgtgattcgaaataattgagaacattatggtgtggaagcaaccctttttatatacatgtatggtaatggttgagctctttatgtttatattagtttacactcataacccatttgaaaaatgtcaactttcttacatatttgtgattttctgtaactttttatgctaggactaagctcagttgaaccttatagtgcaatggtaaagtgattgtaaaaaatgataaaagatgacatcgaaagtaattctcttttgttttgaatggatgtggtttgttatgtattggtctggatggtggttttgtttctttctaccattgaatagtgatttgatatgattgattgcaaaggattgatcttggttttctgggtatctttaatttatgcagaagatatgactactcttaatgtttttgtgaactatgatgggcattgggatgataacaaatgctacgttgactttaagatgactggtatattagtgcctaaggacactacctataaaaaactgttgggattattgtccaaagagttgaatatcaagccttcagaacaatccataactgtccaataccaagtgagtccaggttctccacccatcaccatattgactgacggcggtgtcttgttttacttggagttgaaaaagaaggatcctgtacttactggcttcccattgtgcatcactgttgaggatagacggttggccgtcaacaacccagcattgccaataaatcaagttcaaccggttgaacaaccaaatgaaatagcaaatggagaggaacaagatgaatcaaatcatttgaacgcgatgcctactccaacgaacagtgataatcacacatcagataatcacatatttgatgatgtttatgattctccaatggaggtggaaacagtagaagcagtcaacaaaaatgaccactctattcttactcgctcacgagctctacgagaagcaaaagctagttctagcaaacgacgaccatacaagaagcggaagctgaagcgcttggctgttagtgattatgaaacgacgaatactatcatatcggagtaccattattcagagattgcagctaagcagctgtataaaaacaaggatgtgttgaagaaggtcgttagtatgtttgctatcagaaacaattttcagtataaagtcaggagatcagacaagaggttttttttggttacttgcttggatcaaagttgcaagtggcttcttcgggcatcgaaatatttgaaaactgacatgtttattgtgagaaaatatgttccgacgcatacttgctctttggatgttaaaggggatcatcggcaagctagtagtcgagtaatcggtgaatgcatcaagtccaagtataagttgttgggagaaacatcttattcgccatatgacatcatgagagacatgaaggatgaatatggtgtttcaattagttatgaaaaggcctggagagctcgagaatgtgccttggaaatgataaggggagccccagaagaatcgtatgaaaacattctttcttatctttatacgttaaagaataagaatcctggatctgtaactcacctgggaacagataatgatagtcattttaagtatttgttcattgctttgggagcatcactttgtggttggcctcattgtcgacctgttattgtggttgatgaaacattcctaaaggctaagcatagtcgtaccttgtttacagcgtgtgctaaggatgccaacgacaagattttccctttggcttttggtattagtgattttgacaatgatgcatcatgggattggttcttaacaaagttaaaagatgcatatggtgaacgagatgggttgtgcatcatatctgaccaacaaagtaatatctgtgcgtcagttaaaaaagtttacccgaatgcaaaacatgggttctgcatgactcatgttcttaataatctcaaggccaacttcaaatcttgtggaaaagaaattgttccgacttttattgctgctgctagatcgtacattaaagacgattttgagtactacatgaaacagcttgacaacattgatgttggtattcggccttatctagctgaagtaggacacgaaaagtggtcgcgagcgtttttcactggtgggagatattcaattatgactgctaacattgccgagtcaatgaatattgttgatggttcggctagagaaatgcctgtggcggctttggttgagtggctaattaattggacggagaaatggtttacagaaaagagacaagaagctgaatcaacagtcacagtacttgcagcagctacagagaaggtcttgcgagaaaatcaggttgcagccctgcctttggtggtatgtctaccaacttatcaattcttttttctttctttcttttgtctttcaggttaccaagtaataattggatgcgtacattacatgaaccatatcatttgatttgtattgctttgcaggttttgccaatagattccaacttatcacgagtctatgatggtgacagcctttttattgtgaatttagatgagaaaacgtgctcatgtcgtcgatttaacttggatcaaattccatgtcgacatgctttggcggtgatagcaaaaaaaaggttgaatccttatgcatattgctcgcgctactataagagggaagaattacttgcaacttaccaggaaataatttatcttcttgggaatcctcgaacttggagtattccggatgatgttaagtcgatggaagtcttacctccaatttcgacggagaagtcaagcaggataaaacgaaagagattatcttttagtggagaacacaactctaaaagtaggtgtggtaggtgcggacagcctgggcataaccgaaaaacatgcaaaagtctctcaagttcacgatcctcactgtcagtgggaagaagatcaactcggttgtcaagaaggatcacatctgatgaagaggatccatctgatgaaatggacgatgaatttcaatctgatgaagctttaaatgaagtcccatttgatgatgctgcctatgaaactgaagttgtgaaacagttgacgtttgatgaagctgccaatgaaaatgaagttgcccaagtaaaaccatctgatgaagttgccaatggaaatgaagctgccaatgaaatgccatcaaatgaagttaagactgaaataccatctgatgaaattgccaatggaaatgaagttgtcaacgaaatgccatctactgaagttaagaatgaaatatcatctgtaccatctgtcaaagtcaccagcgaattgccatctgtcgaagtcgccagtgacataccatctgaggaagtcgccaatggaataccatctgaagttgcgaatgaaataccatctactgaagttgcccaagaagtaccatctactgaagttgcccaagaagcaccatctgctgaagttgcccaagaagtaccagttgcctaatcaaacatatttttttttcttttagctgttttactcagtactttagtagggttgtcatggtttgtttcgttgtgttttgttttgtttgtatagttcaattgagaacttttcttattgttagaaggattgctttcgtaggattgtcatctatgtttaattaagaaacattgcatgttattctagattgatattgtgaaggaaactgagaaaaacacattgcttaaacagtcttccagcaaggtatccccctttatcagcaggtacataatctgttccttgagccattttgaaatgacatcttttttacactctggcttttgtaatgatttataattggttgaagttgctgtcttctcttcatatagatatggtgattgatgagacccgagaactccaactcaagaacacaataaaacagtaacaataataggagtagaatagtagcaaacaataggaaatgtatattgaatgtacgagaaactcaattacaaaggataggagcccttaggctcctttggtgcaaatagagatttactcaaacattgcataccactcaattccccttaatattctatatatactatt

SEQ ID NO: 114004 - DNA, 4610 bp, Cannabis sativa
ttagtgctaagtatcctactaatcccatgtctaagtataacaatcattacagatattatccctaaaattagaattatttaagaataaacaaaaatttacacaatctcatcctttttgcctctcttggttcagccacaaagaaacctcaagaagctatcccttttctttattaattcagaccaaatactagagcaatttctacaagaatttaaatggcattgaggttatactctaaggtaagcccttactcttatttctcttttattttttaaaagaaaatgctttgggtgagcaagcaattttatttctgctctatgtccgagcttggggaacttaggggctaatttggggagttgaatttgagtgttttcttctatttttttgcccttgttgtggttttttatatgttgagaaagtttgagtttttttaactcaaagcttgctcaacaatggcaagttttttatattgtgtattgatgatgcaatttctggttggtatatgttatttatgatttttataggtgttttggaggttttggttcgagttggggtaaaattgaaattggtttaaagttttttgtgttttctgtagaaaaacaggcttttccaggcaaaatcacaaagaacgatttaggagtttttaaatctagttcaccggttggggaagttttgggagcctcagtttttgcattttattgatatttagggtattaccacactattcatcgataggaaaatttttaattttgaatttaactcttttaaattgagttagcgagtcacttactagttttatgtaaattgtgacttagggcatttaaatcatcgagcagcagttttcactcaggttgaccgacacacttgaattaagaataaaggtaagattcgtataatgatatatatccatacatgtttaacatacatattttatgatttcctattagttagcatatcagtaaaagtgatattagtatacttagagttacactgaatatcaactgatttatgattggaaatatagtatgcattgatgttatcacattagtacgactagagtactaaatatacgttgatattatgatcaatcatactgccattaagaatatttgaaagttgtacatgttggacgtgggatataaaattgattaggtgtatgggcacctagttacagtttggttatatgtttatatctatacttttcttaccgagtctatcgactcacaaatatttttacatgtgtaagtaaggtcaaagcaaaggctgagatgtagtgagtcttgagttggatgaagattgtacatatcgaggcggctagactttgaagtgtttgggtctttgggatagttggcctcatattttgatattcgctaggcgacactattatatgtagcattttgaaaatgattgtaaaaaaaagggatcctagaatcgtataagctcatggttatttattataagtttatttaatttacgaaaatttaattaattacgtttttcaataagtccttttattagtaagggaatgcacaataattagaagaaaacactgtagcgtgcctaaactagtaaggcattaaaattcggcatcagatctaccaggttatctttcaaagattgtcatcttatgtacaatcatcatcaaagatatgctcgacacatggtttagtaagcgtttacgtgtttttagtagtttaaattagtttgaatagaaaacgatgatatgaagaatattagtagcttgatagaaaattaagagcatgttaagttcccatgtttatggtaattagtttatagttttgatcgatgcatgactgacctaacctgtgattttgcaaacacgtcctatagaatggagtcaatgaaacactagaggtcagggtaaatggtcgaggatggtggcggtcaaggagaatagaattctcctcatgcttgtggtgtcagtagaggttgtggtaggctttacagaggtattcataaaaatctaccgcatgctccacaggattaggagcaaagatttgcagaaaatacaagctaggattcaacaaaaagataaataaatttagaggttgaggcaacatggatatcctattgtgtctctacctcaggtaccattcgttgtagctttggtgttgctagcagaacagttgttgctcttaacccattaaagctactatatgagagatttaggaagtaaggacctccaattttcctgggaggccttgacctgatgaaggccaagcaatggctaactactataaatagaatttgaattttatgggagtcactaacaatgctagggtgacttgtgctccctttcaattccaagatgatgccttggtatggtgggatatggtatccctaactcgagacattttggtaatcacctaggaggagttccaagatttgttcaatgcaaaatactcagttggttcaaggggaatcaatgtcgataactaagtatacgacccagtttaacaggcttgctagattggccttagaaattgcacctactaacttaagtaagaaagaaaagtatttggatggattcaaccctaaaatcaagcatcatctgatgatcaccatagatgatgccactacctatcttagatggtagataaggaattatgtgttaagggtgtagttgagtttattcaagagccccgaggaaatcacattattggtggagtcacttctcctcttactttttagatttggtaagaatggtagtgattcaacctttgatcataagagaaaagctccaccagcatccgatggtttgaaccagagcaagagattctaagcgaatcaggatcgcgatggttgttagggtgattctaaaggccgttacacttacccaaaatgccctagttgtaagaagcatcatctgggtgaatgtaaaggcatggcatgtttccaatattgcttgatgggccactacataagggattgtccataactaaagagggaagaaccaaagcagtaggcaaaacccatgctagctcgagtgtttgtcattacttaggctgatgctgaggctagcccttcagtggtgataggtcatcttcttattaacaacttcttttattatgtattattaaaatttagagctacactctcacatgtgtgtgccaaagtaattgacgaattgggtaagccttgtgataattatatgatagggtttggaatcctatttcctagtggagagttagttatctccaagagaggggttaggtctatatggatcagaatggatggtagagagtgaagtgctgatcttgtcgagctggttttaggatattttcatattatccttagaatggatttttttgtcaaaatatgcaactagtacagattgtaagaggaaaattctgacttttcagcgtaaggttgaagaaccatttgtcttcatgggaacaatttagggttcccaaattctgatcatctcagttttgaaagctagagaccttttaggagatggtgtattgggtttctagtagttgtgatagatcctagcaacctcgaaatagttggacttgaggacatcaaggtggtaaaagagtttttgaacatatttcctgaggaattacttgggttaccaccacaaagagagatagactttgtaattgatataacagaaggagtagagccagtttctaaggtaccatatcagatggctccaataaaattaaggaatttaagttacaactttaggggatgcttgatctggggtttatacgacccagtatatcaccatggggagctccagtgctgtttgttaaaaagaaagatggatcactttgtatgtgtataaattatcgggaactgaataagttgacaattaagaacaagtatcctctacctaggatcaataatttgttcaatcaacttcatggaaagatagtcttttccaagattgatcttcgctcaggctatcgtcagtttagaatccaagagaaagacattctaaagactgcattttttacaaggtatggccactatgaatttctggctatatcctttgatctaaccaatgctctgacagcttttatggatctgatgaatagagtgttcaaggattttcacgatatatgtgttatagtattgacatccttgtgtactctcaattagaagtagagcatgaacaacatctatggatggttttacagcgactatgagaacacgagctttattctaaatcaagaaatgtgagtttttggttaccaacagtgtccttctatgtcatattatcgataaagatagaattatggttgatcccagaaagattgagttagttagagactattgaaatcgaagacagttactaaagtttgaagttttaagggattggttaggtattattgtcaattatggaaggatattccaagatttccatgcttttgacagaattaacaaagaagaatcaatgattcttatggacagacaagagtgaaactagttttcaagagttgaagcaacgattgattatagctctagtattggctttgctgtcagatcgagagaaatttatgatttattgtgatgccttgagacaggatttggggtgcattctgatgcaagctaatagagtcattgcttatgcttcttgtcag

SEQ ID NO: 114005 - DNA, 3154 bp, Cannabis sativa
cgaagagcggctatattccctagtgtatagatatatagagatatataccttggaagttctaaaggctgatttggagttaatgcgatattcatgcataacccaattagatttctctcctcttggggctcttcctctataaaagaccaaagtctttttcatcccaaccaactcagaagttactgagttaaaaatctctttatcttttcccgtagtcttccaatatccagtgtttgtcgctcggtttgttctcactccagttggatatttccgatctctaaggctaaagaaataccattctttttctcccatcttcgcctttgctaatatatattaatattatattcaatagaaaaattaattagttattacccaattagggttttcttatatattacgtatgtaaaaaaaaagaagaaaaaatatagtaaaaaatttgtaccagggagttcccagggttcagatttgttgagatcaacatcaccaattgctcttgctgtaaaagttggatctgagatcttgttgatgagataaaaagtgattagttcttcatcggttgggtgaaatcgaaaacccggtggcaatttctcagttgtatccaccttgttatcatctgatgatccaccacccatatctctcctaatttcttccttttccttctgatgactacttgtttccttctattcatcatataataccaattacatttagtaattattattattattataaaaaaaaataaaaagtctattacatattcatgaacgtgtacatattcctaataaattactcatacaattaattgaacagcaagaataaaaaatagtattgagaaatatgggaaagaatttctatatatacataagagtatagttatatagctacctttttggttttgcatatagagaataatcttcaattaggttttgacgttttcatattaagggtaaaaagtttcatagaataattatgtggtgttgaataataataataaacagaaagtgcaaataatgatgtgagagagagagagagagagatcaatataatagattattgatacgtttagggtttcttgcttaccattctcaaagaaaatcgatgcagtagtactggaatttaagcttttctatgtgaagggtttaaagaaaagtttttgagtgtgtttttgaagctctcacctactatatatgggtcttcaaacacaaggtagaggagctagattataaccaaatatatataactaagggctcatcatcactctctcacactgttgttattatatctagttaaatattttggttaacaaacataaaataagaaaattgggatgagatgcaaaggaaaactccgttttatttcatttatttgtttggttatattttaaagtatttttacatcattttagtggaatatactattttattattttaaaattaataacatgactactattttaatactagataagaaaaaaatttatttctttttatcaaattttctatacattttaaatttgattttgttacatttctattctttatattaccattcttacatgtttatatgttttcattcattagtattccaactaaacgctaccttagattgtataattggttgatgggaataaaaagaaattcattttcatttcacggagccaccctatacataacggggtcatgtctctccaaaattctaaaaatatatataaggaatatttgcggtgaaacctccttaacatttataattgttacacatatgatcctaattaaaaaaatggcagtaaaaatatcttatcttacgattttgttgcagccgtactatatttttgccgttaagtgtcaactcaaaaacaagtggtgacatattattagaccacatattaaataagctaaaggaattaaattaatatatcgtgacgtgtttcttagctagcacttaacatgcttaattggcacttaacagctaaaaaaaggtatgactgtaatgaaattataaaataaagtacttttgccaccacttttttttattagggtcatatgtgtaacaattgtaaatattaagaaggtttcgctgcaaatatccctataaaaattgctctttcttcattgtattttttcctcattttctttaaaatttatagttaaggccccccttaattttaatttttttctttttggccccccttaagttcaatatttctagctccgtccttggttccactccattttttggttacatgcatacatgacacaatatttagaatatataacggaataaatgaagaataataacaattaatatttgtaatatgttgtttactaaaattatttgaaaatagaatgataatgattgatcttgtttactttattaagaaacgtaatcgaaatgcttaaattaactaaattgtccttttgagttatactataatatatgaccgtagttattttgtaagacatataaaggacaaaattatctttttatatttaattttaaaaataaataaatcaaaataaatagaatccatacctttaattgtcatttcttagaaaattggtgaggaaaatattcattttcttttatcttttatttaatcaagttcttcctttcctaattttaataaattaaaataaacaaatgaaagtgaataattattacttaccattgattctcattgcttattagtaaacaagcaaagtattggaataatattctaattgaatgatttttccactattttcgtaatgactatactgtattttgaaatggaaggaaaaatcaaagatgagaaaaaaaattaatctttttatcaattttttttatacattttaaattttaaattttattttattcttccaattttatagggtaaatattttggactctgtgtttgtaccattttaaaaaatacaaggtctaatttattatttaacaaaactgaagatccaaatagtaaattttgcataatacatgatccaaaataatattaacctatttttatatattttcattaccttccaaccaaacatattgctcgctaatgtatatgaaagaaacttactgccatggccggcccaaaggctgtgcaaccagatcaatcgcacagggcccacaataataaagggcccatctgaatttttgttttgttttgtttttt

SEQ ID NO: 114006 - DNA, 1180 bp, Cannabis sativa
ttatttataactggcctaaatcgagacttgattattttataacaaattagaggttattcttgaataaagtattcttaaatagaggttctactgtattatttaaagaaattatccatttaaagaaattattctcgtatttttttatctctgcaacacaatattattctatactttttttttttttgtaaggattatgtactactatctatatatttttttaacaaattattatatactttttaaatacaaaagcacgtgatataaagtgaagacacagtgatcgaatttaacttttaaatttatgattataaatgtactcaaaaaaagaatttatgattataaaattccaaaatattttctctaattaagcatgtatattgtagacaatttccttccttatctttttcatttatttttttattttatttattattatctttttattatgaactttttttggacacctcttattataaacttctcttcacgtgttaaggaaatgcctatcatatggtttagacaactgcatgccttgaattgagtcaaaaggcaaatcaaataattcgagagactcggccaagtcaaagaacaggtaacaaatcctatttatagaccaacatatctagagtcaaacaataattcgaaaccaaagacaaaataaaataataaaattaataaacaataataaaacaaatactaaaaataatagtagtagcaataaacaatattatacataaagcactagtagcaaagcaataaacaaaagtatactcaatgttgctaaaaaccaaaagaaaaaaactacattaaagggaacagagtcttcatttatttatatgatatatatatatattaaaaattattccatacatatatatttagtgtattatgactttgaagcaattcgagatcacatataaaaaaaatattatcataccttaattagaggctcgtgttgataacgtattatgtaatattataatttagagaaagaatataaagaagagatgaaaattttcttagtgtttcattacaaagggtgatctcttatttatacatatacaagagtcaaatattaagaaactaaaaaaaaagaaaattataaacaagagaatgttgattacaattaatggtaataaataaaagatttagacatccacataattattaatatttataa

SEQ ID NO: 114007 - DNA, 1806 bp, Cannabis sativa
  modified_base (653)..(653): a, c, t, g, unknown or other
  modified_base (1675)..(1685): a, c, t, g, unknown or other
tcttccgatctaataaataattaaataaatttttaataaaaaataatttattatggagtcttttaatcaaaataattttttttttctaaaagttaagttgtatcagctttagctttcagttgtagtttttccataaaattttcaataagcaaattttaactgcttactaaacatttttttgtcacagcttttttgaaaagcaacttttaacttttctaaaaattataccattaatttgtagagtatgtgccttagtagtcaaagtgtagcaaaatagtgaaataattaactagctcatcatagaattgaatttatactatttgaaaggcagctctcaagtattcttgtaaaatataatattgttattagtataatttaatattaagttttatttattttactttaattaaaattataaaaaatatctaactaataactacagctatttttctccacaatacaattgtgctaaactgatcctataagagttaccctataataatattagatacattggtgcccataagaatgtttcattttttattacaagtaaatgatcactattattattgcattgatttaacttcactaaatcaatgtcataactaaggacaaaacccaatttgccaatggataataataataataataanaataataataataataataggtatcaaaattcatgaaaatggatgaaaagtgtagatttctccggaaccaaaagaaaatgacacaagtgtatggtccagaagtttcacactattttttgttgtaacaaataatttgaaaaaacaactcaaggcccatctcaaaccttctagtcttaactcaaatcaaccaaactctatgcctataaattccttataatcacaattataacactcccaagtacaagtaatcaaatctcaaaactcacacaaacattcacaaactcacaacttttactttcattcccaattacatactcaatatggcttcaacaacattgatgtctttaccaactttttcttcttacactttgccactcaacaaagccaaattacactctcactctaccattgttgcaccttgcttggccacatttccttctaggatgtccagagtcccggcggtgagagctcaggcctccggcgatggccaggacaccgccgtcgatgttcatgttaatcaaggctcaactactaaccaagctgttgaaaagaggcctagaaggttggccatggatgtttcaccttttggtaagtcagaagttacttctttatttttattagtcatataaaaaaataaagttagtgactagtgaaatggttagatatatgaaatatgtttcacatgatggtaccaagtatgtcaagaaagttatttagtaaaaattaatctatatcattgtatgattagtgtcaagattttaaccatcaaaagcctattaaattgtataaaatgacctttttttcaatcatatattatggaaaagaaaaaataaagttaaatcggtgaatggtgaatatgaaatatgtttcacatgattggtcaaaagttacttttgtaaaatatatacatatttatgtaaggtttagtatgattattgataatatatgatcttaatctatcaaaacatatgattacaatgaatggttaagataatagctagtgtcatatatatatatatatnnnnnnnnnnntatatatatatatattttcaattaatataatgatcttttattgggtttttgcttttgaagtttttttttttttttttttttttttttaaaagggctttttgtttttttttttttttttttt

SEQ ID NO: 114008 - DNA, 5857 bp, Cannabis sativa
  modified_base (779)..(785): a, c, t, g, unknown or other
ttatatagtgtatatatttttttaattccgcattttatatacacattcatatatttcagtttatacatataaattgtctaacatataattcgtccctaatgtaatcgtccctcatggcaatttttcttttagtatgggtaaatgattaaaattaataaatactattaaaaaaggaaacagaagaagaaagaatactattaaaaaacaaaaagaagaagaaagttcccattgtaattttctaaaacaaaaaattaagtatgatatatagctcatgtacaataattaaaatggtatttttgagaactctatatttacataattacataattacatttggaaaattaaataaagctaagaaagttaaatgtcccccggcaagtcactcaattatttatatatactttaatttaaactaaagtaaagaattattctctctctcctctttagaccctccacgtacaatactaacaatagtttttcaacttataattttatttatttttttggttaagaagcagttttgattagcctaatctgtaactcgaaggtgcaaagaatttttgtttgagcaaatttcgttcaagagtaactgtggcacatggaaatgtgaagtctaagttgaaagaatgggataaaagtgagatccaccgagatttgttgtccaagtaaaatccatatagacctcataaaatatgagctgtttcgcaacttaagcagccaaaagtccaattaatgcatacataggaattagttgtacacatatatttatatatatatannnnnnnacatataatatatatatatataacgatatcaaataataattgtcagtgtcaagttctttccatagtctaaggtccgggaagaaggagaacgagtcacatcatactcgtaaccatatcttgatacaacattaatattccatgtccttccgctgattaccaatatatattgtttttacagaaatatacataagtttcatacaaaccctttattcaaaaatttcaacaattccttttaatacattcacatttgtagtgtcttccatttttttttttacttttggtaatgtcattttaagacttcatcaattccttgtatgttatacatgggccccacatttgtgttaccatggtcatgtttcgtattccatccaataaaagacaatactagttaatagaattacttaattagtgggagcctcacatcgaattctataattaatatgatggcatgacaatataaagtgtttataataaataagtttacaaataatcctgtcagttgagaaatgaacccctcagtttaattcatttttttcattttaattttgtgaggaaattatacgctatacttattttttgtttcatattttaatttttacttttattttactactctttaatttatactcacttttataagttatattcttattatgtgcattaaaaagtttaattttgataagttttgtgaggttatatttgatactttgattataaaaaagggtatttatcaattaatattattttagagttatatttagttaatgtataataaaaatgggtagttttcaacttatccctaatttttttagaggcttaaggagataatatagtgcaattaaatgaagtggacgttgattaatttgttatccgaatatttttgccacggtgtaactgtaccgcccaaaaccactaaaaaaaaacagttatttttagtaataattttttaatcacaacaaaaaattacttgtaattaaaacataatatttagatacaagttgtcactaatttagtgttagtcagaaccagtattgtgattaaaaaaaatatttaatcacaacaatttgtgatttttgtaactaatacctttagcccctaactttttagtcacaacacaagaattataatttgtaattagtcacaactattttattttttagccacgactattgttgtgactagaaataattttttttggtagtgaacagtagtattaacacatataaattaaatataagaggttgagaacaaaaagagaagaaaattataaaaagggtgcatgagtcgagtgtaggggcgttgggcattggcccctcaagaatgatcatgtatggaatttagccttattgccataatgaggcttcaatgcaccgcaggtgtttgtgataattcttcagtgactatcgttgaatgaagcacgtgccccgtcacacgtgtttatcctaaatctatcccatacaattggtgattgcaattatatgagcactgtgatatgcccagtttagtttactcaaacactatacgtagtgaaatacgtaatggggacagccatataaactatatatatttagttataattgctagattatagaatagacagatatagatagagaaattgatcaggttgaaataacaaaaaagaaataaagtggggttcggtggtttaataagatatagttcttccttacaataaaaaagtaaattaaaataatacatatagttcttcatataatatatactttactgtttgggaaattggagctacagttttgggcaaataaaaataaaagaaaggtgttcctatacggctttcagagagaattttcatctttattttgtgtttagtaattttcaaacattccatttataccaaagaaaaagacgacggcattcatcaacaaccatatatgatattatccgtatcttgaaaagtatagagagagagagaagggtttgccatgttcgagttttgggattggagggatctctctcattccctctcttttgctttataacaaaaaaaagcttgagagagaaaacagagaggccaccgaaaagcatgtacaccttatcatgaaagcaagaaaaaacgacccgatttgacgggccaacccacacgcacatacacacaaatgaaaacccacacgtacgatccatatatcatcatacatgcatatacacacaataatcatcaatcctcctaatagctagccataaagatctattcattatcattttattttatttttttcactttctctctttctttctcattgtttatttatttatttatttatgtttgctttattaattttttttttgtcagattacttttattattatttttaaagaaaacaagaaaattaaaaaaatatatatggagaaaccccaagtcaacctcacctcatcatttggtcttggttatcccaagcaccacctcatttcccactttagtgacctttttttgtttttttttttcttttatcatgacatgaatggtctctcttctatataatcaggccttccacatgatttagtcctccaccatgggaggaagcatgaaggttcatcagttcgcacgtggactctgggaagcgcacgaaccatctctaaccctaggctgcaaacgcttacgccctctggctccaaaacttcaacccaatagcccagacagtagtaatattagttcctctaccaccactacttctccaaactccattgctcccttcgatctcaagagcttcattagaccagaaagtggtcctagaaagcttggatcttctcttgatcaccacaagaaagattcatctcaggtatattatttgttttacgttacgtacattgcaatgtacttggtgctgtatacataaatattatctgaaaatgaaaatagttgacaccaacaaagatattaatgataataataattggtggggtgcatataatacaggttgaaacacaccctggtgggacacggtggaatccaacgcaagagcagataggaatactggagacgctgtatagaggaggaatgcggactccgaacgcccaacaaatcgaacaaatcacggcgcagcttggtaagttcgggaagatcgagggcaaaaacgtcttttactggttccagaaccacaaggctagggagagacagaagcaaaagcgtaacagtcttggcctcagccatagtccacgaactcccaccattacaactaccaacaccaacacatccaccactactctacactccgttaccgtagctttagaaacaagacttggggtaatacatcatttataattaattatagctacgtatttacgtgactatgtaatatatatgtttatagcacatgtatcgcgttttataaacatttatttcatttgagtagttatattacgtgtcaaaatagccaatagatcattgtttaatggaatgcttaattaattaagctcttgatctgtgcagggagagtacgtagtagagagagagcaagaaggctgtactagtccgtacaagagaaagtgtagaagctggggattcgaatgtttggtagaagattatagtagattatgttatggtaataacgaggaggaggagggagatagaactctggagctttttcccttgcacccggaaggaagatgatgatgaccatgatgcgggtgtttttgggaaataataataataaaaaatatatatatatagtagtttaattcttggggtatatttttcagctttaatgtttctaatgccatccttacactagcaactttgattatatatatatatatatataaatcatgtacgctagcttttgttcacttttcttttccttcttttttcttcgcttcgggaaaagaagaaaaagagtaattgtctctttgtactattgatatatgatgatctgatatctgctgcttattggaaccaaagcgcgctttgttactgatctttattccaatctctgttgggtgtcactgtgtttgtgtgtgtgcgcccattcttccctttttgagttttgactaaagagccaactttggctcttcttcgaagcttttaggttaaaagcggcaacctagctatctaagaaacactgaagtccacgcacctagcaatagctactacttctccctttttaaacctacacctttcgttttctaagtaattcaaattggcattgaaaatgaaatcgtcttttctagctagctagcatccattttaaaccaatatatatatatatatataaatatatatgtatgtatgtatgtgtgataaataaaatataaagtttaatttgccgcttctattctatgactttcaataaaagtagtaagagagacatgcatatcttaattgttataatattgtgaaatcattgacatgcaacttaattttatttttggtgactaaatttaagaaaagtatactgatagtgtgttgtgggtccaattgtgaaccatatatgctgatcatgatgagatgggattcggagggaaaggcagatcaggaaagtttaaaatacaaagatcttgcgcaccacttaattatgagtttttgctataccaaaaccaatttaattaattccctcctattacgatttcagtccaaaatattaattattgctgctactcctttttttttttaattctgttattaaaaaaaaataaaaatattactggtaaattggacaaaatatattacatgaaaataatactcatagagatgaaaaaaaaaaaattgatgtcatttacaataaaagaaaattctaatattacgttccactaaaatattaataagttgtgaacggttcaaaggactgcaatgaatgctaaattcacttagaataaagatgcatttgtcaaagatcttttaataaaaattaaaattggcaactcaagtatttatactaatcactgatgtaggatcaaaccacaaaatatggagttaataacaatttggaaatctccaaaatataagagaaatgctaaagggcaccattggtgcctagcaccctcctacgtgtcaatatcgctattggtgcaattaagtatcgggtcccatatagtttaatata

SEQ ID NO: 114009 - DNA, 2827 bp, Cannabis sativa
aaaaaaaaaaaaaaacttcccttactactatgccattgtatattctcggaaaaccttcaaaatctcggaaaatgtgacgattccgatcaagctacagtcatcttcgataacccaaacgtaatttactctgtgagctatggcctgaatcataaccgcaaccagcgagctctctctatggcaaacgattgcctctactcttcttaccatcctcgccgagtagctcgctgatcggcctaacctcgccgacgaagacctcgacaatgtcgtcttcggagataaagacgattcttcgtctgatgaagacgaaaacgacgagattgtttggttcccgctcgaaattgtgttgaaatactctaacattccttctaaattcctctcatctaatctctggttcacaactctaacaagatcctccggtggacctccaccgtcaatgtaagccatcagatcaccagaggtaagcgtcgcgatcgccgccgccacgctctcgtcgcagcaagttagcgtgaacgacgagatctcgccgataaggaaaccttcggcgtcgacgactgcaactgaggtctgatcagcaagtgagctggagattagatcgatagaggagatcgccggcgcgtggtaatcggttgagagaacgtcggggttgatgattccgagcgcttcgattgagattgctaggattggggaaaagagcccgattgagctgaggaggaacctaactacgtcttcttgcgttatccagcaaaattcacgaccaccgccgtgaatggtggttgttgcagacgcgcagccgcttttcggcaggtgttttcttcttgtgttgctacctaatcttctcttaatgggtacaactaagttttgagctccttggaggatcaaatcaatggcatccaacaagctgagaatttgaaaaaacagaggaatcagaatcagaatagaatataatctcttttttattttagttaaaattattaaatcagaaatgttatcagtaaattaatgaaaaatcagtgtaaataattgatccaaaattacaaaataataataataataataataataataataaagagagttaaatatttgaagaaaaatgtgataaagaaaactccaaaagtttgagtttccatggagggtgaggagagcagtggtaattataattacctggaagatggttccaaatgaatgacgagtcctggaatcttagacagaatattagagagaggtgatttcaaggcagctgaaggggacaagagattctcttctttacagaggtagcatattacatcaaccatggacacctttccaatacacctgcactcgtggctgtcgccgccggccagggattccgaagagtggttgcagtcccatacactgatgaaggcctcgtctgaggttttcaaagcggccaaggcgtcggcgacggtggcggtgacggggagagacctcaacgccggcttggcgagacagagatcggaaatctcatgtgataacaagctcactgccatgcaaaaggaaagaaagagaagaagattgggattttggaggtgagagaaagtagaaagaagatgatgaagtagtgagatttatggttgtggagtatggtatttataagaggacgttactgttccatgagagagagagagaagaagaagactagactaaaagcacttgtgttgaaattttgggggtacggtccaaagtaccatatgctgtgcctctctctctctagttttctttattataatctcgattctattaaacattgtttatttatttattattttgtgtataagagtgcaaataaagaagttcataaatttctaatatatttgtagaagaacatttttattttgagaaatgctaaacagtaccgtagtgtctaatattttttatgtgtcaatattgctattgatctaattaattatcgagttcatataatttaatataataatttttatgaagtatcgctaaacaattacaacgcgacatgtcgagaaggtgctagacactattaatgcttaatagcaatgcttttttttttttatttttatacgtaaaaattaattagttagcagtttcttatcttatttataaaatatttttataatacacaatttgaaagtgatccacccacccttatttactttaattctattttttttatagtcgtcatttaataaaaataaggtttaaataatttattacacttgagactcttttattttatacatgtacgaaatagattgtttaaattctatttttagagtattaatttttctaaatctctcaaaattttgaaagatgttcttaataactacgtagataaaaaaaattggactaaaaaaattctcctaaataccaaaaaaaataaatgtgcatcgatatatcttttttaagaatgcattataattttttttattatttattaaattaaattttatagaactcgatattaaaatataggaaacttctacagtacactcccttaaagtaggtgtactgatgcaaactcttactgcttcggtatctataagaattttttagtttatattttcttatagtcatctacgttatagatatttaagacatcttgtaaaattttaagaaatttgaaaaaatttaacacgtcaaaaacagtgttcaaagaatctgttgcacgcgcgtgatattaaaatatagaaaaattctacaatacacccccttaaaatgggtgtactgatgcaaccccttactactttagtatctataagaattttttaatttaaatttttttatagtgatctacgttatagatatttaagacatcttgcaaaattttaagaaa

SEQ ID NO: 114010 - DNA, 1208 bp, Cannabis sativa
ttagccttttaggcagttaatatataaatataccgtattattgtagtagtatgtgtatgtttataattaagtgtaaaaaaaaaaaaaaaacgtccacagtatttatagaatattaaaaaaaaaaaaaagtcatttagaataatcatttacattcacaagttgaggttaccttatatgtatgtataatggtaaaggttaatttggccaaaaatttacttaaaagcatatcttacccatatatttaaactataccattaccacatattaaatacaaaagatgagtgtaacagtactatgtctatatcccttgttcattgctccatataagatataataaaaagatttgagcggttactagaaagacttcattttggtgaaagactctttagatctctatcactaccaaaaattaaagtctttgcttaggaagctagctagtctgtcgtctatggatgattgagccagacatgggttgccgtacgtctatggggttgtagagctactccactactttattaccaattagtttctagattcaacttcttaaattttatggaatacttcattttattctacttttatgttcaactatatttaaattaaatagaatcacttgtgattcaaaaatagtgaaccaaagatggagtcgttcaagattaataagtaaaaatagttattaccttgagaaaggtattagagagtctcttattgataatgtgtgggaacattatactatatataagatgcacgaggtatactttactcattaccaattaattttgagagaaaattttatattctcttaaaactaaacgttgacaatgacgtgtgaattgcgagcggcattggattggtgatccaagtggccgcagattttgctgttcttcaagggttgtttctttgctcacggctgatcgaggttcaaggatgtagaggtggaatctaattgtactcgtgtgtgttctgctctaataaataaaacccctcttgtgtcttagtatggtaatgtactcattgacattttttctgtttgtaatagtggtaatgttgtttgtgtcaagcattgcaacataatacatgatgcagtattaatattaatgtaatcatttgattctgtccttacagcatctccaaggagtacactaaatttggtgtcacactatcaccaaatttagtgtcaaaacttatttctactccaaccataacac

SEQ ID NO: 114011 - DNA, 1012 bp, Cannabis sativa
  modified_base (33)..(34): a, c, t, g, unknown or other
tcataaactaaaaattctgttatatagacacannttatatagaatagatagatatatggattcatatatttacttatctacttaataataattaccgagttcattatttattgtttaattatatatttacttaatagttatccgaagacttaaaaatttcttaaaatttatttaagtttatagtttgttatatgatttttttttaaatgccatatttttattataaatttagacaaagagtttggtatgattgatttttttttttttttttcattttttcatccgacactctttttgagtgtaaaagtgtaaaaaaaaaaaaagaaaaattaaacaaagtataaaatatttactaaaaataatagtttatgtaaattttctataaatttactaaaacgttaaaaaaaatatgaagtatttttaaaaattattaaaaaaaaaatgtgcataagttctttgttgggccttacaaacagtggcacaattttgttagagggtgaatcttatatgaaataaattgggtgataagttgaaaaatatctctctttttttccattaatcaaaaataccttcatattatatttttaaaatatacctattttttttagtgagttgttcaatataccctaattctttacttaaatttagcatataatttgtattaacctaaggagtttaatgaggatataatctttaaaaatgtgtacatcttaaagaatatgaaaatagaagtaaaaataaaaacaaataaagtaaagtaggtataccatgtaatttagatgaaaccaaaactttgaactcaaaacatttatcaactaattcaagtgcatgtatattgcaaaatgacataattgacatcagaaacttactaaaaaactaaaattattaggtttagtggtactaaatctcttctaattaaaatatcaaaaataaaaatagaaactaagagcatgtttggtattgttttctgttttttgttttaaaaaattgtttttagaaatgaaaacaaaaa

SEQ ID NO: 114012 - DNA, 3242 bp, Cannabis sativa
ggcataaaacccaacacaagcttcccatcttcaatcggagcttaacaggttgcttcacaaagaggaactttattggaagcaacgggctagagttgattggctccgttcggtgataaaaatacaaaaaatttccatcaaaaagcctccactcgaaaacgaaacaattatattcatcgattaacccttcctgatggctctatcacccatgatactcagaccatcttcactcaattccattcctattattctgatcttttcaactcacaaggtgtttgtcactcagccatctcctctaatcttcagggtgttaccacttgcctttctcctacacaatctgccttcctagccgaggctttcactgctgaagaaataaaaacggctatgttcagcctctctggggacaaagcccctgggcctgatggattaaattcccttttctatcagaaaaattggcatattttaggtcccgatctttgccagggccttcttcaaattcttaacaatcatggggatctctctttaattaatagcactattttggtcctcattcccaaaaagaagaatcccaaaactgtgcgtgattttcggccaattagtctttgcaacaccctttacaaatgtctatctaaagttctggctaatcggctcaagagtgttatccactctgtcattagccccagccaaagtgcctttctcactggtcgtcaaattactaacaacattgtaattgccaacgaaataatccatgctattcactctaggaaatctggcaaaataggttgggctgccatcaaactagatataaaaaaaaagcttttgatagagtagaatggtcttttatcacccaatttctttctcatattggggctccccagagttttatctctctcatctcaaaatgcctttccacggtcacctaccaattatctctcaatgggaacttatccaatgtgttttcttccactcgtggcattaggcaaggtgaccctttatcaccttatctttttcttattgtggctgaaggtctgtctgctgccattcgtatttatgaaaatgctgccctgttttcaggccttaaaatttatagaggggcaccttctttctcccatcttctatttgcaaatgacagtatgttgttcgtcccggtttcctctcaatcatctgaagctatcaatgctaatcttctgctgtatcatcaagcttctggtcaattggtgaatagggataaatcttccattcttttttccccaaacacctctcttgactctcaatcaaggtttaggaattctttgcttctaaatggtgaaggctttattagtaaatatcttggtgtccctcattgtgtgggcagggttaacaattctgtctttcattaccttatttagaaagtctcatcaaagcttaatttgtggaatgaaatttttttctctcgagctggcaaagaaactcttataaaatcagtcattcaggccatcccttcttttgttgtgtcctgttttaggctccctaaatcaacctatgctacaattcaacgtttgacctctaaattttggtggggctctaactctaataagaggaaaattcattggaggaattggtctactctttctgtctctaaattcttagggggtctgggatttcgttctctaattcatcataatcaagctctcttggctaaacaggcttggcggatctggtctaatcctgactccttattgtactcattgctaaaagcccgttactttaagcatactgattttctcaatgccccaaatggctacaactcttctttcacttggagaagccttctctggggtcgtcagcttctcaagaaagggcttatctggaaaattagttcaggccgtgatattcgtatctctgcccctaactggattccccaaatctcccatcctaccatcctctacccaattgatccttccttatccactgtttccttttttgttaatcctgacaggacctggaatgttgaaaaattgaagcactttcttcctgtgtatcaagctaatgttgtactcaaaattcctttggaccttggacttagtgattctctcatttggggttttcatcattctggcattctcactgtcaattctgcctatcatcttgccacatccactgccatcacaagctctccctcttcctcagatcctaacccttttaaggattggtggaaaaccctctggaccttaaatctccctcctaagattaaatattttacctggaaggcttttaaccatctcttaccttgtgctttaaacttattccataagcatgttattccacacccatattgctcttcttgtgggggaagtgcggagtccatctctcatgcacttgttgattgtaccagagcgaagtaaatatggcaacactcaaaattcaaacagtttcatgatgattgtcgaaggctggatataagagatttttatcttcaaagtctctctttaattcaaagggatgatctccctttgctatttggtttactttggcaaatatggaacataaggaattctgctctctttcaaaagtcgtgtgtaactcataatgtgcaagattttgttttaagttatttgcaggaataccaggacgctcaacatctctccactgcatcaccttcgtcaaagcccccctcctcacctgagctggatcaactccttcacgaagatactcctgccttatttatggatgctgctttaaaccccaaagaagctgccactggtcttggtctggttttcacgcacggtctgtctcacattctcaaatctgtgaagatttataagtctggagcttctactccaatttttgctgaagctcaagcgctttacgaaggaatccaatggtgtatgtcttcccagttgaacccaagattcatcttctctgattgtcttaatctggtcactaaggtcaatggtagttggcaagactactcatccttatccactcttattcagaagataagattctccctctccagtttccctgaggcttctttgctgcatttaccgcaccaacttaataacaatgctcattctctggcaaaagcagctttcaggttgcgagatgaagacttggaggattcgttttagtctcctctttcggctgtcttggttcttttgttctatttctttgtaacagcctcatgtttatcaaaaaaaaacatatattagttcacattccatgaagtgagttaatattaaatgtatatattttaattatttgcc

SEQ ID NO: 114013 - DNA, 1190 bp, Cannabis sativa
aaaattaaaatataaaagagtttcgctatcaattactcattttattaagactttgtctggaactatgattttgtcagaaaaaaaagaaatatatatatatacacatttccaatagtttcatgacattttcctttgcaaattttctcttttctaagatttcaatcccccaatttgttcagtaaagtgatgatagggtgggacttgtacctgttgtgatctcagttgctctaaagcaagcttaacagccttccttccactgaggaaattcggatgcaaataatttatccaatccatctgaaataaaggttggtaaatcagtttaaaaccagaaaaacagttgatatacaatactaggaatatgacatgttccaaatagattaatcagaatggaacatcaaatttctttggaaaacttccactacctccatctctatatgatctctaatcattttctcagcaggctttacaccatcgcataaaaactttaccataatttcatccatccgctttctcaaattcggaaacctttgcaagtcagatacttcacaagcgcgactaatctgaaattaacaaaacaattgtgtttcgtgttcatatctaaatctttcaaagcattatataataaaaagcatctcaccttcattagttcatcatgaacatatcgaacacactgaagactagggtccaacaaccgagcaatctgtgctctaacaagaacttcaaacggggcctgcattgtggaaatttaacatcttcagaagacagaaaaggtaagaaattaccatcccaaagatgcatatatgccattatcataaactcacctctggaacaattaatgcgttcctagcaccagcagcattttgaatagttatccgaatatcatcatctgttagaccctcacaagggtcaacttcctacaagtacttaaagccaaactgcttgttaataatttatattcataccatataaaacagtaatcagtgatgctttcatggtaggtgagaacaaaagacaaagttgttctaaagttgaaactgtacctctaagctctttataaatattgaatgaattatataattgatcctggctccacctgacaattctttagttgatatttccttactacacccatccaccaaagcagaaaaatctgttaattgaataatataggttcagaagtgacttaaaga

SEQ ID NO: 114014 - DNA, 3179 bp, Cannabis sativa
ttaaaatccaacttttagtatccattccaatccaattataattggatatccaattttttgtaattggatttgattgaattggttcggttcaattggattggattggataggatattgcccacccctaatacagtacactttttttaaaagtttattatttgctatgcttacatttatagcatgttaataattttcaattacaaacaccactgctagagttgcacattggatggattttgttgggtttctaattttgatgttcaggtttttaggtgtgtagattttgtgtacagaacccaccggtgtgggagaacatgttttttgggttttgggctcaggtgggttggggtcaagtttcgagttggactatgccacttttttttgttgaaaaatatcattttttttttatattttttaataaaagtacaccatagagagggagattgctgctcagttgaagaatttcgtcctattagtctttgcagtgtgatatacaagatagtatctaaatgcttggctaataggatgagatctactttgtggttggtcatttcgaattctcagagtgcgtttgttaaaggaagattgatacatgataatgcaataataggatatgaggggctgcattgtatgaggaagaatagattttagaatgaaagaaattagctttgaatttggacatgtcgaatgcatatgatagggtttgagtgaggttttatcaaggtaatgatggaaaagcttggctattgtgaggaatgggtgcaaaatatcatgagatgtgtgacttcaataagcttttccttcttaatcaatggagaagtacaagggaaagtgattcctcaatgagggttacgataaggggatcctttatccccattcttatttttagtttgtgctgaagttttttctaacttaattcaatagactaagaataaatgtcacttacatgggctgaaatttggtaaaagggagatcttagtctcacatttatagcttggcgttctttgatgcaactaaagaggcgcaagtggagtttttaaggatttctcacaaagtacactcttgcttctggtcaacttgttaactttcataagtcagaggtctattttgggaggaatgtgagtgtagatgatagagaagagttggttgaatttttggatgttcagatggtagaaaatcatgagaagtatttggtgttattttcttttatggggcaaaataagaaaaaattatttgatatcattaaaaataggatgtggaacaaactcaaagggtgaaagagatcaatattttccaaggtgggaaaagggttattgattaaagctatcattcaagcaatcccatcttacactattggttgttttaggctgccaaaaagtaccattaatagccttcacaaattgacagcgagaatctagtaagatcgtcagaaaaatagaaaaaattaaaaatgcattggtgcatgtggtcttatcttagcaagcctaaggaaaatagtggtttaaggtttagagatttagagttgtttaatcaagcacatctagccaaacagatttggagatgcattagactctaaattctctttgtagtaaggttttaaaggtaaactattatcctagggtggagtattggaggctaagtgtgcggcacatgcatcagtggtgtggagaagccaagtgtggggaaaaaagtttgtattaaatggctacagatggagaatcagaaatggcactagtcttcgaattgtgaaggatccttgggtaccaagaccagtaacttttaaggttttttataaaccaagcttcccaaagctgttgtatgttgttgacttgaaactttcaaacgggttgtgggatgaggactttattcgggccaactttaatagtgatgatgctgaaatgattttgaagataccatgtacaaggtagaagttggaagataaagttttttggcactacaatactggtgagtgtactgtaaaaagtgggtatcaaatggtgatagatttaaacgacaaattaaataatcagatgatagtcatgtggttgcttagtggaagaatatgtggaaactcaaaattttgtcaaagataaagcattttatgtgaaagatggcacattcgtggctactaactaattcagtcctttcatctcagggaggaatagttgatccttactatcaaaggtgattagggggtaggcgataatatatttcatgctttatgggggtgtaatgctaatagagaggtgtggaagcaaagtaggtttaggtgatatatccatcaagaaggtaaagaagatattctatcatatcttatgtgattgtctaaactgtggcagcatgaaacttttgaatattttcttgttctatgttggcgataatggtttattcgtaataataccaaacatggtggtaaggaggccgggaagcagaggtgactaattggtgtgctcgattccttactaagtacaaggatgttcacggaaggaaggaaagatgatgtgtaaggcaggggtagcttgggttccactacctactgggatgctaaaaatgaatgtggatgtggggataaaaagggtaagggctattttggtgtggggagtgtgatttgaaatagtggaggacatgtgatgtttactattgccaaggtgttgccacaagagtatttgccgctacagggggagttattagctatacgaaggcttgcaaattggaatccagcgacaactaccaagatttagcgttaaaattactgattttctaaaagctgtccaattaatccaaagcaaggaagacgactatctagacgttgatggagtgcttgaacatattagaaacatgtcgttatctagtaatgttgttggactttcttttgtttttagggtagctaatgagttagcttacgttttagttgatgaagcttttacaaaaatacatcttcagtgaaaacataaaccgtcgctttgattgttttatagttaatttataattgttataagattttttttcttgttgtttttgattgttttataattatcgtgagcagtggcggacctagaagttaatgtaataccctacaattaagaaatagattagcaaaaccctaattagatagttatgaatatttgaggaattatattattatatagttcaatatatgagaatttatttaattaatt

SEQ ID NO: 114015 - DNA, 1821 bp, Cannabis sativa
  modified_base (44)..(71): a, c, t, g, unknown or other
  modified_base (1789)..(1791): a, c, t, g, unknown or other
ggtgcggtttgggaaatttgaaaaaccgcatgtgcgggttggtnnnnnnnnnnnnnnnnnnnnnnnnnnnnccgcaccgcgaacacccctagtgggtaagcattattattggacatcagcggtgtctatcaccttctacacgtgtcgctttgtgattagctagcgatactctttcaaagttattacatttaattatatgcgactcaatacttagttggactatagtgatattgacacgtaaaagagggctagacactactagtgccttttaacatttctcatggtgggtgactgactaaccaagtcttctcctaagtccagttctatgattatcatggccaaataaatacagtgagaaaaatgtgattgtaaagatctgtaataacagattgaaacttagtattagtttacgggacacgacttaaataagtttagtctccctctaaagctttgatgcaatcctttgtaatttactttgtcaatctgacttttgagcaccatcaaacagcgaactctctttaacttttgatgtgtatacgcttacttcctttagagtaaggcttgaataagtattctctcgaaaacttttctcttgttcaatgaaactcctcaacttattttacgaacggtgtaagaataataaaactagggttgttcaaaaaaatttacaaaccgcctaactcgaataaactgcccaaaccaaaccgaaaaaacgataaaaaaatacaacccgaataactttatgaaaaattcaaaccgcccaatgaatatattagacatgttaaatattattctaaccgcccaaataacctgaataaaccgaataaacaatttacatacttttttactaaaattatcaataatataatataaaaattacgtttaatagttaactattttacattaaaagtatatattttatagtatttaatttaaaattttgaatttatagctgataattttgattatatttaaatattgaagttaaaatttaaaatttaaatgtgactatattttttttattattatttgtaaaatattaattaatactttaatgtttattcaatttattttattaacattaatttaaattataatcattttactcttgaaaagtatatgttatatatttattttttaaaattaattatttgaatcccaaaaacttacaataatgaaaaaaataaaaaataaaaatcggtttaaacgggttaacctgagcaaaccgacaaaaatcattgggtgggttacattttttttatttttttattggacgggttacaattacatatttgcaacccgacatttatattgggttgataaaatacactataatccgaccaaaccgaccgatgtacacccctaaataaaataaagactaaaacctagtagaacactctatgttttcacataacaaactctcttcacacaaagatgaaaatacaaaattatatgactagaagagataagaacatgtgtatgctctctagatcctatttatagaatattgaaaccctagagacagtcacaaacacgtttttacaactgtacaaaacttttcgaaaataatcctgatttgcaaggacaaaattacacgttgcagtgacagatcaggccgaatcgggaaactttctaaataaatccaatatcataatttgtactttaattcatggatataaaaatatgatatgatatattcatagtaaaaccgaaaatagtaactaacaaaaggaaaagtcagttctttcaaaaataaaccaattaattagggtggcgtttggtaacactnnnttaatcagttttttgtttttaaaagtagaa

SEQ ID NO: 114016 - DNA, 2053 bp, Cannabis sativa
  modified_base (2015)..(2023): a, c, t, g, unknown or other
aaaagaggtatgtttcaattaaatataaaactaaaggtaaatttgattaattgattaataaaagtagtatttttcaacttaccctaccaatttatagtgagataagttgagaaatatctctttttttttatccattaattaattaaaaatatgcttaaaatatatttcattaaaatatactcacttttatgagtgagttgaccaatacacaatcgccctctacttaaatctaacacataatttgcattaatctaaggctataatgaggacattatctataaaagtgggtatattttaaaaaatatagaaatgaatgtaagaattaaaacatgtaaagtaaagtgggtttacaatataatttcctcattttttatagttacatccagggccggccctaagttgaaatagactataggcaaaaaaaattggacccttactataaagataaatggtacttttaaaaattgttaaaaacatatgtatattttttaaaaaaattatttttttttattttgactcctaaaatgagtgggccctaggtacagacctaacttgcctatatctagggtcaaatcaatgtagtttaatctaattacaaaatgttgaatctaataacaattagaatggattggatgtgaatatttaaattctaattagcttaatttattattgaatagcactttcaaaatccaattaaaaagtacttattcaatccaactacttataatatatattaaaaaattattatattttcatatatataataaaacagtaaagaaatccaattaacttatttttcaattttacttgttatttattaatctcatagatcctataacacttgagtaaataaaaatttttgaaaaaaaaatttaagaaaacttaactatagtttagtttttatgcattttttttatattaatatatttttttagttaatactaaaaatcaagtgtctaaacgaccttgaacgaaaaatcaaattatttagtctttgattggattagattttgaagcctaattggattagaatagatgatggttttctaagtccaattattatttggactagataattaagaaaaatattagatggattggatcgtgtgaggtttagctcacttagacaaaaaaaaaaaaaaatacaactacgattgtcagggtagaagggtgtcctaactccaagtattataattagaagtcttatgactcatttggaggggatcgaggtagggacacaaattcaaattgagattacttctcttagaattcttagtttagagtgagagttgtaaaagcctattctatgtgtttgattagatagcctcaagtgagattgagtttgtaattggtgtgtaaacctttggtgtctttgtattattgatcagtgtattgatatcttcatccttgccaatcaataacaaagaaaaccacagccaatagagttgtttctactcggggattaggtccaagttttatccaaaacttgtgattgaacctcgttaaaatcttgtccatttcattttttaatcatttagttttctggctttagtttctattttctgctcttgtgtcttgttggtgctaaagtgcaccacaaattgtatcagagctatagggagatcagggtgattacttaagaatcaagttcagaaaactaagattgatccaagatgacatcaaccatattcgacgtggacaaattctctagttcaaacaattttagtttgtggagaattaagatgaaaacatttccttgttcatgagggaatttcagaagctttggatgaagaggctatgaaggaaatcgatgaccagaagaagaaatatgacattgaaacaaaagcttataatcttgctcagccttggagattaagtcttgagggaagtttttggagaagaaaagacattaggattattgaataaactagctgcaatttatatgaaaaagtctcgtgccaataaattacatttaaagaagaagctatacattctttgtaaagcccgcttagttnnnnnnnnnattagcagttgtttatgtttaattatgaaa

SEQ ID NO: 114017 - DNA, 3161 bp, Cannabis sativa
atagtttagggggcatttttaacgaccttaaaagttcagaagacatgatttagtacatgtcaaagttcagggagcaaaattcctaattagccaaaattttataagttggttatattattttcttactaatatatttgttaattactttctccttctgcgtagagttcccaataactatattcatataataatgatagctttttaattgggcccaataactatattgcctaaagtaaaatatacacaaaatatgggggaaaattataattatttacaccacatactaaaattttcaattttttcactgtgaggtagattttttttcaaaaatactgtatttttgaaaaacatattgtgtactgtgttaagttttcactgctgttctacggttgtttttttagttattccactgttgtttttagttgttctgttttgtgttccactgttgttttataaaaacacagtatttttgaagaaaaattcgtatgacagtatttttgtaataaaaattaacccaaattctaatatttttgtaagttttccaagaaattaagtgttaaaaccccttgcctaaagtgtactattgggcataataaattaataacgattatttaaataatagttaaatttcttctcttttaggccttgtgtagaagttagggggtcattgtagtgagtacgatatactgaattcaaccctcatccacactagtaaccccagttatgaagacccatttgcattgtttaaataattgtattatgattaattatattagtttaacctaattaaaattaaacataattaattctaataatatttgtaatttatttttcaacggattattttaagaattaatttagaaactttagatttagttaataaaataaattttagataattaatttctaaataaattaatttgtatttttttttagtatttaattaaataaaaaattaatatttaagtgaaattttttgaaaaaaaaaattgtgaccttaaatatagattaatttttgtaacatttaattaaatagaaagaatatatttaagataaaaattaatttaattatatagatcaacttaaattagtaaggcatcctaagggtagaaccatcattagctggaatccattgatgtttattgtgaatattctttattgtactagccaaataatacaccttgaagttgagacactacgagggagtaatcggttatttaccacatttgtatatgcttttaatgaagaaaatggaagagaggtattgtggatagacatgataacattagctaagggtatacatggaccttggttagtgttgggggactttaacgacatactgagcctagaagaaagagtggggaatagagtcaaaagcactaaattgacaagtttcaaggattgtataaccgaatgcaagttggaagatgttaaatactcgggcagctactttacttggaataataagtaaggagaaggtgacagaatttactctaaagtagacagaattatggcgaatcaagcatggctagagcactacgtaaatgcagaagctgtcattttaacggaaggtcaatttgatcattgtcttgcggttttgtcagtctatcctcacctgaagattgggaaaaaacatttcagatttttcaaattttggcagcaaactaaaggcattgtggagctgatttccaaggcttagaatgaaagagtacaaggcactcacatgtttaagctaattgctaagcttaaaatatcgaagaaagagattagagtttttaattggactaaggtaggggacattgttgccgaagaaatcaaagctcaaagttttttgaaaacctgtcaagaaagcttacaaagagatcctcttaacaataaactcatccatgatgagagaatgattaatgagcaatataaggaaactcatagtaaatatctttcctttcttgctcaaaaagccaagacacattagctaaaagatggtgacgctaatacttcaatcttccatgctagcattagagcaagaagacatgagaatagaattttctccattaaagatatggctggaaatcggattagtgatccatccaaagttagtgatgcttttctcgatttttacacacaacttttggggaccaaaatggaggataggaagactttgttgagaagtgtcatctcggctagatctactttaaatgctcatcagaaagctctcctcagcaaacaatattcaaatggagaagtgaagatggcagcgttttcaatacctgggcagaaagcactaggtccagatggcttcaatagctatgtcttgcaagataattggaacattgtgggaagtgatttatctgaagctctactatctttcctgaacacagggaagctactcaaggagatcaatgctacaacaataacaatgattgtgaagtccaactgtcctgaaaatgtaagtgatttcagacctatctcttattgtaatgtagtttataaaattgcaacaataaagatctgttctcgcttaataaatatccttccttcaatcattgctcaaaatcagggaggctttgtacaagggagatttatagcctacaacattctaatatgccaagatctaggtcggcattatgagaggaaaaatgccaaggcgaattgcatgctgaaattagatttaaggaaagcatacgacacaatagagtgggacttcctagaggagatgttacaagcttttgacttcccgacaagcttcatcaaactaatcatggtatgtattcgcactccaagatttagtattcttcttaatggatctttacatggtttctttaaagcaaaggggggtctaagacaaggagatcatttgttccctcttttatttattttgggtatggaatacctttcccgaatcatggtaaagattggaaagaagaatgactttcagtttcatgaaggatgcaatgatcttcaattgaatcacttgagcttcgcagatgatgtatcactcttttgtcatggggatttcaaatccatctatctcttactccaaggtcttaagttgtttgcgaagactttggggctacaaccaagtgattccaaatcagctttttgttgggttttatgccctaaataaaactccattttaatgtaatctattttatttaacatca

SEQ ID NO: 114018 - DNA, 5284 bp, Cannabis sativa
ttttataggtaacatacaatatttgaacccctttttttgttttttttttgttttgatattattaatataataaatgcataaaatttatggtgaagcatgagctatgagattttaaagctctttttaatgtgcatcctaactatgaattaagaacataattaattgatcctagttcatcataggctgttgaaatatgtttgttttctctatttgtggtgtgcttatgtgaacatgataaggattgagtatctttcagaaaatccatggtcttgtatcatctatggctctattactaatgtaacacatctactgaaatcattgtcgtggtttttctattttcagattgctgtccaaaaatggaccgtggtggttcctacacagtgactttcagaaagttgaggtaggtatagatttatgtcttttgacttaatggtctggactctggagtttgccaatgtaatatcattgcataaattgttatcattttttaaagattgatttaatatttgtcatgattacagtattagtgtctgagattaaagctgcttgaccctactttttcagctggccaattgagttgtgcaaattctgaaggtcattgaaagttcaaagacatcaaaccaagtaacatgctcaacctttagagaggtttcaggtgtaaattttaagtttgtgataacacattcttgcattagtttttttttttttcagtaattccactttcaattgctaccagaaggaagagaacaatattggtagatatagataaagatacattatcatttcaaaaccaatctgggacagaacttcattgttaataacatttatttattgtttatatatgtgatttataataaagttcaatcacattttgcaatagctggtactgataacaggtaaaagtaagagcagagtgaacaaggctcattattccttaggggaaacgtaatcggttggcccgtaaggctcgaataattcagcaaagaatcccttcttcctcttcgggttcaaacccatgtccttacacagctggtcattgtaccatacatggagggcagctatgcatgatctcctgtagtactgaccagagtaacgcttcttgaactcatcccatttggccacatcttcctccatttctttgatgcttggtagcttaaaagtaccagccagaagctccgatacccatctgcatctcatctctgaggtgtacaagtttgacacactttctgagaatccaatcactgccagctgtgggattcttggatgaatgcattccctgatataaaaaagaaacaagtatatttaactagtgcaactccataaccataacaacagttatatgtactgattaattgttgttgcattttcagcctagactatttagagctaacaaacctgtagagaggtagggctgagttggggtctccaacaatgtagtccttaaaggtgggagagacaaacaagtctttaagcttttggtcacccctgaatccagtagccaatatgaccaaatctgtgctcattggagtatcttccccatcaatcacaataccttctttacagaatccaaaacttggagctttcttcaaaataatacttccctcttcaactcgctcatagaacttctccggcactgttgcaatcagacatgcattgatttcctgatgaaacctatgcttcggtaccattccatgcttttctaatggaagcttattttttatgtgactctccacaaattttgagaatgcccatctctgttaattctcaaattattatagcttcataaatttttttacgacaaagcctgtgtcagtttcataaatattgcaggaagagaaagaaaattagtttaccagtggagaaagcatggttgcgaggaggcaaagtacaaaaccttcgcctggcttgtgaacaagtaactcggagaagcgattaaggtacaaataagctatagaaaacccccatggcatgtaatctggcatggtccagcgcgcgttcctgtataacacagtgcatggattttcaacccctgcatgccaaaccaaaaccaacttatttatatagttttgttagtttattattaggtacatgcatgatttggtttagggggtgagaataatgaccgtttgcgttgcaacactcattggcaatgtcgatggcgtatttctgaaagccaacaacagtaacttttttgccttttacaaattgagctgcggttttatgattcatggcggtgtaatcgtttgagtggataacctggccttgaaatacattggggcctttgtggggagggaattcgggcatgtttggtacttcgctgaaacgtccaatgcagaggattacaaagtccactacgtaaacctcctcctcctcctcctcctgcatttaactaatatgttattttcaagtactagtagtaatagtaaccaactacgtaccacttatttctaatcacgtaaacaattatatgtagggatatttgaggtatgagtatctaaaatttggagtttgtaaataatatagatctaataatttttataagcattccatgttatattaaaattgtaatttttgtttatttctgtaaattttctaaatttgtaaccagattttaaatttattgaaagatgatttagaaataattaatactacacgtttttgttaaaatttaataatttagaagttatcttacgtgtatcctcacaaaactaactgagaagataattttactagcattgggtacttatattgctaaaagaaatattaggtctatttgagctacaatttcaaaattttatgtaatacagcaatacatatgttatatatatataattaaaatggtgtattttgtactacattgttcatgtatgagtgatttgtagaatttgtatacttatagttaagtcataatctcctaatagtgaaagtggaaatggaggagaaaaggatgttatactaaataattaaactatcctcatttaaatttattaaaacaaaaaacatatgaagaaaataataattttcatgtgaggaaaattttcttacctccttattaccaaataagataggaaaattttcttttgttccataattttattttcccttttgatttctttcctccataccacacaaaatttggtttgttacttatttttgttaaaaccaaagagatagtacatattagctgtaaagttaagagtttgtttaaagagaaatgctttgagtttggggtatcttacgttgtgaagcaccacaagattattagtgtaaattaatatcgaatcacatataatttaatttaataaataatattaaaaataactaatcaatcacaatttgtcatatcaatatgatgttggataccatttagtacaactcctaagggccattgcccctctaacacctggaagagccttctctggggcaggaatctcctcaaagatgaacttgtttggaaagttagtaatggtaggtttatccctctccttgattcaagatgggttcccaacctccattcgctttcttttctgaataattttaaccatgtggatcagcatgtatctttttttcatcaattaggatggttgttgggatctctctaaacttaaacacttcacgccttcttttcaaattcatgaaatttttaaaatttccattgaccctgtttctaatgatactcttatttggggtcatcactcctctggctgtttcacggtcaattctgcttaacacttggccaactctcatcacaaccaagctctcccctcctccaacaatgtctgttttaagaatcggtggaaaacagtctggcatgccaaaactcttccccaaataaaacattttacctggaaagcttttcaccatatcctccctttcagtcttaacctttttaacaagagggtggtgccttttccttactgtcccttttgccacaatgtttttgagaccgtgtctcattctctcatccactgtcctagagctaagtctgtgtggaaacattcttcttttgtggatttctacctttaaaactataaatgtgatattaaatagttttacatgagaggttttgatgattttaacaaatagacttttactttgttcattagtttgatggacagaccttaaccatctccaacatagagttgatctgctccttcatattcagtgctgatgttaaggttttggacattgggagtatagtgattggatgcaacataatctggataccagttgctgtcatctacttaagttgtttgagcaacatttgcttgggcattgggagggttgggactgggaggctcagaacttctccaactgaggcaaggagatccacatgttgcttaactttcagtagatagtcattcaatgacatagagccttttcaaagtttctgtaatatggttcgaaactccaggatcttggaggaaacttgtagagtgaagtgtttttcgagagcactccatatttgtctcgctgttttacacccaaccatccgtgtaaggagactctctgtcattgaagagagaagccaggaaacaaagagttgatcttgaacctctcatttaagaaaagctggattgaaattgttcgaagcttgatcagcatcatttagaaactgaggtggaggagcacgatcttgaatgaacatttacaatatgtttccacgaatttgcaacaagaacctgctgtttctacaaaagaaaattgtgatcatttagtttaatagacatattgtgattgaagtaaacgggatcgaaatcattagaattgtttctcgatcgattgagattcgaagctccatttggttgattgactggtctattgacgttcgagttgttctgagtgttgttggtgctagctccaatgttccccatgttagccaacagtggaggaaagagctctgataccatgttgaacctcttcgccattgatgaacaaccaagcaagcatgaacaataaaaccagagaaaaatagaggcaaagagaaagaagaaagagaaggaaaaatagtgaaagagaagattgaaaaaaaagagcaatcttactattcagtaaagaatattggcattatatagccaatgattacaactatagtttgttgaagataacatgaattagttaaggaagagaataacaataataccgaacataactaactctctaaccaacaaacaaattgaatagacactcctaacacaatccaattaaaatccaacttctagcatccaatacaatccaatccaattataattggatatctaatttttgtaattggattagattg

SEQ ID NO: 114019 - DNA, 992 bp, Cannabis sativa
aaataggaaaatgtgataaaaaaaaataggaaaaatggaaagaaaaaattataagaggacacatagacactccttattctttcctttatatatatatattgatattaactgttttaaaaatatgtatacttttaaataagttggtgtgtcacttagaacctaaatcctaactaaggtttagggtttgggagtttttaaaacatgaagcttggtatggatccagaaaagtcttaggcagaagtctttgtagaaatttaaaaggtgtttagagataaagcttgcgtctctctggatagcttgtcatttgttcaaagatgccctttcgaatagctaactatcaatcttggttgttcatctaggattatgagcaattgtacgtattcatatagcttgtttgtattatttcgaattgagtgtactaaaagcgcgttatcaaagctgacgtggattattattgttggagatgagttgaatcatttaagactgtataaatgagccacaatattcacggagttaatttaggcaacaatgtaaatttataaatggctagcaatccttataatcagtagtgaatcatatcaatatagcttgagtgaaaaatgtaatagtgtaaggttgagagaaagagagtctaaactaaagagaaaaatattttctcgtaatttctgagagtttgtgaagattttagtaatcttgtaaacactgatatcaataaagatatgtttgttgttgttttgaccgagatgtagagcattgtacatgctttgaattccttaaatctggtgttattctttttttattttgttgcccctgattttgtccaaaatatgtggaccaactggaccgagacacgtagactaaaagggtttaacgtttaaataattaggctaagtccctttgatcaaagggatcagcatctaacatgcctcccagagaaggcctgtgagtttcacatactcccggagagcaaagttacaacaaagcatctccgg

SEQ ID NO: 114020 - DNA, 1462 bp, Cannabis sativa
ttgtaaatattttaatatattataaagtttattaattaatataaaagttttaatttgacacgttttttcaagaaaactcctcgattaacgaaaattgcactgtaattgaaaaagtactgtagcatgccttatcattagggcgttacacaaatatataaatacgtgcatgtggatgtcaagttcgcctaaccagacctagatttttgtggcctttttaagatatgagtcatgttgtgttatgccataaaaaaaataatgagtcatatcgtgttgtgcaatatttttgaatgataagcccgacacatacttagatttgtactgttaactttgaaaagcatcaacgccaattccatcagataagtgaaagttgttaaatagagacactagaaacgtaaatgactaacatcgagattttataatagttcactcctcgtgtgttggtaatagggttacatctacttgagcttttatttattattcatgacacttagtgcgctcgtctaagtgatgaaaggaaagacgcttattaatgatagacttagagtgcttgatctgaagtcagagaaaactatttgtttttcagagcgaaattctataaaaaaaaaaaactccacatgtgaaaagtaaattgaatgaaactttgatttataggaatcggagactgaatatttagatttaataaaataataataaataagtcaaataaaaggcatattctagaaatattctttcttggcaaatctggacccttgaaactaaatgtaatcttttagtcttgaacttaactctcgaactaagccggtcttgtttcttgatatatggttgagatttgcccatatcttttttggagcagtgatcattgattttgagatcgaatgaggtcaatcaattgaaatttaaagccttatacccaaattcgtattttccttcgcaacttaatttttaactagacgaagttcgaatttgactttcgtcgtgaaacatcaatcgaaataccataaaagatctttctaatacatcaagaatcgtgtcattcggagttttgtgcctgaaacacaacgacatgtgcacctatgttctgggaaatattgggcaactcactcataaaagtgggtagattttaatgaaatataatatgagggtatttttgatgaatggatacacaaaagaggtatttctcaaattatccccatggaattgaccaataacaaattgttagctctttaaaaagttgcgttcattaaaaaaaaagattgaaaggcattaaaaaaatatattggaccctttatttttttttggatcatgtgcaatagcccaacttgcacaccataagggtcgaccctgagtaagggtactgtgtataattagattatggatgactggattgatatgtaagaaacatctttcatcaacttgtcgtttaccataaaaagagtttatcatatcacaatgatgatcatta

SEQ ID NO: 114021 - DNA, 2889 bp, Cannabis sativa
  modified_base (2796)..(2802): a, c, t, g, unknown or other
  modified_base (2846)..(2861): a, c, t, g, unknown or other
ttcctcaattatacataattatctagttaggctaatccatttcttaattcagggtattacaaaaattttcaaaaaaatcttaataaagttattaaaattctaagaaagcttcaacaaacatacataaaaatacttctactggctccaaatgccatactttctacaagcgagcatgacctaggaacagattgattttaattgcaacagattgtattgcacatgaggtaacaccaaacacatcaactgtcaaaaacaaactaaatatcagaaacacagaactgatgtacaaatttgaaaaccacattttgcaaatttaaatagcaaaaatgctactttattctattagagttagttaaagttttttataggaaaattagttatttccgttatttcagtttgtactcttctggtatatataccagcttcaccacttgtaatcatttgattcgattcaatacattttcttcagcaatagaaacttttcactttactttgttttcactaatatggtatcagaagtaaacttgtgattttcttcttcatcacttccaaatcttgaatccatggtgcgcaccagagctacctctttcgctacaacaactgttactgatctattggtcgatgcctcaaatcaagatgatccaccaccactaccagaacaaaatacaggccatactcaaaatcctccatctcgactgaatcgttcttccttgaatgattgtcctccatatgaagatgtgagacgcccttattacctgagtatagctgatcaccctggccttgcccttgccacccctgtcctcatcgacagaaatttttagccatggaagcgcgacttcaagatttccattggcgccataaataaaaccccatttcttgatggatctcttcccaaaacaccaccaaatgatcattttttcagttcttggatcagatgcaaccaaatggtcatttcctggattcttcattctgtttctcctgatatcaagaggagcatcatgtacctggatacaacttctcaaatgtggactgaactcaacaatcgcttcaatcaagggaatggaccacacatcttcgaactcaatgaatcgatcatcttcttgaatcaaggtgatgattcagtcagcacatatttcaccaaattaacagccatgtgggataaaatcaaccaatttcaacctaggattccttgcacttgtgcagcttctgtccaatttcaagaatagctcaatcatgatcaagtactacaagttttaattggtttaaatgaatcttatcatgttgttcgagatcaaattctccttcttgatccttggccaccattaaataaagttttctcagtgattgttcatcaagaaaggcaaagaattcttggtactcgatctaatgtcccaatggatgctgctacaaccaaaccccttcccacacttgaaaccaattttgatccatcagcatctgctaatcttgcttcaagaaacaaaagaatgagacctacatgttctcactgccataagccaggccacttgaaagacaagtgttattttcttcatggttttccacttggttatggaaatcgcagatccaatgatcaatctacctccaccagtagaaaaccaagcaatcagaacaacaatcgtgccactccttaggcatctcaagtttttggtccttctacggatatcaacccatctcaactcacaaatgatcaatgcgaacaactaatctcaatgttaactcagcaacttcaacctacaacttcaacctcaactgaagcagttgctacaactaatttctctggtatcatcttttcatttccctacaacttttagatcacagatagtggtgctacacaccacgtttgctatgacattagatgtttcacaaactgtcaattataacctcatgccctgtaatattgcttaatggcacaacataaacaaaaaaggcactgttcgtacaaatagcaaaatctctctaacatatgtgctttttgtacctcaattgagatttaatctcttatctgtcagtgctcttttacaaacttgttctaatggcataatgtttacatcaacaaattgttatatacagggaatgtcacaaacatcaaaaattaggacaactgaaaagctaggcaatctttattacatccagcaagagtttgctacagcaaatactctacatatttctttcttgtaatgttcatcataataaccaatggcataatcgctttggacacccttctgtaatgatcaccaaaaaattcaattaacattctacttctatgcatcattttcattgctccacatgtcaattagcaaagtaaaagaaacttccatttatttcaaaccacaactttgcttcaacaatttttgatttaatacgcagtgacaattggggtccttatccaatcaattctgtagaaggatattgttattttttagctattattgatgatcattctcgtaatacatgaacttacatgttatattcaaaatctgatgctccaaatattattcaaaatttttttagactcattcatacacaacatcaactcacaattaactctgtccgaactgataatgcaaaggaattaaatctaacaaccttttttcccaacaaggtgtcatagagtacaactcttgtctaggtcgaccacaacaaaactctgtggttgagcgcaaacaccagcacattctgaacatagcttgagctttggccatccaatcaaatctgccactaatctattggagctatatgattagaacaacaacatatctatgttggaaattattttannnnnnnctagatttactaacaagtatattggattaacaacctaatatgannnnnnnnnnnnnnnnaataaacacatataaagttagaaaacct

SEQ ID NO: 114022 - DNA, 2846 bp, Cannabis sativa
gtatagtttttttagggttttaattattggtttagaaatcaaattttttgattttctaagcataaaaaatcaaatttcccttacattatatcttaatcatccatgcatacacacatatacacacattcatattcatataatatatacaacttatctaaagagtgtaacgatcgaatacgagctctctatagaagttagtgagtctttttttaaggttaaacctcaaatcatagttgatgactttttagaagtggcttggctttcatactttcaaatcattattatttatagtacagttaagtaattaatttcaattgttagtataaataaatctggctatatatatagtcaaccattattaataattcaaaaaaggaagtggaaagtggggtacgtacgatactcacagcttaagttaatagatttttaattattggagagactgcgataatatctatcgaatcttcatataaatgcacttgtgatctgccaacacattttttttttcttttcaatgttagctatggtcatttctctttaatttgagatttgttacttaagagagcctttctttttttactgctttattctattcaagattcgatctttttcttctgaatttttatagagtatactataaagatatttatatgctcttaaattctaatctctctctagagtaacgtgcgtattatctttttggttcatgtcatggggacgtgcatgatataaagttatataccaacatgtaaaactggacagcttcatcgttatttcgtataaaaataaagagagacaacacagaaattaatgatatgataggacaagaataaactttacctaatgtacttgaaatgaccagcatttattaattgctcgctctatatactatatgtacatatatacatattgtatatgtaataattctggaacatacctctctacattccgaataaaattatacaattaaatatatgattgaattctatgagttgcacgtaattacaattgctttttgaaatttcaactactagtacggacaataaacggacattatatattagtatatctggagcaaagatatatatccatatatattttaattcaaacatattaaaacaaagaatattaatatgaaaacaaatacattatataattatacgtacacacgctttattgcaagaaaggtgattttacgtaggatagaatattgcgtttcccgatgatataatatatattatatatacacaaaaactaaggataattacaacaaaaaaaaaaaagatggactttacttaattgggtcatttttatgaagtatgcggtagaagaatcttatacctagacatgcatatgtggtctggtgcatgaatgcatgcataataatatataaatatttatggttcatatataaagagatgcttaatttaaatatatttatagcttgacatgcatatgtatgcatacagtatgaggtgcataatatataattaaatatattttatctgtgaccaatatatataaaacctataaaacaaataattaaaaggaagatccaataagggatagtgtgaaagggtataataataaatgagagtgggaaggaggaagtgtctctttccacatggaatagaaaaataaaaaggaatgacatgtacctgttcaacctaaaaaggtgatattcaattctttcttcactttttataagaagattttggttgcttttaaaagttagctaaggtaatatataagagagaagaagtatacacacacatatagatatacaagtagtagtagtagtaatagaagtaaatatatggaagacttttttgtggggttattatagattaatttgcatgatgtgcagatttggtcccataaagaagttgcagaaggaattattgtggtaatgcgaggagaatatcacaacatggcaacactacgtacgaaccctttttgggattcttccacgcacgcaaaacaatacccaaccctaatcttaattaattaataattaggctctcatcaactactctcgcatatttcagccgcttttcgtttttaccatataatatataaattataaatgtataatatatatatatatatagagagtataaatgacagttaaaatttcaacatgatgtaattttatatgccgtttttcttttctgtaaatatatattaggtaatgtttcaataatatgtttctgtctaaagttatatacttaggtagctagggcatttcggcgcggtcgccaaaacatatgaaaaatatttttgtataaatatcaaaacaaattcgagtgcaattcatatttaaatactttggacatataaccgcataatccatgatagggtttgttaagacagaattaacatagctaatacaagggtcttattactaatggtgcttagtcatgaaagattcatttttctgttttgctattttgtcccaactaattttattatacctttttgtatgggctttttaacaaaaacaacataattacaaaaaatgtgcaaaaaaaaaaaattattttaaaaacttatacattttgaaaacttattacatgaaactatacattttaatcattaaataataaatgtgttttttaaaactcaaaataaacaatttcataaaattaattaagtagttttataaaaataaacaagttaaatattttttattaaaatataaatatttattatctattttagtataaattattattatttgacaattttttttaataaaatagaacatcaaaattataaacattaatgtatataaatataaattaatacttaaaattactaaaaataaacatgacacatagagtgat

SEQ ID NO: 114023 - DNA, 2249 bp, Cannabis sativa
gggcataaaacccaacatcatatgagatgtggcttgggtcctcgatccatccactacttcctcactggtgtaactaaagttaacataaccttcataagcctctttaattctctttcgaaccagatcaatgttgattgacttgcccgctagtgaacactcgttcctagttctccaaatttgatcaaccatgcatcctaagtaagtaagaacttcttttcttccaaaacccgagtttgttgtagtagctacaagattttccacaaaactaatcatgttttgaccagggattttatcaatccttagcggaaacgcactagaaaaccacaaaagtttggcaagactacagtctctgaaaagatgcagacaattttccactgaagcctcgcagaaatgacaatctttttctcttaagaagggaagcttctctttaactggtagaacattgttgagcagtctccaaagtatcatagagattctcgaatgtaactgagaataccacagccatttccaaacagtatgagtatcatcaaatctatgtccttgatccaccacataagcactcttgaccgaaaagtctccatctcgtttctgcttccatactatcttgtctttatgagtcgaaggaagtcttggaatgtcaagaatcctatgtcccatctcttccccaaacatctgcacaaccacttccctgttccaagaattgtcaattgataaatctgctaacgttctagcagtataaccccagggtctgatgctctccatgagtcttccaaattcatcaaaatccatccaaggaatccaaggttgattccacaagtctattgcatctccgcttgctaccagcgctatagaccccttaaacaaaatatttcgagcatctaggatgcttttccaaagatacgagtcacttcctttcttattgactctccaaaagttttcgtgagtgcagtattttcctatcaagcacctaatccacgttttatcttggccttgtgcgatactccaagccagttttgcaattagtgctctgttcatgtcttcaaaccttcttattccaagacctcccgaagctttcggctggcaaattttgtcccaagatttcagcgctagaaaccgatctttactcacattttctagccaccagtacttgagaataatagcatccaaatccctacaggtggagataggaattttatttgttgacatcatgtataccggcatagaagctactacggacttgatcaaagttaatctactagcataggagagtaacttcatcttccatccgtcaagtttcttcagcatactttcttttaactttaggtaggtttcctttttccttctcttgaagacaaaagggttacccaaatgttttccatccccttgtgattgcttaatagcaattagatccagtatttctttcctcctctccattgacatgttattagagaacagaacactcgactttttcttgctacattcttggcctatccacctctcatatgtgttaatgcaatccatcatccttcttgcctcctctttgtttgcacgtgtgaagaggatggtatcatttgcgaacatcaagtgtgccaccggcattgtgtttctcgctatttgaataccatgaatcaacccctttctttcttggctaagaatcaagttggataggacttctcgacaaagaaggaagataaagggggagagagggtccccttgtctcaaccccctttgcggtttgaacttctttaagggggatccatttaggagaaccgagtaaataacccttgtcacacaagacataatgatactacaaatttttttcattgaacccattggcccaaagaactctatggataaaggacaattccatcttatcataagctttaagcatgtcgagttttatagccataaaccctgctaaacccttcttctttctgatcttgtgtaccaattcttgagttaagattgaagactctgctatccatctccccggaatgaacgccgattgaaatggagaaatcaacttatccatatagattcgcagtctattagacaaaatcttggtgattatcttgtgaggaaagttgcacaggcttataggtcagaactgctccatcttcctaggattattcaccttagggattaaattaaacatatgaatgtataattcagcctaggatgaatgacccctgatctaaaagcttcttgaactgtaacattttttaaggatgttgaatttggggggagaa

SEQ ID NO: 114024 - DNA, 2105 bp, Cannabis sativa
ttttttttttttttgaaaaggatcgttgttttattgactaatatcaaagaccgagcgttttcttttttttcaccaaattttgtttaaaataaggtaaatttacttaaaaattgaaattacaaacccaagtatatatatatatatactagtgtgaactgtgtgtttcatgtcataataatataaatagacgaagttaatattcctaaagtacccatgggacgtttgagatattaataaaattttcgtatttgtaatttttataatataattgatcgtatagtattttatttatactaatgtaagctatattaatattacctaacttccgttgacaatcatataatttagatatacattacttattaattaatctgttttttaagtacagtagtagctacgcatatatatacacaacaacattgacacattaatgcatgcctctttcccggcctcaaatctctacaaattattattattaattattaataatctctaatctctctctctttatctctttatctctatctcttttctgatacataataatcataatactaatggagtacaacaacaaatcatcatcatcatcatcatcatcatcagaccactttgtgttcggaatcgcaataatggggtgttttctggtagtgataacaatcgtaacagtggttgcttattgcattgggcggcgagcgcgggggctccccggagtactccaccacgtagccgccgtaactggtggtggtggtagtggtaataatactactcctcctccaccaggtctcgacgaggctgctctggaaagcatgcctaagcttctttattccaaattattgttattattaggagctggagttaataataacaataatagtaaggttattattaggagtaatagtactaataataataaggttattattaagagtattagtagtcgtgatagtaaccataataagggtaattatttgtcattaataaggtcatcatcagcatcatcatcatgctctgtgtgtttgggtgattatgatgagaaagatgttcttcggatgttacctgattgtggccacgtgtttcatctcaactgcgttgattcatggcttcgacttaatcctacttgtcctatttgtcgaaaactactactactctcctcatcttcatcatcttcaacttcaaccacaagtactcctacggactcaccatcatcatcatcatcaccatcctcatcctttcatatctccattcaaatatcttgattatattattttctttcttataattcctatttaattttaagatataatattattatatatttgtcatttttgtctacctgcacctacacagcttattattaattattacctttttaatttaaaaaatttgagaatatttcctctacttggttttgggttttttaactaaaaaaagttctgatgacaaaaagaaatttctgataaaagcccaataatatctagagtactgttcatgcaattaaagtccccgacctttgtatttttcatttatattaaaatttgcttaatttgacgcatagctaatagaattaattgttatgtaaaatggatttttgcgaatagatatttatgtttatatttataaaatacacacacaaaatatctaataacaaccacgactttattctatgtaacattaatacgtgtacttactaaaattaaataattaataaatctaaaattccctatataattaagtctttttttagcaatatcgagaagctacttctcgcatgatatatttaaaaaaaacaaaacacttactacctaacaaataaataaattgtcatttttgtctcaatagacttcctctctttctctttctctctctatatataatatattatataaatagatatatataaattttgctgatcagtgttgttggaaaatttacggtataacaacctgatcaatgttttattttttcttcaacacatatttgtaatcattccctgcttccgaatctatcaatggattaggcatataaaatttataaagggtaaataccattttagactgtgttttgcaaaagttacagattagaccctgtgttttgttaaatgacaa

SEQ ID NO: 114025 - DNA, 6895 bp, Cannabis sativa
tcaaaagatggatacacaaatagaaaaagtttgggtctcaccaattgagtattgtagaagagcaccttagagaggacaatcgccacattggaactggtagatttgaagagcaccttgcaaggattcaccacccaaaatttgagctaaaatagataagaatcaaccacttgatcttcaatacaaagtggcaaaacctctttctctctctaactttctttctcttctttccctctctttttctttttctttttcttttttttctgctcacaataccatcaactacttttttttttttaattgtttccttataattataaatgggctttagcccttattggtccaagcccaacaataaggggcagacccaacactatgtaggttgctatgtggattttagttgcgatttacattgctccgttaatttttatgtaaattgctatgtggaattccataaaaaaaactgattcaaagtgtaaaaatatataaaaaaaaaaaaaaacctaaaaaataataattaaaatatatgcttctttgtattattttataaattataaattatattatcccaattccaaataaaaattacattattatcttagtacttaaatatgatgatccttaaataggatgatccgaattttttaaaaaataaaataattatgaattttctcagtaataaattgaatgagtatgttgccgttaatacttttgttttcttccctgatcttattttatgtatgaaataacataaatttccatatggcttggcttgttcgaaaaaaaaaaaaaaatcttatgtcatactaataaaaaatgtatttgataaaaaaataatcatgatattattaatttttgtgtatttaaaaataatagttgtttataaagaaacaaaaaatatttataactggtttaaatgattcaatattacaaatcacgataatattatacaagacaagttattaattcatgttttttatagatcgtaaagatgtctatttggtacgttgtattgtatattgtttgtgttgaattgtattagtattatctaataaagtactatatttgatattgatttgtattaataggttgtgtaaaattatattatctttacaataaactctacctcaactctaacccggccccagtcaaaaaaataaaagcagtaacgaagaaagaaaatgcaggaaagaatgaatacttagctcaattgagtctgaggcaactgtactgtatttataggaaaagtaattacaatcaaggaatattctggaaataggacacgtatatatgacagctcatagtttgttacactacagaaattgacaaagaaaagatattttacagggtatcaatcattgtctataacagaatcatttccaaacttcttgggccatgattgttgatgctgtacggtgggcctcctggtgttggactatcacacgagttggcttcagctgatacctctatatttcttacattccctctcaaactaagtggggtagataccacacctagtttgtttaccaaggattgaaattggccgtgtgcaaggcttttagtaagaagatctgcaatttgctcactggaaggaatgtatctcacttctaaggacttctcaatgactttatctcgaacaaaatgtacatctagttcgatgtgcttagtccgagcatggtagaccggattggaggctaaggcactagctcccaaattgtcacaccaaattactggtcttgctggcagtgggaactctatttcttttagcaagctttgaacccaagacatctcagctgcaacttgggcgagagccctatattcagattccgtgctggagcgtgaaaccacggattgcttctttaaggtatcaccaagataaacgcaagtacctgctatcgaccttctgtcatttgggcaacacgcccagtcagcatccgagtaaccaacgagactcagtctatccgagtagcttatatgtaggccatgatgcagtgttcctcttaagtatctcaatatcctttttgctgcactccaatgagctgttgtgggagattttagaaattggctgagtttgtttattgcaaaacttatgtctggccgagtataagttaaatattgcagtcccccaataatgctcctatactctgttgggttctttaaaggttctccatctttgattgacaacactttcccattggccataggagttggacagcttttaacatttaacatcttcatctttcttaataactcttctatatacttaggttggctgagatacataccagtggagtcacggttgacttcaatgcccaaaaaatagtgtagcggtccaaggtctttcaatgcaaactgctgattgagttttctgatgaaattctgtaagatgatggagttatttccagtaacaatgatatcatccacatagatgagaaccaacactatgtgagatgccgatttgaagaagaacagggaagaatctgccttggaattcttgaacttccagctgattaaagtagcttttagcttatcaaaccacgctctcggggcttgtcgtagcccataaatggatttgattaacttgcacacatactcaggtttgtctttatcctcaaaaccataaggttgtctcatgtaaacatcttctgtaatgtgtccattaagaaaggcgttgttaacgtcaagttgtctcacctcccaactctttgccacaacaatagtgagtacaattcggactgtggatgatgctttgatgacggggctgaacgtctctccaaagtcaactccaggccgttgattgaaccctttcgcaactatccgagctttgtttcgctgaaaagaaccatcagcattttgtttttccttgtatacccacttacaatcaattatattcatgtggggtctgcgaggaactagcttccatgtcccattcttgattagagctaaaaattctgtccacattgctttattccaggctttatgctgcagtgcctcctcgactgaactaggttcatttttatttccaacccacttggtttgagctaagtacatttttggcttgaagataccagccttggcccttgtgatcatcgggtgtgttgcttttacttgtggagttgtttggacagagatcattggggcacttggttctgcacttggctcatgactcggtgtactggcgtcaccagacctgctagtatcatcaaaactcgaaacaaagtggtcagtatcattcacctgaagtgtgcttaatttttcaggttgttgttcatcttgaggagtaggatgaactccatcagtttgtgtttggtgagattggagtgaggtatcagttggtggtgtgtttggactatttgggctatttgtgattgaagttgtagaccaaaagggaactagaatggatacaggtgcttcaggtttgtgtgtatttaggaaaccgctcctaaaggggaactcctcttcattgaatatcacatcacgtgagatataaagtctacctgtactagataaacatttataccctttatgactctcactatatcccaagttgacacacttggttgaatggaattgaaatttatggttttgatatgcacgaaggcagggaaaacatgatacaccaaagaccttaaggaagctatagtctggttgttttccaaataaaacctccattggtgtcttaagctttaggacaggagtaggaagtctatttatcaaatagactgcagtttggaaggcatcccaccagaatttttgtggtacatatgcttgagcaagtagggtgagacccatttcgactatgtgtcgatgcttgcgctcggctctaccattttgaagggaggtgtgtggacatggatgttgagaactaatcccattttcactcacaaatctagtaaaactttgatattcttcccccccccccccaaatcggtttgaatctttttgattcgacagttaagctgattttctactagagttttaaactgcacaaaggcactaagagcttctgattttgcacgtagtggataaatccatgtatatcgactaaagtcgtcgataaaatggatgtaatacctgaagttagtatttgacataatgggtgaaggaccccatatatcagtgtgtattaattcaagaggtgtttgtgcacgatttggattgtttgtaaatggcagggagtgtgattttcccagttgacacgaatcacagaagctgattttggaattagtatttttaacattgattttgtttaagataacatcaagaacccgattagatgggtggcctaacctcctatgccacctatctttgattgagcagaaagattgactagccacaggctgtgttacatttgactcaacagacgaaacaacaacaccagaaaaacatgaaagaaactggttgggttgatatggtagtagcagtggttggaacatcaaactgataaagtccatctctaagcctccccttgagaacaacttgctttgtcaccttgtccttcacaaagcacaaatcagaaaagaattcaacatacacattgttatcagatgtaagttttgatatactaagcaaggttttgtaattttaggtacatgcaacatctgatttaagattaaaggtgaggcagacaaggtttgtaaacaacctgtaccaatatgatgaatgggaagacgattgccatttgcaaccgttacagattccttaccacgataatcttctttcagattcattttgttgatttcagtggtgatgtggttgctagctccgctatccgcaaaccaagcatcgtgatcaatggtttcagcagctgctgtaaaagcacttgaggagttgttttgagacttgttttggttgttttttgaaccaccagggacgcttcccatgtaggtctcgtcataacggttataacagtgagctgcgaagtgtccatatttgccacagacttgacaagttggtcgagagccattgcctcttcctcctctacctctagatctggtattagagcctctgttgttgttgttttagcagcccctgttgttgtttgtgttgccccttccaatactaggatgtggtcctttgttagctaagcttgcagaaggattcataggtcctccagtgagtttagttgtacctgaaaaagaatggagtctctccattttgctgtcgaaacttagaagcatatcttgtagttactgccatgtagtggatcctcgagcctcaatgagcagaaccattggaagatattctatgtctagaccactaagaacatttgataccagctgattctctggatatggttctccagcaagggcaagaacatcggccctctgtcgtttttgacgcaagtagtcagacatggagagagctcctttttttgctgtttgtatttttgtgcgatattcatccatcttagctttagagtgtgctccaaataactcttcgagagtagtccacaaggaggaggaagagtcacaccccataacttcacaagctattccttcggtcatcgacccatatagccagccgagtagtagttgatcattgacgatccattgttcaaatgcaggatttacctgttcaacagagctaacactgccatccaagttaatagaagggggaaggaactcttgtggtctaagtaaagtacctttgagatagccatccagtcggtggccacgtacaatggcagaaaccattgttctccacagtgagaaattttttcgatctagcttaagagcaaaaggctggttgagggtactcccaaactgaggtaccacgatatttggagctgagttttgtgttgtaacattctgagcaggtgcttgctggttgactgcagcttctcctcttgtagctgagcttccatcaatggcagagttgtccatggatctcgacacacgccgatcttgctctgataccaagtcagaaaaataaaagcagtaacgaagaaagaaaatgcaggaaagaatgaatactcagctcaattgagtctaaggctactgtactgtatttataggaaaagtaattacaatcaaggaatattctggaaataggacatgtatatatgacagctcatagtttgttacactacagaaattgacaaagaaaagatattttacatggtatcaatcattgtctataacagaatcatttccaaacttcttgggccatgattgttgatgctataacggtgggcctcctggtgttggactatcacacgagtgggcttcagctgatacctctatatttcttacagccccgacccgaacttggaccctagactagactctaccctgaacctggacccccaaccgagtttcaaggttcagttttggggtctagggttaggattcggggtcgggtctagatatggggtctagcgatgggtccaagctgggtctaggttaggggtttagggctagagtctgaggctggggctgaggtatggaattggggatccgactaggtccaggactaaggttgagatttcgaaccgagtttgaggctaatgtcccgagtctaggttcaagatccaggtccgggttcagggtctagggcctaagtccagggtttggggcctgagtctagggtctcgggtcggggtacagggtctagggttggggctggggtccggggtcaagattcgggtctaggttctggtctaggttagggtccaggactaggctcaaggtccaggtctagggaggtctaggtttttggctgaggtcctgagtgttagaaattattttaccaggatctagatttactaacatgtatctttggttataatctgtaatcgagcaccctaaatatgaatatcctaatacgatgaaataaacacatataaagtttagaaaaccttaaattgatggccacaaaataatatgactccttccgt

SEQ ID NO: 114026 - DNA, 3838 bp, Cannabis sativa
tttttttttttttacagatttctatatagcatttaatatagcaaccaactcagtaacttaaatcgcaaccaaaatatacatagcaacccacataaaaattactgaagcaaccaccaaagcaacataaaccataaatttgaaaaaaaaaaaaaattaaaacataataaatggaataattcatcattattttatttatcaatttatccatctctcaagtttataaactatcatcgattagttgttaaaaagattaaaactataatataaaatgtaaacaaacttatatatatatatatatagaacgatatatatttaaacaaaactaataatatattacaagaattcgaacaagaaagaaagataaaagaaaagcacatgtatatatacataataaatatgtatatatacccatcatcagaccccattcgaacagcatcggacccttatcaaacatgaaatatgtctactaatcagttgcatcggaccaccatcaaacctatatcggattttctccttcaacctcaaaaactttaattttgaaatctcctatcgaatctatgtcagacctatatcagatattatcggaccgactcaaaaaaatgaaaaaaaaaaccaaaaaattatagagaacgtctccattcgtggtctgcatttgtggtctctgttcatggcagcgcgatggtctctctgttcatggttgaggaaggaaattggcgtgggcttggacagattgaaatgaagtcgagaggattggtgcaattggatttttagtgggtcgagggtcttggatggtggcggtggtcgtggcagttgagttctattgaagaaagcgagcgagaatggagggagagagagatatgagtgagttaaaaaataggagggataatcttgggtttaatgaaaattgacctatctaacaatattggtacacttataattaaggaataaattttggcctaataaatacatataaaagtcaaattttccttttatttttatcaagtagtctaagagaactcccatcaccttatctactctattttttaaatacattatttaaacacaatttttctgtattttaactcaaacgtttacattacaccatacatctacttctttaaaatacatcactaaaattttacttttttcaatttttaatatattttatttattttaaaaatataatattaatatttatacatctccatctcccatataaaaaaaaaaaaaattaaaactctaaacaattaataaaataaatttagagcaatattgaattctataaatatagagcacaaataatgaattttaaaaaagttttaaaatagagaatgagtttagagttaaaataaagtgagtttagagtatttaatgtagcctttttttaatcttagaacaccctaatagatattttataatagctaagagctaaaaaaaaattcaaaggttaaaatttatctccaacaaacgctctaaatctttagataaaatacctattcctaaactcctaaaaatgtttagcgaagctgtaaagtttttctatttattttgtacttaattgtttttaattttcccattagcatttgtttattgtattgtattaatttttaattttttttaactttaataaaaataaatattatatttaaatattatatttaaaaaatctctattttaaagcatatgtaagaatgaaataattatataagtcatttaaaaaaaattatataagaaaaaaattattctaacaaattgaaatgtatttttttttttaagaagaatgaaaatagattcatcccaaataagtgaaaattcattttgtttattccaaattaatgttttaaattgcaaaacaaaataattttataatggaaggtagcctgattattagattaaaattgatgctccaaggttctcaatctccaccattctctatctcgcaaatttaaaatttgtcaattcgtatatgttaatattcttacttataatccttctaattttattcctaaattaagtaacgaagttgtccacttacatcttgttttcgttgtatttgtatcttatgttttttttttctccaactagtttaaaagatttttaattattaatagagtggatttcttaaataaataaataaattctagccagcttatacccttttcattggcccctctaaaatttaccatttcaataatagtagtgtcatttttttttcatagattatattaaaatgtccaaagcatctagacccaaaagctttcttgattcatcactaatctctactatctttttataatcatggaaaagaatccctcttaaaatataattttgttcaaaataaaatatattggcagaaaaggcaatattttcaactagtgaaaggggttgaattgaattagtttgctaaaaataaaaaaggggtgccataaccattactttagtgggaccaaaaattggtcatattaaaattttataagagggttaaaaaatgaaagaaagaagagtagagtatataatgatgaaaattaaagactatatatctatacatatattggtggaaccccacatgaccttatcttggtttatcctattcctatgtataacaccacacacaccaccattgaaggaggggagcctctctataatcaaaaaagtagtacggaacatacacaaagataacattaaaaaaaaaagtcttttcttttttattcactcccactaatcgaatattcctatggaaatatatatatatatatatatataatcatttatatttatatttatatgtgtgtatgtgcaaaaacttgaggaacatttcatgatttttactacaatgttataataaattatgagtatatgaagttgggattgggtttgcattaattgcaatgaatattttttaggtttattttgaatctgattattcattaatatgttcatatatatcacttttcaagaattttttttttaaaaaaaatatgtatacccaagttgctaatttattagtgcaataagtttttggttgactagattcatcatctgattgtgagtaagtggataaataaagaaatattgtagattggatattatatttgataatgaggtgatttgtttgcctctacatgtgctatatatataaatatatataaaaattaaattattatatttatatattatgctcttcttgatctcatcatcttttgatttttaaggacagcaagaactagttgttgagtgggtttctgaagaactgtctgtactttcttcctttgtttttattccattcaattcaattacttcataagcaatctaacctccatctccctctctctctctcccaccttttcccttaatataattatattgagattggtatatgggctagtaatattatgataagaattggtttttttttagatatagtaatctctattaatagttcaaattagatattcaaaattttactataattatattaatattgcttattattttacagttaactttttttaatgaaataacttttaatatttgaatcgaagacaactcaatttatgcaagcgcttactcaatgctaattgaaagcaagaggatccaatccaattgcgaatcattgagttggaagataaattcaggagataccaagatgggaatatgagaaactatctgattatgattcggatgacgaacccgaagctttccatccagacattatgaactctgaattcccccatggatttagaaaccctcacgtctcgtcgtacgatgggacttcagacccagttgctcacctcaacaatttcaatactataatgcgagccaacaatgtctcgaataa

SEQ ID NO: 114027 - DNA, 3170 bp, Cannabis sativa
ttttaccaaccttttaattctatcaatggagatatgtcccaatctccggtgccataatgtacatgaatcctctttcataacacacattttagtgttagcgtgaacatgcataacattattagtggtatcattttgtaaattaatgcagtaaaaaccatcagacaaaataccatttccaacacattcaaatttgttatataaattaaaatatttgtctaaaaatgtaaaggaaaaactaatgggtataagtcttcaaactgaaatcaaatttctagagaaacttggtacatagaaagtcttttctaactttaatataaagccactgcttaaaactaaattgtatgttccaatttcttccactcgtgagcctatcttgtttccagaaaagatgctttgctcacttgccactagttcccttaggttttgaatattttgcaaggaatgtgttatgtgtcatcatcttaaagaaacctcagctgaagaaggtgggtagaggtgcacaatccttgtttgaagggagcaagctttattaatgagtgcttcgatctccgcatgaataccctgtggttctgatggagtcgaagagtcaatgattaagactagaggaggtgatctgggtactctcgcgcacgaactcaaagaagaagatgaagacacttgtagaaataatggctccttcaccaaaagcaattttttgctcttttctcacattaatgactaagattatgtccaagaaaacatggaatacatccaacactacagaaaagatgttagttttcattatgtattttttggaactgagatattcaaatgatgatattattctcgggacactcgactgacatgattaattttcattttacaaatccatgttgcacacgctttattaatgaaagtaatctccacgagctaaagaaataatgccacgtgttgctgcatttcaaaaagcaagaagttgtcaaccataaacaaatttgtttagaattcaaaaaggttttctcttttttaatgtccacatgccctcatgtcatttggaaggtagaatgtaagcttccaaaaccccttgagttctaaaaccttggagtaaatgttatttgtatttccgaatagaggacatgtgtaattccaatatggttttggctcagctgttacaggtctaatcactggcctaatcaagataatggactagatctattagcaaatcaagccttccagatgttggacaaacgacttgtctaggaaatataaacctctagcacaatgtgcatccggatagtatttagcaaagcttctggggtagtcgttcacatgcatccagatttctagttccgtatcatatttattatatcaaatcccacaatatcagaaattaattctcaggatcatgtctaagaatcatatcttccaaatatggaaataaattaattatcaatcaatcatttatatgtgtttattattcacaaaattaggacacagtttgacaactatcaacatgatgtggcatccacgtcggcaaaagatcaatgcctcatgagtcgagcttcagcgaatgagcccgaagtcaatgtattatttgcatttactccatcagtgggcgaggttgacatactagagccctagaattataaatattagaaaactctttcatgcaaagagttacaatctgattcctcgagtgcttaggcaaattctagggttcaaatacttgacaaaatacttgtataaatcaaaaaggttttaccagccttatcaaaataatagtgactcatggagtagaggttgttaatccttaaaccatgtaaaaactcttgtctcattctttatttatgatatatcttttagctttatcatattttattggtttttaaaaaatctcgataaatattaataatttaacattcaagtatatatcaaaatgttgaactattatttatactaaaaaatgtatttacaggcttttcaaagtataaatcataacagatgctccttattgatataagtaatacccataaatctatttaagtcatcttcatctgtgtagtcatatacctacacagtctcaaaatcaccatacttgaccttcctcgggtgatatgagattgcacaacttacccggtatttccctttatgaatcatgcaactattggctgccacaatcagttgccttacgaggaccaatgtcctcgtcgactagacttttaactgggttaaggctttgataccaattgtaatgcccctacttctaacctctattgggatcttcctcccatggactcatgattcttatacacttggacgtttactttggctgctttcaggattgacgattaaccctcactactacaaaattgggctttagaggcagtttttaagggctttaagtgtcaattttggcaaaattcgctactgacgttgttccaggtgacgctgtagggtaaataacaactgatggcataggaaccctatggcgtcggttattatgaaaaaatcgatgccatagggtcttattttttttttcaactttacaattttatgttttaacataatttttatatataaatatattattttattattaatataattaaattaagtataaattatatataataagcataaataaaaattaaattgaaaagttaataaataaacatttacattaatctaagtatttgtatattatctatctttttattaatattttatattttatattttatattatgtgtttgtatttttgtatttttatagtatattagtatcatttttataattttttaagttatgtattttgctattttacttaatataaactaatagaattcttatgttaagtattagaatcaatgtttatgatgtatttgttaattctactgcaatggaaagtgcaacactaatttccttttatatttcttctaatattaaaataaaattatagtatagctaatttatataaagattatgttttggtatattggtaaaaacttatcaatctatccttttggtcacaagctcaaatagactatgttttgtatttcttttttttagctaattatatctatactttgcactcaatgttaggctatttttagcctaaatttcgggtcacattttatagttgtttttcttctttattattatttttagaatataattatgcttgttttctt

SEQ ID NO: 114028 - DNA, 5154 bp, Cannabis sativa
agagagagagagagagaacaacaaaacttttgtataaagaatgagagagattcataggtacaatgaagatgaacaataagttttaggcagtataaatgaaagaaatttcgtgtgcggcaaaaataaaatttgttgagataaaatagtatgttgtgtaaaatctccaactattttcgtaaatatagcctaaaaattatgtttactgagattttcagaaattgattaaatagagcttaaggaaactataaaatagtaaataatagacaaatagttttttatgtggttcatgagttaataatccctactccacgagtccattgcattagccttgtcggcgagtgtttaagtgttacaagtgtttacagtatgagctttgtattcctctcgttcctcttgaagaagaagaagcttttaggaattttggcagaggttctataagtaagaattgttcaccccttgcacatgagaaagtaggggtatttataggcacacagacggataagggcataccttttacccacctagggtttcttacttaacatgccataggggctgaaactacagcaggatgatctgactgtttatttggtaggtagcttttccatcctatggtgcatgaacattgcaaggcattatatgggagcattgacatgtgttgctcaatgggttctcctttaaaagtggttccctagacaagccgttggacaaaaagggctacaacagcacgtacgcgcaccaccatggtttgacgcaggggatgatttctggttcggtgtcagaggacataaaaccatcatctgtaactctatatggaatatagctagacagggttcgggaccaattgaccacctctatcccgaactacatgaccttgctatccttctgggtcattcgcatcctcagaagaccttgtcttttccaagtagtaggagaatggtaggaactttagagtcttacccatccttattaacatagaggatctccagtttctccaggaacactccttctttcgcgaacctaacaagcgaagggtacacgacaacattgagtagtacacgatggtgtccttctatgactgccacgtattagtcgtccaggaatacggataacatttaccccaagctttcaagactttccaagttcaaggagcttgctatttcctattggaactgtccattgccaagcactaactgtttagatgctggggtcgtgggtgtatcttcttggtaagcagtaatttgctaggatagatagcacgtctaacactaccaacgtgtcaatcatgcggcacattaaatgcccaaggtaactccttacgcgcatgttaaggcgcatctgtcagagaaaattaaaattatcgacaggagcgatttgaaaagacctacctttatggcttgatgtatctgacgtaaatcatgactaataaaagctttagaccttttcaactccccagccgttggatcgtaacggaagatctggaccactgattttgaaaaactggctgtcttcttggagtataaattggcattaacagcgctcatttcatttttccaaaccagctttcaaataatcctcctgcaagtttctcactcgttgccgttattgcatgcaagaagagtgcaaaaaattgatccaacaactgctcaatctctgtgtgaagctttttcctaacattaaacctctataactcgaccaacttgaccccttgccaaacgaaggatttgacttttaggctagctacgatcgcatcatcgactgggtctgagaatttcagacgaggtcttttggcactaacccctccgctttccactcaacaagtaagtacattaaccccctgacaaaacttttattacttcatgtctacgatagaaatttcttgctcatgctagggctaggactgtctacgtgttgagtagcaaggtagaatacgcaaaagaaattttgccatactaagggataatcagaggtttaataagtgcccatacgtgcgttgattgtgggatttgatcggttggggtattagtctggatactttttccttttatcagttagttggttcaagaggctcgcttttctctttgtttttgtgctagtagaaatagacataaaccaagatctccaagaaaacatggtaggaattattgagagtatgtccattactcatgctgcggaaacctcggcgggaggtggtcaggccacgacccccgctataatacctcagctatggatgattctggaaactgttcctaaggatgaacctattaatggggaatgcccccttataaaggccaaaggaaagaggaaggccaagacacccccgaccgcgtaggcttacattgactctatctgggagatggactagaaagccaattgcttcttgtcctatgggatgttgcaggcctatggtgatggtgttggcctccgtaacatccatggattgacgtggcataggctatttgccacagaagagtcagctgggacgccacatgtataaactagatttatactaatatattaattaatttaaaaaaattgtgagaatattaaaaacttgactaaaataaaagactgaaaacaaacattataatggcagtgaaaaggtgttttggggatccctcttataaaagatttacccaaaaaactataaacaatagcaattcaaaatacaacagatattgccaatctaaaacaactcctggcaactcagcacacaggccggtggggtcaatatatacattgctggtgaaggtagtcacctcatggtagctctaactttttcttgcccttacctgcaccacatagcactcgtgagtcacaaggacttagtaagaaaagtaataataatcatatagtttattattcgaatattatcatttatacacaatcataatcaaaccattacgtattgttcataagataaaatccaaatcactactggcatatgccatgaataagcatcatcatacatatgtatggtaatacaaaactattataccaataataggaatcatattcatttaaaaatataatttacatatatatgttacctcataaagtaaccatcttcattacatcacatcctaattaggcaagtcgatgctttaatatgaaaatcctatattgcattgcctaatcagacaagctcgtgccacagcctggcacccatatatcacatagctgcatcacctatatggcaaacttgagttttgaaacccttttggtggctaagccatgtattgagcaagcttgagttttttgaactcaaagcttgctcaacaatggcaaactttgacacatggttctattgatgcaattttcagttagaatttgtcatatatggtgtttttaggtgttctggagagttttacaaagtttggagtagttttgagttagaagttagatgtttggaaaatttgcagaaatggtctaccgtttttacaaaaatagtctacagtttttattgatagtaactcagaaaaatagtctgtcgtttttacagaaacgatctgctactttttggagttttttttttttttgaagtctcatttttggtgttttctcgatatttagggtattaccatgctatttatcgataaagaaacttttagttttgagtttaagtccccgaaagtgatatagcaagtcacttactaatttgtgtaaaattgtgacttaagtcctttaaaattgttgaacagcagtttctactcaggtttaccaccacacttgcattcaaaattaaagtaaaattagtataaatagatgcatatatgtatacatgtttagcgtgcatgttcatttaccatcagattagcatatccggatattggtgaagtgtacatagagttgcattgagatgcatagagttgtattgagatatcaacggatatatgctaggtaaaacagtagccatcagattagcatatcaagatattggtaaagtgtacatatagttgcattgagatatcaacagatatatgctctaggctttcagaaagtatgaactaattgctaccacatcagtacgactagagttcgtactgagtataggcttgttttgtcgttagttatactttagtcaagaacgttcctgacctagttttaaggtcgtgattaggtgtatgggtgcctgattacggtctggttatatgttatgtttatacttatattactgagtctgtcaactcacgcttattatttgcatgtgcaggcaagagccagaactaaaccagagtgagtctggagctggatgaagattgtacatatcaagacggttaagtctagagtgttcgggacaatttaggctcacattttgatagtcgttgggtgacaaattttgtataaaacatattttgtaaacggttgtaaaacttttaacgggatcccaaaactatgtaaattatgtttaattattaaagtttaagtttatttttattatgaaaattataattaatcacgtttttaaattctttaattagtaaaggagtgcacagtaattaagaaaatactgtagcgcacaaaccaataggacgttacaaagtacttgtgtttggggttatgtttgtgattgagcatttctcatcctcctaagtctcaacctcttagcccttgaagtttcttatgttgcaagtactttgcatatccaaattaccacaatatcatgggattgaggtttaggtggctattcattcaattcagtctcaatatattcaagatgttgtggttctgattcgagtggtacctgtaatgtttgataaagtgcaacaggcaatatggaataacttattccataggatacattaagtatttattaacaaagttttggtgagatatattttgaaagattgaaaggagaagctattgagattgaatttttaaatactatttaaccaataataataatttatattttaagtagtattagtctctaggctctctagtctcttggctttagtaatctgattagtttaatggtgaccagtcatgactaggcatctgatatacattgaatttagcactctggagaagctagctaccatatttttttaagttttttttttcaatataatattctatttggtccataagttttcgtgtcacagtacacaacatattttttttttttttatatatcattaagtattattttttttt

SEQ ID NO: 114029 - DNA, 2514 bp, Cannabis sativa
tctctaggaaatagctttgggaattatcaagccttgtgtttcccaagcaagtgcttgttgtagaaaactgattgtcacaaaatgagcactttagacctctatttatagtgtttgaggatcactttagaaaattaatttcccttcatctcatggctattatcggcactttaataggcgtttaatagagatatatgtgtttttgacaaggatagatggacacaatacagattaataaagcccattagtaggtcctaaacgacaagaattgggccaagcccaatatcaagctagccttttgggaaggcactcaccttgtgcgattagccttcgccaagcacaattcgtatgcggagaacttcaagctccatgtagccgaaaagacccatcagcgtgtgtctggaagccatcaatagtttcccgttttccaattcacacataataaggaagttaccttccacgaatattggacaaaaaataatatcaaacttaaaaaggaaactacgtaattgaagatcaaataattaatgcacaattaattatccaaaatcaaagaatacgacataaataactatcatcgtaattaacctgctaagtcagcatacagtcactgtctcatgggctaggcttcacatgataagaccaaagtacaatatgatttataaacaccccattagagggaaataaggtaactaagtataacctctattactgtataaatactcacaaaacccttcatgcaaagggttgaaattcctcaactcacaaacttaagaagagaatagaggaactatactcactgtaatccttttgcttttctagcctaacaaataataaaactaacttgtggactaaggctctttaacgccccaaccacataaaaactctgggtgttttttcctgaccttttcttttaattgtttttctttagttcttacattaaataattcgttttctaaaactctcaataaatattttagtgctttcattaaaagttgaaggaagcagtgataccatctcgagattacattcagtaattatggtactcactcaaaataaatctggtcttcattaaactgatcctaatgctaagacaggagatatagaatatttgaatgaggtgactagtcaccataaggatcaactcaataaaggccaaaatcttgacaatcttatagtaaaagacgatgaatcggtagaaaatagttataatgatcttgaagatgatcaccaagatacacggaaagatgattaccaagacatgcttgctgacggtggtgatccagacgagtcacatcctgtggtcattatggccaagaagttacaaatacctaaaagtaaattaacttggcaagaagatttttctttacaactacttgagaaagtgtcgagaatggaagatgtattaatagcaatgacctttggagacaaaaccaaacaaacaactcctgagaataaaaccactgaaaaagctgatcttataaatcctagagcttatgattcacataaggataaaggaaaagcaaaagtgaaagaaacctcgaagaagcctcctaaggctgaacagcaaaagaaatctaaatttgccagaaaggaaaccatgcctcagggtagggtaaccaaactgattctagacgcagctacgttgaaagataagtctaatgctaaagctaaaatgcctactactcagaagattacgaatcactgcaatgactctatcagtcaaagtgatagtgttgaagaagtgcatccagtatcagacaataatagtggaagtctctccacaaatgatcttcgaagaatgttgaatgcaaagaaagaaaaggccagaataaagaaagtcagacctcgagaaaatgatttgaggaatcatatcaatgaccgagttcgcagaagagaatcttcaaatgattaaactcgacgcttggaatgcaaagtcgaagagtttacaaagctcatgaaaaagatctcccaaaggcaaaatagaattgtgtctgattcagaagaagaggatacaaaaccatatgtgaagagaattataaatgcatcactgtcggagcgcttcaaaatacctcaaatggaattgtatgaaagtagaacagatccagggaccatttatccaagtataatcaaatgatggaaattgctaaggctaatgatgatacaaagtgtcttttcttttcactaactctgacaaaatccgtagatgattggtagaagagcttatctccaggatcaatccataactggagagacctacaagtaatgttcaagaagcaattcataggagcgaaggacttcgacttgaaagttagtattgaaaagtattggacctacatgtaattaataaaaattagaatgcctaagagaagaaaagtattgaaaaatagaatgtatgtatattggaaaatgaattaataaaagaaaaggctaattagtaatttttcctcctgaactttgacatgtactaaatcgtgttcctgaatttttttggccgttaaaaattcttcccgaact

SEQ ID NO: 114030 - DNA, 5849 bp, Cannabis sativa
atccttgtaaatttttgaaaaatttcaaataatttaccgtgccgaaaatacgtttgaagttttttaaacgttcgtagtaatctagaatagaaactctgttttcgatactataaactaatcgaaatttttcaaaaatttaactataacgaataccggtataaaaaaaatttaaaaaaaatatttcgacatgtgattttggacgtggaagttaactaagaggttgtaataatcatttcttataactctttggtgtacaagtttccttcttgaaagaacttgggagaaaatacaaaacgcagcgttttaggagggcgactgggcgagacaatatttgcccaacaaaagagtgggagaattgagaacaagggtggagcgaggtgtatagcggagagagatggcgagagttgaggcactgaacgcctacagagctctcctaagagccaccagaaaaaccttcgccggcgataccttcatgctaaaggagtcctctgtcgaagttcgccggaaatttgaagacaatcggcacgtgacctcagaggctgatattcagagactactgggagaggcgcaagaggcatctcatttcattaccaacatgatagtccaagccaagcttaactctagtggtggttatggtaagccttttccttcttaaagttccgaattgcgtttcgaattttgggatcttggctcaatcgagttttgccattgaatgcatccaacatgttcgtcaaaatgccttcatttgcgtattcgttttcctcctcaaattagatccatttttgtgaatttgcaccatacattcttatcttcaaaacttaattacagtttcagccgagtcagaggggaataagaaaggctgggattttgcttctatatgtttaaatattttggtagtatgaaaactcgattcagttcaatactcactcgggtatttattgtttgagttttcattgtctggtttttgtcgttaaaaaagatttcttgcatttaatttctgcaaaagttcttttatttatttatttttgaaacttttaccatgtttatgtttgtttgtgcgaggagcatcaatcctagaaataggagatgctttatcaacaaatcccatgtgaacaatgtgaaatgttgcggtctttgattacaagttgtggatagtagcctagaattttatgtataattgagatatgatcatgaataacactggccactagagtcttcaatttgggcttcaaagctctatctttgatataagatgtataacatgatctaattctggctaccaacgttgattgtcacagctgtaaaaccggataaagaacatgcaggagcaacattggaggttccttcggaagaactccttaggaaatcttgaggaaaatggcaaccaatgctgggtggaggtatgtatgaacttttaggagtgtctgaaggactcagattttatgtaataccattttttttctagcaagaaatagctcaccggtgtcattatatgattcttgtttgaatttcttatcatcccttttaaggaatattgaatatgggagagagaccttatatgtttgaattacattttgtgtagcacagcacttaaagaattagataaaatactctatcactgtatgaagggaatgtttgatagttgttgcttgttcaactatacatacattttgttttggtgcaatatcaaattaacacactgcagaaaatgctcgagtgaaaaaaaaggctccacaggctggtttctatgtccatattatctgtttgttcatctttttttcctgttgttgcttttgcggtttcctgtgaataagttgattatttgccaataataaattatgaaaacacaaatagaatataaaagttatgattttttcctttccacatgaagttggggaattggatatgataaaagagaattgctaaagggcagtgtctaatatcctcacacacattatgctataagcctacaagtacaatttaatactgggtatcacatatttaaattcgattaagttatttcataatttaggttagtcttttttttttttcacaacatcctctctaattgcttaataaattatgttataaaaatatcttatccaaataaatataatcctacttttcagaaaaattgaatgaataaagatcccatagtgtggacaaaaactaaaagagaaataaatattttgtgggtttttgtaaggtgctcaatactataagttattgtctaattactgtttccaatttaaatattggattttacattttaatattactgtttccaattaactactcatacaatgttggacgatttaaggtgccttatagcaaaacaaatagaagttagaaaattagttcaaaactttccttcctcctttggtactttctttcccttattctttcatcttttggtgggattttcgatggcacccctcaaattatttatggcaaatactttattagctcacaaagcattattgttgaatctttgatgcttcaaactatctccatgacctttaggatttgggctataaagtctccaaaatttgggcaatgattttttttttcttccttatttctaattagtggtgtttttttggttaatcattttgatgggttgtacgtttttatttgtttattattctttgttaggataataatatggttttattcaaaaagaacaagcactaataagtcctgttggtttgaattccctcataagcaaacccaacacagttacaataagtctcaaatcataatggaaagagctcaaatctttatttttaaatagtaatggaaataagtgcttacgaaaaaaaaaactagggtggccaagcctgtagtatcacatcattatttttttttaacaaaagagtccctagaactagaggaggaatcataagaactcatttgagcttgtccaaaaacgtgcatctcatcttcaaagaagtacaacttctcacattcattcacactcccaatcgtcttccccgagagatcctgaaattcacaacaaacaggagattgcaagacagattgggtacatggagaactgatttaagagtaagggactgagataattttatacaacctgtcccaactatagaggacaaggttccatctactatccttcctttatagttacctgaacatggagtgtatgaatcaaaaatattagaggtaccagtcatatggtttgaggcgcctgagtcgactatccaagaattaggattgaattttttgacactcaaaatagtaagggaaatacctgattgaaccacaacgcaagttgatggaataggttgttaagcagctatttcagatttttttagatgagttcaacagtcgttgaagttgctcaaactgttatggagtaaaagtcatgttggtttgctcagttccaacagcaaagccacatttttcatgggacgagatggcttctaattgtttggtttaccaagcaatttccaacaagtttcacgggtatgaccttttttcttgcaatggtcacaccatggtcatccccatgccgagcacctttaggattagcttgttttttttcacgttgtgcagtaagagcggatacctcagcttctggttctttgacagccctagcatcactcgttgtcaactctcttctctacgaacttcagcaaatgattctcgtaatgaaggtaaaggatccttacaaagaatttgatctcgaacctcatccaaacctttgtgtaagagtatctccaatgatacactaaatttagtgttacactatcactaaattaataataattaaattaaataattgttagatttatatatacatattcataatttaattctattttcatatatttaaaattttcattctataatttatactaatatttttcaatcaatgaaacgaaaaagtaaattttaattcctgtatgaaaaatcaaactctcaatcccaataattaatagaaacaacatcaaattttaagttatcaaaatctataaaaataaataaataaataaataaacagatctcataaacacaaattcaaacagtaaaacctcaataaaacattaaaactcaaacattaaaaatacacacaataaaatttgaatctagaacttaacacacacatatcaggataaaaattaaaccacaaatgaatcaaactcaaactcaaatttgtcttctttttattctttggcttggtctgtgctcaagaccattaaattaggtaccaataaaattatgaaactgttaagtttagaaatttgaaaatttatgctactatttttcgaattcagtatttattagcaataaatttaatatgttaagtattttagtcacaaattttttaatagtaaagttaaaattttaatataattttattaaataattattattaattaaaatacataatttaattttttatatataatttaaaatattttatacatccaccacaaaacaaagcaagaaaatatttacaggtattattataaaatgtcatactgcatcacacatattttagtctaataattataataaaaatcgttgtatttttgtttgtgggggctatatagccccacatcaatattaatgggtctgtcccgcgtgcaagagctgctagttgagtgaaggtggcttgtgatgaaacttttgagcctccttcagttgtttcaaaagaagtttttgccatttttttagttgatagattggcccaaattacgctttgataccataaaaacagtgaaaaagaaggaaatatatttatttactgaattgaataatacaaaattgaagagttccttaaataactatacaataagctactatagtttaacgttaacatctcttaaacttagggttgttacaactaagccactattctaggcatacctaatctcatggagatattattaataaacaactaacaataataataataaaaataaaactaatacatttgtgacaattaacacaatgtttttcatccaattttgtttttgttaaacaattcgagaataggaaagggattggttggttcgtttttctgattttaattttgatagtgtttctaataggggagatgtcgtaatggagttttaagctattattttagccgattggttacaataaaattgcacaatttctttaaaaaaagaaaagaaaagaaaaaaagtgaaaaaaaataaaaacaaaataaaattagaaaaagagaagcacggttctatgaataaatatagatagctatgatgcacttttctcaggtggcaaccttttggaccatctgccaataaagtgtgtgaattgatagctcaacttttcgttttcttgattaattgatcacaagattaataaagcaaatgattaataagggtgtatttaaaagtaagtttaattattaaggtgataaattataccgtctaataattatattaattttaaataaaatgtgagtttggatataaaatggttttatatataaatttataatatattgtttcacaaaacaaatagtaattacacgtgggatcatgaaaattggaaagtgtaattaaaatttctcaattacttcaaattacacagttacagtgtaattacatgattagacaaacatgttaaatagtataattacctcctacatacaaattcaattacactgtaacttttcaaacgtgcgaatcttttgaatagctgaacaaattaagcctattccttcaaaaactttggtatttttttggggtaatttttagttatatacgtaattaccaaaattatcttacatataacgataaaaaaataaaacatcctatatatgtatatgcttaccgaaaattcgaaaaaaactcata

SEQ ID NO: 114031 - DNA, 1731 bp, Cannabis sativa
aaataaaacaatatgcatgtaaatcactgttgaagtactataccaaaatataccaaaatttctcattgaaaaaaaaaaagaaagaaagaaaacaattgaaaatataccaaaattagatataaccgtaggagtttaattataattgtttatataattgattaagatttttaagggaaaacaaaaaattgaaagtcaaaaaaaaaaaaaaaaaaagagaaacttcaagaataaaatatagaaacatttattaaagtttttaggaaagcgacacaaaatatcagataacaacacataagtcgctcatccccagttgatcgtcatcatgacgagctgctctgaatttgagtacttccaccgatacgacgtcgtttcggttgctgctttccaagtcgccactgagttggatatgtagctcagccgtgttgatttctgactcgaagaaaattgacatagaagagagcaatgacgaggaagaagaagaagaggaggacgagtactctccgcaggaaactcaatctttcggctcagaaatgtgggttttatgtttcttatcttttagtttttgttcctttttttcaggttcttcaaatctggattttaaaatttctttttgttttcttgaaatattttttaagagattaatgtgttctgtaatgatattatgcgatggtattcatggtctatatttctataatctataagttttataaatgtagtaaactttgaataaattgaaataagaatgaataaaatgaaattacaaaaaaaaaaatgcactaaccttcaccggagaagacggtctgggcggaattgaagagaatgacttctcgttttcttttccctgaactaattttccattttaataatcatttataattattcattttaatactttatgtttagccagatggactaatgaaataataattaagggtatatatgaatgcttcgatattggccaaatcaactaaataataataataaagtgtctatcagtatatccaactttgactaattcaaatttaattttaattcaatacactacaatctacaataactttctaaaattttcttatgtggaccaattatactacacgatagtggaactattaatgagtctcttttatgggtgtctattaaatgattttcctactacttttattttttagaataattaatgtaagattattttttactttgttaactcagaataattaatgttaattttttaaagaactaatgtttgttttattattgctatctaatatagaaaactgaaaaaaaaaaaatctaaaagaaaacaaatttgacaaaataaaaatataaatttacaataacaaaaaaaaaaaaaaaaaacctaaacaaaaaatcttggtgtgttacactaatggaagtgattataaaaaaaataacgttaattgtttttttttattatttaaaacaacttaatttaaataaaggtgatgataaaatgatttgatctaaaaacttattttactaataaataaacttgaaaggtattaaattgtgaaaacttttttttgtttacatacaaaattatggcataaatttatatattttttttttttttgaaactgaggaagatttccattaaggcgcaaagtcgaaaaagtcaagagacaatacaaacaaaactaaataccataggtaaatcgggacaccaagcgtttggttggaggtaatgaaatggaatggaatggaaaggaaata

SEQ ID NO: 114032 - DNA, 1384 bp, Cannabis sativa
aattagattttataatgttatacgcaaaatatatatgtatacataaaaattaacattaaaattttactctttttttcttagattggatggatccagtctaatccaatacatattaaacaaggctatggcatcagaggtttattcatgtcagtgagaaaggaatgacaaaactagaaaaggaatttcgaaagagaaactcggtggtcaacttggttatcgtgaacaatgtgtatttggtgaaagttgcaagatcaagttcaacacaagtatacatacttctagtgaactgagcatcatagatgactactcaagaaaggtgtggatttttctactcgacagtaaagatgaggcactcaaaactttcaacaattggaaaaaagtgactgagaattaaataagcaagaaggtcagaaactaaggactgataatggtcataaatacttctcaaacgaatttggaatgtactgcacaaaggaaggtattgcaaggcacaaaataattatgaaaaattcttaacataatggtcttgcagaaagaatgaataggactcttcttgaaagagtaaggtgcatgctgaatgaatctagtttagagagacatttttttgggtgaagttgtcactacaacttgttatttggttaataggtatccatctgcagccattggattcctaacacctcaagaaaaatggacagggtagtcaccaaactgtgatcatttgaaagtgtttggttgcaatgcctatgcgaacatcaaacaagacaaacttcaaccaagggctctcaaatgcatcctctttggttatcttgatggtgagaagggctacaagctatggtgcttagaaccaggatacaaaatgtgcataataagtatggatgtaatattcaatgaagaataaatgcctatgaaagtcaactcgagaacatgcacaattcagacaaggaattcaaatagtatgaaatttgaggtggaaaaggtaacacttcagaaagtggtatcattgtcatcaatagaagttgagtacatggttgctactgtaaccattaaaaattctctattgttaaaagggttgacaaaggaactaggcttaaattcagaaagcgtcagtctattgtgacaatcaaagtttcctgcacctaatcaagaactttatgttccatgaaagatctaaacatattgacatcaagcttcactccatcggagacattatcaatgaaaatgaagtcgaaatgaaaaaaatcaacaccaaagaaaacatgcacacatgtaggggtgttcgcggtgcgggtagtgtgatttttgactattttttcaaaccaatccgcacatgcggtttttttaatttccaaatcgcacccgcaccgcaaaactaaaaaactgcaaa

SEQ ID NO: 114033 - DNA, 11358 bp, Cannabis sativa
ttattttttagaaagccgtaaaaatgtaaaaaatattctttgaacgtaaaaatataaatattttacaaaaaatggtgctttatgtaattattctttaactaaaaggggtttttttttttttttttttacgaaaatactagattttgagtaaaagtttacaactcttactatcacacggaaatttttataaaaatactgtctttttatataacaactgtaaaaaacaagacagaagaattaaaataacagtggaacaactaaaaaacaaccgtggaacaaatataaaaacttaacacagtatacagtacactatataaaacttagataatatttttgaaaaaaattccgctccacagttaaaaaaaaaaagaaagtaataaagttagaaatatggtgtaaaaaccccataattaaattcttaaataaatgcaggtgaaaatgttaaaatagctcatttatcaccatacatccaatctttggggtcaaatttcacacatggagtaaattttgctgtgagtggagcatcaaccaaacctgaacgccaaccttttaatttggatgtccagattcgtcagttccaactatttcgagctcgttcccttgacctaatatcacaaggtacgtacgtacatacatactaatattaaatataaactatattctcactcaacaaattaattatgctctaattaattggatatgtatgtacatataggatacaaagatttggttaaggaggaagagttcaagaaggcactctacataatagacattggccaaaatgatctagcaagttccttcactttcaataacctaacctatgcacaagttgtagacaatattccatccttcattactgtcatccaaacttcagttcgggttagtattaattaattaataatactctcttaaatatacatatgcaatgatcatcattatattacactcatgttgaattgcatctatatacatatgtttttatgagttagtgaaatgtagatggtagaggcgcaacaaaaaatacaacacttatctagttattcaaaattaattgacaatttttaaaatttccagacattttgtgttgaatttgtttccttgggctcaagatgtaggcctggcccgtttataattatattggtagcatcgagtggagtttctaatgagaaatactgatcaattcttaaagttttctttttttttttttcagatttttacttttaagcacagtaaaacaataacaccaaataattaaaacaacatttaaaaaaaaaaacaatcgtggaacaacaacaatactaaaaatattacacagtacactgtgtaaaaaatatactatattttaaaaaaaagcagaatattttttaaaaaaatttgaccccaaagtaaaaaataaaaaaaatgaaaaattttggtgtaaaactttttttttttattaagaatttcaaatatttaaatacatcaaagcaattgatggactcaagaataccgcgacccatacatattgaatgaaaatggaaaacttgtgtctctgttgactaataaactcaaaataagaagataatcggctttaaatgaagtaaataaatatacaatatatatgcataaataatatatataactaataatgagttttataattattttggagatttagtcataaaatttctatattattcagtgcatcattaattatcaatttattgtacaattattatcaaaattcattgcgtcatcacttcttttataagtaatttttgcacatatatggagtagatattgtatgaacaaggaggaaagaatttttggatacacaatacaggaccactagggtgtttaccacaacttctatctatacttggccaaaattttaggggtgatatggacaagtatggatgcattcaaaccctaaataatgttgcaaaagtattcaacaaacaactctacgctctcacccaaaaactcagatctgaaatgaaggatactaccattgtgtacgttgacatgtactcgatcaaatacggtgtcattaccaatccctctatctatggtacgtacatatatatatatatgtatacgtacatgattttcaaatgtgtatatattatatgtaattggggttttatgtatatatataggttttgagagtccattaatggcatgttgtgggtatggtggaccacctcacaactacgtgcggggccgagcgtgtggtgtggctggttacaacatgtgtgaggatgtgtgtcaaaattcataagctgggatggagttcactactcagaggctgctaatgctctttttgtttctaaaatactctccactaattactccacccctccacttgactttcaccacttttgtaattaataactatgaatatcaattattagctagcattcagctaattttaatgtaatcttcaactttaacttataaatatatcttcttatttatatgcaatgacatattatttcatcatctcatcaaaacccattatttatataactaatggatcacaaagtagcattaattatttattatcattcttcttatcaataagatatatgctcgctagagtagtagtaagtttttgggttttcatataaatatatatatatagagaaaaagatcttaaattataattaaataaaaccaattagtaaagctagatcgagtaaacattgtacttgccagttgccacactatacacaataatctttagcacttataaaaaagtgaaaattttcactagcaagatctcatcttttgggtgcattcaattatactttgattatataattagcttgtcatgcaagttagtgttatttcttccgtttcatgtgctgcaatatgttattttttttcctaaatcagcaagtgagttgtattgctccataatcaaacatctttacaacctagcaccacacaagtggcttataaattcttctatacacaatatctatacaaaatcataattgatcaaaccattctctatcgtacaaaactttagtttttctttgcaaaatccaaaacactctttaatttctttttttaactaattaacttacagaaactgaaattgatgtaacatgttgcatccaacaagttaagttcgcgctttttcatacatggtagacaatcgcagcaagaaccatagaataaacttgcttataaaaagaggatatatagacgcgatctagacatccatctcaataacttgtcaatattgttcctactatgagttttccaaccaagccaaataatgatagactccaagcacacacaactatagtgacaatcaaaaaataggtctttcacattttcaatatcgaagccacaaatcaagcaagcactatcttgacagatgttaaatctctagagagtatgtgctgcaatatttacatgtgtgaatcatataagtataagactgcatatctcatggaaatgtagcagcagttttcatgtgcttttcataccatagcaacttataattgggttaataattttcaatatatattaattttaaataaaaataattattgcatgcatttcgcaccatatcagaagccatttcaaataattaaaatattcacaacacacataatgccttcggagtagaactaggggtgtgcataaatcgatccaatccaattataatcgactgatccaattacaacgaacgactaaacattagatatccaattgtgatagaatcagattggatgttatttttgaatatccaatcagattggattaaatgttggatggaatgtccaaaaatccaatacctctaacattcaatcgaactaattaatatttttatttagtttgaatgaataattaaattttatgttatcatacgtaaaaaaataaaaataaaatatatgtatgtatgaaaattaatattaaaattttactttttttggatttgatagatccaatttaattcaatagataccggatttaaaatattaaatggattcaatccgatccaataaatactaggtctaaaatattagataaatctaaattaaataaatagatatacatgaaatatatccaatggataaaaccgatctaaaccaacatccattagatgtatgattcgatgattgaaattaactggattagatcaaatcgtaaaatctatcatctaatatataatttgatctaaataaacctaaaaatattaattgtacaatgaacacccctaactactagtatgaataagaattgtagatgtatcatgaatgattgactcccacaacttggtattttcttattgagtatttggtacacaataataaagccttatatatttagcaataaaataaaataaataaataataaagccttattaataaagttgtggtactacaatattctatatatatcgttagtttttaatgagaatattgtaactttaatgagctctttctagaacttttttctttttttctttctcttttttttttcttcgaaagagactctttcttggacttactatgtgttttttgtcatgatataacttaggtgggtacgtacagtttctaatatttgttaatgatggccccgtagtatataaaatattacttttttgttttttgaataaacaatattaatttgttaataattaaggttcggagaatccattattaattataatggattattaattattaatgtttgcggctctattatgcatggcgagccgccaaatatcattacaatgtatattaattaagtaatttgccctagaagtccaggctggttgagttttagattaaatcatttaccaatgagatataataaagatcgatttataatcagtcaattgtaaatattagctagtgttactgtggttttgaacacttaatgaaactgtcattggcttttagttaactctttattatgtattatactattattattttaccattgagatataataagatcgatttataatcagtcaattgtaaatattagctagtgttatactgtggttttgaacacttaatgagatcattggcttttagttaactctttattatgtattattattattattggctaactgacgggaattatggaattgagtaaactgctagcaaaaataaaagaaaaataatattataaaatgaaaattttaaattgagttgcgaactaggtcgctttctttaaacgtttgcagtattgtttaagaatgtacaagcaatcagaatttgccggccgtccccaagataaaacagcccagtcgtactgtaacgaaacctcactacactatataaccatcaaatacaccctaaaaattatgatatcgtagatgaattttgatagtcatgaaaattgtgttttgttttctcgatataaaaaagatgtattcttcccatcagcttaatcacattatataaatgaatggattgaaataatataacgggaaaaagaacgttttatgaatcgtacgtggaggaattgttgttaaacgtattccataactgatacaactaagtattaagttttatatttaacacgtttttaaataaataaaataaggtaaaaaataattattttattaaataaattctctataaaaataaagtgtgacaccaacttagctcgaattggtcggcgtgcatatgtagtgggtttagtgtgtgtcgttacttatttgtacaaaactaagtatctcttggaaaaaattgcaccttatatacctttataaacaatattccatataggatttttttcacttcacacacacttgcacactttcatatttttgttaaaatattcattaactttaacaaaattccacgaggaccccatggtgtggtctgttctgttgattctgacataaatatttttcaaccgttaaattatgtcatttctcctttagatgaaaaatataataggaataagaagaagattataatagagaagtgagcaagtatataaatatatagatacatacattgaaaacaacatgtatcatttaatttagtgattttttttctcacttttgattaccaaaaaaattatttgtgattcaaaattaacattattaaatagtgatgtgattaatgcttgatcatgtacctcatgcataaatcaacacaaacaattgatcaagaacaatgcaaatccaataatgcacaaaactagttgatcaaaacagtagcaaaccagtaagaataaccagatgcaaactaatgaaaaaatgaacaaattagacaagaaagtagagagaatcaaacacaaaaaattacgaggttcgaacaaagtgatgatgaatcacttgcctactcgtcgaccagaacaaccccaatggctcaattttttattgagcgagaagaaagaattacaaatgttgatcaccaatgtctgcttgacacaatcattcaagaagtataacttcaattacaatcaacctcacttgtgattctatgattaatcacaccatatgctaatacaacaatctctctttctctctttcttgcacactaaactaggtcacaatacccttaagatctctctctcaactctgtccccaaatagcagtggtagatggctataaatagcttgtgttggttgagcctaatcctaactgtcataactgtagttaggtaaaatacttggtagttatggggttgagccaattccatttgtttcctcacttagtaaccaatcgcaacagttatccaccttggtcattaagaggggaaagggttgatgatgattgaggctgagctggtcttgaatcctcatctagcatttgaggatgtttagtaagtttaggcaaagcctaaacttagctaaactcacatattttgtcatcatgtcagcagggttttcttttattctaattttcttcacactgacttctttttttgctataatgtcccttataaaatgcagtttgatatatatatgcttggatctctcatggaacataggatttttcattaagtgtagtgcactttggttgtcacaatgcactgttatgttctctgacttgaaccccagttctcatgtgaaccttttgagccagacagcttctttaatggcctcagtagctgtcatatactctgcctccatggatgacaaagccactaccttttgtagattagatttccaactaatacatccatctaggactatgaatgcataaccagtgatggatatccttgtgtctatgcgtccagcatagttagaatcgacatatccattcacttatatctcttccttgaacctgttatcatagacaaggccaatgtccatagaaccttgtaggtatctgagtatccacttcactgtagaccagtgttccttacctagatttgtaatgaacctgccaaccatactaagtgcatatgccagatcaagccttgtgcacaccatgcaatacatgaggcttccaacacatgaagcatagggcattgtatccatgtacattttctcctcttctgttttgggtgattggttctgtgttagtttatgatgagccaagggagtgctaacaggttttgcttcactcatgcaaaatttgtcaatcaatttctgtatgtagcttctttgtgaaagtgatagtctatctggtctgtcttttcttatatcaatcccaagtatcctctttgcttctcctaaatctttcattataaattttgcattcagactttgtttcagcttgtctatggcctgccttttgtcgccaatgatgagaatgtcatcaacatacagtagtaaccaaattggttcactgttgtaatacacacaaggatcataatcacttctgctacacccaatactgaccatgaattcgtgaaaccttagattcaattgtcttgggacttgcttgagccataaagtgatttttttaggaggcatacctgattaggtttgttgcttttgtatccattaggctcttccatgtaaatttgttcttcaagtttcccatgcaaaaatactatcttcacatccatttggtccattttagatcatactttgccaccttagtcatcatgattcgtatggatgtttgtctaaccattggagagaatatgtcattaaaatcaacaccttctctttgattgaaccccttagccactaatttggatttgaatctaacttcctcacctggcaaaccttcattttccttaaaaatccatttgcaaccaattaacttttgtcatgatggccttgtgactgtttttcatgttttattcttttcaagggaactcatttcttcttcaattgcagcaagctacttttttcttattctttgagttgacagcttcttgatatgtgcttggtactatgttatcagcttactctattgatgcaagagcaaaggctgtgcagtcagcaaagccaaacttttctggtggctttatttgtcttctctctctgtctctaacaagttggtaatcttgtaaatcagccggtgatgtttcatcttcagttgcttccatatctgtctctgactgagtgagttcatgtgtatccacctgattagtattatcatcttcttccctattgtcttgaatttccaaacctgtcacatcctggtcattttttcttctgttgattgcagaagttttcatagccatctcatgttccttgaacacaacatccctactgattatgcactttctgtgttcctcttctaaacaccacaacttgtatctttttaccctttcagggtaaccaaggaataaaaacttgagagcccttggctctagtttatcttgtctaatatgtgcaaaggctgtgcacccaaatactcttaggtgatcaactgttgggacatgtcctgtctagaaatcttctggtgtttttaatgtaagagttgttgagggacacctgttcatcaggtagcaagcagttttcaatggtttaccctagaatttcttgtcaaggccaacacccttgagcatgcatctcactctttctaatagagtcctattcattctttcagcaagtccattttgttgtggatttttcattactatctagtgtctatcaattccctcaagttgacaaaacctagtgaactcatctaaacagaactctaagccattatcagttctgagtttctttatttttctccctgtctgatattcaatcagtctctttcaagtgataaaggtgttaaatgcctcattctttgtcttgagcaagagaacccagaccttcctagtatagtcatctactatactcatgaagtagctagaacctcccagtgtttttgttctagaagccccccaaagattagagtgaatgtagtctagttttccttgtgtagtgtgtttccctactgtgaattttaacttgcagcattttccatagacaaagtcatcacagaaatctagtttctctcccaatttgcccttaagaatcccttatttttgaagttcactcatgcccctttcactcacatgtccaagtcttagatgtcaaagcctagtgctttccatatcaggccccataacaaccatgccattctcatcagtgatagttttcccttttagatagtagatgccatttttaagttctcatttcatgaccactagtgaacctttcataaccttaaaagagctatctatctttatggtatgccttttttcaatcaattcaccaatagaaagtaagtttcttttcaaatctgggacatacatgacatcttgagttgttccgacttgatcatcatgaaacttgatcctcacagttccaatctctgcaactttccatgccttgttgtcacctaacagcactgatccaccatcaagtttcttgaaactatcaaatagttctcttcttggtatcatgtggaatgaacaccttgaatcaagtatcaacgagtctcctgattcttggctagagacaaccaatacatcagctgactcataaccatctgtcacaacaccagcatctcctctttctttacttttgtctctttgtagtttagccttcaatgccctgcattcatctctgtaatggctttctttcttgaagtagtagcactgtttccctgcctcggaattggacattggtttgtgtgattgatttgagcctttttactgtttgcctttgttgatttgatttgtgaaaaccacctctgttttcccctgtctctgatctacctctaacaaacagcccttcaccataaccatttaatttttcttcacttcttttctgaatttctttagagttcaatgctaatttcacctctgtcatggttaaagactctttcccctataatatggtgtccacaaagtgctcataactctttggcaatgtattgagcagcaaaattccctgatctccatcttcaatcttgacacctatattggtgaggtccaagactatcctgttgaactcatcaaaatgcttccttagatccttagtttcatccattgtcattgtatacagtttcttctttaggtaaagcttatttgctagtgacatctttaggtaaattgaagccaatttctcccatagtcctactacagtatcttcacttgacacctccctgagtacttcatcacctaaactcagtaatatggcattgtgtgccttgttctgaactttcttgatcttcttcttgtcttctccaagagcagggagctcttcttgatcaatggcctctaaaattccttgatgtaccaagtaagctttcattttgatcctccatagaccaaagtcattggtgccattgaatttatcaacttcaaatcgtgtaaaagtcattgcagatcagttcttgttcctttcttcgtgttcttgattcaattttttgttgatgcccctcgactgagctttgataccatttaatgtgaccaatgcttgatcatgtacgtcatgcataaaccaacccaaacaattgatcaagaacaatgcaaatctaataatgcacaaaatcagttgatcaaactagtagcaaatcagtaagaaaaaccagatgcaaactaatgaacaatgaacaatttagacaagaaagtagagagaatcaaacacaagaaattacgaggttcgaacaaagtgatgatgaatcacttgcctactcctcggccagaacagccccaatggctccaatctttattgagctagaagaaaaaaattacaaatgttgatcacctatgtgtacttgatacaatcacttaagaagcatagcttcaattacaatcaacttcacttgtgacactttgattaatcacaccagaggccaatacaacaatatctctttctctctttcttgcatactaaactagctcacaattagggctatacaacaaaatttgtaaaccgcctaaaccgaataacccgcccaaaccgaaccaaaaaaaccgataaaaatta

SEQ ID NO: 114034 - DNA, 4364 bp, Cannabis sativa
  modified_base (2316)..(2319): a, c, t, g, unknown or other
ttttttttttttttttttctatacgtttaaagtaatttttcaactacaccaataattatttagtctcaaaaattatactattacacattgtcgaaattactattgagactaagggactatagcccttccaaaaaattcttttacatacattttcatataaatgttaacatataaaaaattaattatttgtagtaattaataattatcccccccacaaattatttttgtgtacaatttgctctccaacatataaatcttcccttcaccactgccattgcgatataatttttaagagaataatttaaatatatgagaagcatatatttttttcgtcattgttggataaaataaccaaaatcaaaaataacattttagtttcttctatatttagttaactaataagtaattatttttaaacttcaacaaaattcagtaacttcatatgttactaaaaaaagtattttgtttttatatattttttaaaaaagatattataatatacataacactttgttttaatttcaaatcttgtcttttgatgagaatgtttctctaaatcgtttttgtcatattgaatttgtctatgatcatggttctagtagttattcggtgaaggagttagaggatctctacactaatatagatattgaaggagaagatgatgttgttactgcgtttgatgatggctctaatttatggaagagttctgctaaaagttcttcattttgcttagcgtgccttggcagattgtttagtgacccgtattcaacttcaaatcaaacatgttcctatcgaaactcactgcttgttctgtaataatgccgctgaaaccacctaccaggctaccacttgattcttggttgccccttttcaaaatcctgttggaatagatcagcagtgacccttcctccatcaacttgcactagttttttgactggtttactgctacgtggtctcgacaaaaaggggaagccattgaagaaatactgatggttagttggtccatctcgtttggaataatcgtacatgttcgtccacggaagttgtttctacggcacatcaaactcttggtcaattaatggaagtttgctcaaagctgttgctttgaaccgctgcatctgaattcaaattgcagcatcaacatcgacttttggacagaaccagcagacggaatgatcaagatcaatgtggacagagcaacgttcgaagccaataattcttttgggacgggttttattgctcgtgattctaaaggagttgtcattttagcttcatcaacttattcgactggctcctcaagtgctccctttgctgaaatgatcagcatcaaagaagccttaagttgaaaaaaggcttccaacttgttgaatactgttatcgagacggactgccttactgttgttcaagctttgcaaaatctggtggatatgccatcgttgtttggaaccattgtaaaagattacaaagttttattgtcttcttttattaatgttactatttgtcatgttaagcgatctgctaacaaggccgcccactgtttggctcgtggctcttgttattggtctgatcgtaatttttcggagagtactcttcctagtactctcaagacttttgtgattgtggatttgaattaataatattatccatttccattcaaaaaaaagaaaaaaaaagaaattataaattaattttaataacttccttaaataacttataatgaaactatgtagtatttaaatatcatatgaattacattacaaaaaaaatagaacaacactaatcttgctaataagctttataataactttttgtactgtattgtaatttatttatttcttaattacatttaacattaacacaaaagttgttagaaaaaaaaagtaacacaaacatatcttagacaacaaaataatacaagataatctaaaaatctataagtgaaggtatgattttaaagttaaatatatatcttaaatatataaaataagtaaccaaatttcaaatagctaaatatgtataggtttaagaagaaataatatctaagtgatactttatttacatcaaaactaataaaattgtttttttaaaacaagattacaaaaaaatttgggaagggtgacattccctttttttaggggactttacactatatactaaaatttttaatttttttactttattattgtggagcgaatttttttttcgaaaatactgtgtaagttttatattgtttactgtatcaagttttcaaggttgttctacggttgttttttcagttgttctactattgttataattgttctgttttgttgtttnnnngttgttttataaaaagacagtatgtttgtaaaaaattccgtgtcacagtaaaattataaatttttatttaaaatctaatatttttgtaaaaacctatttttctatgaattattttgaatccattaatattgttgacttgcccttcggtattttcataaatagaattaatgaaagtatttttctaaataaaattaattttatgtatagaattgaaaaaaaatacttttatttttaacaatttttgtgaaaggaaaggtgtatctttaacttgaaccctgagtcaaatggcaacaaaaaaaattcataggcacaataatataaaggcaaaagttctaaataacttgattagtaggctaataatttttgatttcatcatgattcatgtgtggagatgagactatttaattttccatgaatatatttttatgaatacattttttttattaatagatttatgaatacattcttatatgatataccacagagaatccataaatgcagcaaaaaaattgtggttgctaagtcttttccagtttgcttgctagtcttttccagtttgcttgctgtctagaaaatattaatgttgaacccattataattcaatgaaacacatgttcaccattttaatataataaaaaataatttatagtataaatatttaaatttaattttttattgtagataaatatttaagtttaatgtttaacggtaatgatatctacgttatattttgaaaacttctgtagatactcattaagtgtaaagttattatctatgtgttatttttttattggtatatttaaattgatttttaaataaaaaaatcattaatttgaatcaatcagggactattatgtgatctttaacttgacacttaacggtcagatactgatacttacgaaaattttagaatataacaagtattaataccatcaaaaattaaacttattcatctataactgacaattaaatttaaatatttatggtacatattaatctataataaattgtactggctcttaagtcctaacttcatttattattattatatgtctaactaacattaataattaatatattatatatggcagcgttggagtagcctttaccataaaatgcatctatgtaataagaaataataataaaaataaaaagaatgagtatctttttcttccacatacaatttattttgtccttatatataatttataattttccatatataatttctttgtgtccacatataagtaaaagctataaatttttatatgtataacacactctcactcaattaaactattaaatctttacaagtattaattattgttgtgggaaaaaattgcaagcccaaataattataaaaagccaaaaggtctattctaaaaaaaaaaatactatatattctattaaagatatatcacataaaatgttatatcctaaatagataacttatatatctgagatggaatgagataccacggatgagataatatatcccggataggataagatattttaaataggatgacatatctcagatagaatgacatatcatagctcaaataggatgagatctcacagatgagataatatatctcggatgggatgacatatctcggatgggataacatatcttagataggatgacatgtctaggatgagatgacatatcttggatgggatgagataccatggatgagatcatatctcagattgtatgacatatctcatatgagataagatacagcgaatgagatgacatatctcagatggaatgagatattacatatgagatgacttagctaggaagggatgacttatctcaaatgagtgacatatctcggatgagatgatgacatatctcgaatgggatgacatgtctcggatgaaatgagatatcacaaataagatgacattgttagactatattatataatatatgaaatatagcatatatataaacgatatgcaatgcagaaaaactataaacatatcgaaatgtatatgcaatgaaagatcaaaaaatacctccagccattgatctt

SEQ ID NO: 114035 - DNA, 2916 bp, Cannabis sativa
atagaataatacatatttatatacaaagttaggagactaaatatctactaaatatctactaaatatctaattcttttacagctaatatacatctaatatctaacaagtcttaagtagttatataccaccaatcaatctcttagtcgatatgggatcataacattttgtaattatttttttctattcattccgctctctagtttctgttttcctaattctttgtatcaactttctttgttgatgatacttgtggatttttgaagtacacttcttttaaattaatacaaggcagttttgtttcaataaaaatgttactctttcacccatcaatgaggcaaactgcctttggagaagaataggccttgagttgttttttggctgtataatgtaaatagatttcccattcactagttcattgagagtgaaagtttattttctaatgttcattgagagtgagtttattttattttccattctctagttcaatgagagtgaaagtttattttctaatgttcttttggtttatttttgtgcgtgccacattttatattgctgtgatacctgtggttatactacacccttgtattcttatccaattaaacaaggcagttttgtaaaaagaagaaaagaaagaaagaaactcattgatcgttgagacctcgagaccttacgtgggaaatttgatactaaagcgcacatactgatctccatggtggttaataagaaggccgggctttggaagtcctgcagtatcacaaatttacaaaaatgtgaggattaaaggataacaaaaaacaaaaaggtagcaagctttcaagcacagtaggagactagtttggtaacctttgcctcttagtattagaagatgtccatgctgaactcccataggtatctgagaagccaataattacaagcaatgaagagtaagtgaaaagctgaatataagtaaatcttatttaataacaacatataggaacaagagtaagcaaaaaaaaaacatataggaacaagatttgttgacagacattctagctaatgtgtttgctgctacagtctacatatttggaataataggaacaaatgtatttacaatgaattttcttacactgctgcttacatagataaggagattaaatagtcttaaaaatggggtgcaaaatgttactcatagaaagctcactaggaatgagcatagagtgattacatcaatagctcaattgtaatttgatttaatgaagcttctttcttcttgaccaaaaaaaaaccatataggaacaagaagctaacacagatatacatggcgaaccaatttctaaaactaattgatcttaaaaagtagctttgcacgtatttttagcaccagcacatgaaaagttagggtactgtaccgatgcagggaacagcactaatgtgcctaattttcgaaatataatcttcgtgatataaaggagaaacacattaatttaacttgttaaggcataagaggcatacagaaatagcaagagactccaaagctggagaacttaataagtaaatataaaaattttgtctacatccacaatcatgttattaaattgcacacatacagaaaatttggtactcatactagggggaatttgttaaatatccagattgcttgttcgctagtgaaaacactcatttaactcatcgtgttttaaaaaaaaaaaagacaaagatcacttgtcttagacaccacctcccaaatttattcgggagcctcacttatggaaaaagaaagccatggtaacatgataaacatgaaaattaaaagcttaaacatttaacacatcatattatgtaatacatatacaagaaaatcaataagaagacttggatagaggcagcatcatacttttacttgtgtcttccctgacaatgttggcacctcaaccttaccaccaaggattgcctgaaataacacaaaaatctctacagattatattgcaacttaaaagtcataaatgcagatgagtaacttctgtaattatattaaatataattccaaattaaatatattaataaatcaattaaaatagatataataaatcattttcaaaactacaataataattatcaacaaaaccttactaaaagttaatatgtaagcaagcactacaaaataaaaactgaatgtatatctacagacgaaacctaatactttgatcttgacacttccacaagatcatataaacgtcttaggataagatatggaagtttgcacaataatcagccatattaagcgttaattatactttcatcagattctatcggatgttcatgaaaggatgtaactgaattctcttatgagttctgaatgtgtagaaaatggtaaataaaattgtgtattatattcttatatatttatatgcatagctagaagaataaacagataactactaaatataattaaattaatttttacaactaatataacaatccctttgaagctggagcataaatgttaagtccaacttgttacaaagataatcaatttgcaccccattcaaagcatttgtaaaaatatttcataattgttcttcggtcttcacatatcatgtggagatcagggcttgttgaattttctcacaaacaaaatgacaatcgatatttctcaagatcttcaaatggttctccatcacgtgtaagatgcacagctagattcattggagcattacaaggttttgcttccaattttcctatctcagttaacaaatcaagtacatactttttttgagaaaaaaaaaatacattgtttaccatgagtaacttcaactcccaagaaatacttgaacacccctaaatccttcggatgaaactgggtatgaatgaaagacttaagggatgagatgcctttagtatcatttctagtaataacgatgtcatcaacatacacca

SEQ ID NO: 114036 - DNA, 2367 bp, Cannabis sativa
ccggggtaaatgtgttgattccttgaccaactgtttaagctaatttctttcatttctcgagactaatctttactaatattgagaatcagccgatttaatttttagggttaatatagtctagcaagatgactaacaagtttgcttcaagaatggatgggatgctccgtgagttctggtggggtgatgaatgagggaacaaaggcatctattgaaagtttgggataaactatgtctccctgaatctcgtgggggtttggagttcccaagtggggtgggcatttaatttcaggcaattagtcagtgttgtaaggtgttggaagctaaataagaattttctaaattgttcttacgataactttgactcttggttttggaaaggcattgtcaaaacaatacctatctctaagtctggggcctgtaaagttattattgatggaaaagataccaaaatttgggatgatcccttggtgactcacgattttgacaattatccaaaatcattttgcggcctaatccctgatgttcagatggttgctgaactgataggggacaatggggattgggatctccagaagctttattccctatttgatccattgactgtgagtgatattgttaagggagggaaaccttctggccagggtagggattgctggatctggagtaatgaagaccatggtcgtttctcctccaaattagcctacctttctcaggcctttgagagtgctcccccaatttttgttgctccctctttgtggaataagttatggggcagcaagattcatgagcatcatacgatcctatggtgggtggtgggtggtggggtaccctttctaataccctccctattagggcaggggacaacatatgaatattgaagatactgcttgcctaatctacagtaaccatgaagaattgatgggacatttgttctttcactgtaatcttgcttaccttctctagaggtcctcccgatgggttatcttccctatttcgggttcaggtgtgcgcatgtgggtttgggtaaattttatttagaatttgaactcaagaggcttaaatgtctatgaagtgttcttttatgcctctattgtggttgatacggtttggcaaacccaaaatgataaggttcataacaataacctatttaacattgagaattacactgatatgctttcctactattatgcagattatgatgtttctatatgtacttcctcatccttcagcaattctcggctctgattggtctcctcctcttagagattagatcaaggtgaattgcaatgtaaaagtaggccatgacgacatgtgccaaactgttgttgctagaaatcacttgggagagctcacttggattgcaaccaagcgatttcaagtttttgatcctttttaaggggaagcagcagcttgtcttttggccttagagatggcggtgacgtacagtaattcttatgtgatgatggaaagtgattctgaagctactatgctcataagtcagaaccattgtggggtgctagaagtatctagtatcccggtaaatatttatttaacgatcacgaggtctaactttttttattacaatctatataaacgtttattttttaaaaaaagaaaaaaaaaaagggacccaaatatactattatttatttatttatttatttttagaggaaaaggtatatagaaaattaaacatctaggacataattcagaaaatataggtcattatcagtccaaatagtcatagaacaaacttagctaaattatgtgccactaaactagtctcgctaacccaaagagatacaactctagccgccaatagtgtttttaaaatttctctacaaattgtgtacaaatttaatgaacttctacaatactttttttcttattattattttgaaatggacaatactctattctatatatatatatatatttattgaaaatttttatagtatgtactattgttttgcatctataaaataaggacgttttttagactgttgatgaagatgactttggaaggtatattttaactattaagttattgtttacattatattaaagccaattcttggaactattaaagccttctctccactgacaaaggctgatttttttagaaaaaaaattaattggcaggtttttatctaaccttggttcctttcccattctatcaacttcatggttactctttcttctacagatgattggactcgatcatcgatttacctaaaatcccaacagactcagaaactaaaactacataaaaatgaatatgtattgacgtaaagataaagaaataacattaaaaatgaagaactagcacacatacgaggtaaatcccaaggttcaaaggcgcagaaa

SEQ ID NO: 114037 - DNA, 6808 bp, Cannabis sativa
  modified_base (4100)..(4100): a, c, t, g, unknown or other
  modified_base (6238)..(6249): a, c, t, g, unknown or other
  modified_base (6311)..(6315): a, c, t, g, unknown or other
gagagagagagagagagagcactagccatcaaaagcatatttccatggataagtactagctggacaaaattctggtttaggagtgggaaagatgagctgaacctcaattattatgataagttacagcctttttgtttattatatatataaatataaatgtaaaacattatgttgatgttgatgttctctctttttatctatgttttgatcagaggggcacatgccaaaccaacattaccagtcttttattttattttttattttatttacttttcaaagtgcctcctccggcccacaacctgtggtccgatccgacccgaccccccttatcttatcgcattcagtctctaccttttcaattttcatcactataaacttggtcacatcaaactttatagaacttccattttcttctttctttcttcaaataatttttttctttctctcttttcgcgtttaaactatctttcttagttaagttgtaaatattattatttttttctgaatatgatcaaattatataaaatcaaatccatattcacattcactaaagatcaataatataaaggagctttttttctttctttcttttttcgtcgatctttaataaaccaacgtgaagagtactctcccctcttttttctctttccctttcccattctaagattccaaagacaacctaactaagtgactaaccaacttctctaattcccctttttttttctttctttcggaccataccgctcttcaccccaccatctccctttctttctcaaatttctctatattatctctcccattcctcaaacagctcaattacaataacacatatatatatatatatatatctatcttcttattataatccaattcccaatatatagttgatcatcatcatataattttcttttgtcaatttcgaacaaacactgatataattatacaaaatgccatcaatgcagtctagcccattctatcaaatggaaaacccagctataatttccctcctccgccatgctcaaggcagcggaggaggtggaaataatactgacggaggaggaggaggcggtgacaaaaataatggtggcgaaaatcataaaaaagccaataataagcgttcttcaacaaaatcctcgagtatgaccggagggctgtttcgaatattcaagctattcccgatgctaacttcaggttgtaagatggttgctctgttaggcagaccaagaagaccaatgttaaaagacaacgccactactgggacgatcttcgggtacagaaaaggacgagtgagcctggccatacaagaggaccctcactgcatgcctgtgttcgtgatcgagctacccatgcagacaagcgctttccacaaagaaatgcaagcagacgacataatacgaatcgccttagagagcgagaccaaaacccataagaaaaagctcttcgaggaatacgtgtgggctgtttactgtaacggtagaaagatgggttactccattaggagaatgaacatgtccgatgacgagctccacgtgatgcagacccttcgaggggtttcaatgggagccggggttcttccacctccttacgatcagaaagaggccgccgccgctgccgcctccgacggcgagttaacttacatgcgagctagatttgaaagagtcgtcggatctaaggattccgaggctttgtacatgattaatccagatggttcggctggtcctgagttaagcattttctttgtaaggtctcactgatcaagcaatttaattatattaaattattattaattactttataattaagaattcgtatataagatgatgatacattcatagatatagatttattgaattggggtaaagatttgatgattgtttcgtgatcatgaatatttgattattgtttttgtaggttagttttcgattatgtaactttgactaataaattaagagagagttttagtatatatgattatgatacatcggtttatttattatatatatttactaaattatgttcatttaatggattttatttactatataagcttatgatgcatgggttcgctaatttaatttttactggatatggatatatgatcaacatggtacacacactctcgagcaaattaagattttatttaaaatttgctcttgcttacaaataattagtaaattttcattttagttattaaattaaatacttaaaattcgatattaaattatattaataactgtatgacactctaaaccatcttagaccccactattacccttaaacaagtctcgtattatattatttagcatatttatttattttgaaatcctcctctcatattatttggttctcattaatttaatttggagtgtcggtacagattcattatttataattcaattaatatttgtgaaataaatattctattttttgttttaccaagcttaatttagcgatcaccccccaggtgtggttgtgatcgtacgtgcatttgtggaaattattttatatatactttctcttgactaagggtaataatcaaaataaataatttatatttttaaattaaaaatagggtagttagaataaatattttaatcacaaaagattttaaaaaaattataaaaatacattaacaaggagaaatttttatttttatttttacggtttgaaattttttatttataaaaataggtttcttagtaaaaataataagttgtttaacatttttattgttaattgttttataatttatttatagttaatttataattgctatgtgattaatttttttgttgcttttaattattattttataatttatttttagttgatttataattgttgtaagtttcatttttctcgttatattttagttgttggagaaaaatatatttgtgattttgacttatttaaaattgtatttttaataaattaaatttgtaaatataactgtaaggaaaggtgtgggtcttaaaaatgtaaacgaaatatatatagaaaaaatgtatttatgagaaattcctaagttttttgttaattttttttattattatttttactgaagaaaaatactaaaaacataataaattatcaaacaattaatcgtcatactcattaaaaattaaaattttatattcaattattacataatatagtaaatattaattagcaaaatttaatcacaatttcatacgtaaatgtagagaaatttacgctaaaaaaggaaaattttgaaataaaaatagcaactaatgcgcattatttaatcactacaataaataaggttcttgcccgcctaaatttgcaacgacaaattttaacaagcgcataattatacaaacaattcttgtcgaaaacgaattaacactgacacttttgacttgccattgttaagtgttagttaaatattcactgaaaaatttttgctagcgcaatgatgcgccgatgaaagttggcacacttttttattttgttgggtaaaggttttctcatcgcaaatttgcgccaacgtaacttgtcacaacccgagctctaaggtcaaaggtcacactttgaccctcaaaggtcacactttgacccttgtaggaagatagcgcttataaataatcttttaatttatatcacaaaatatttatttaaaaataatagattaactcctatatcgataagaatatattagtaacaaaatcaggaccactcattaatataaaagaacaataatatgctcatagttatgtagtcaacaaaatactaaaataatatctagcattcaccattcctcatttgtaaatagtacataattaatttaagtcatctagaccatctattcgagcttaaatacaaaatcagtttcattggaagtttaataagtagaatacgactaaaagaataacgactttcttcctcaacggtaacatcctcatccactagcatcaaactgagttcctgaaatgggagaaaataggcggtgagcttataaaacccagtaggaaaacaactaatatcaaaggacccttggtttagtaaaaattcccgcatgattagattttaaaataaaatatctcatcaccattatcaaaatgtataaacaaagtagaganaccacaaataatcacaaaatcaagtgtcaaatgcatatcacaccgtctactagatccctagctctcaataacaatagatatatattggggctcagattcaattcactccctggacaaattctaagtctttcacctacaggtgagtgcacacttaatctacctgttatacccaaaatttgactgccacctcaatgaaggacacatgtcaagataaagggaatgtaaatcgataccatttcttttacggaataactcattaattacgtaagtatcagagtatatttgtaactcgctgactataaggtcttaggcgaagaaacaatgtacaaagtagcacttagtatattagcgagaaactatatgtcgctaaatgcgaatagcgaggcgccaaagaaagcgacccgtatcaatcattgagatgcttagcgtacaatgaacaaactgagtgtaaaagtcgaatcggctcaagagcaagtaagcgaggtgaccatctcgctatgggaaaacttcctatagcttcatcccgctaacgataacgaggcttacaaccctagcgagtcagaatggttctttgtaaataacaactgcgagcgacaccagacatacattgtcgaccttggaaagaagaatggccccagctcgcttttgggatcaatgtaaccaagtttctgccgagacatctctagatacaacagcttaagatgtgttcaatacacaattattttgacccagtaaaagcgagaaaatcacagctatacgattttcaaatcataaactgcatttacactacgagatatgtaattaaatctcacaattttagggataattgctataaacatattctggtcaactttgtaattaattgtccactgtgtaattataaatagtgacaaacaagagtaaaaaagggacaaaaaaactcatacaagagagttcctaaaataaatatcagaaatatgaatatgattgactcgtggactatgcagaattttaactacaaaaccacgttaaaaaccctgtgttcatatattattttcctatagcttttattttttctgtgtgaaatcattatcgtgaggctcaattttagttaacgaaaatctgcgttaacagtttggtgctttcactgagagcctctgtgaaaaagctcagaaaaaaaacctcccttctttcgaagaaaaaccatctccttcatggctaaaaatccaaaaaatgttaacaccccacatgagaaaaccaatcatctcgttctggcaaagagcccatgggcactagaagatctaccaacccacagtccagaaggaccaccctttccaagagggctcaacctgagggtggccccagtgtgcagaccatgcgttctcgaagaactcgaaccgatgttggtcctagtacacggacaacacgctcgaggagaactcaacgtgggaatggtcagaaccccgggacgagggatgaagagcacaattgtggaggtgcccaatctgtgggagaaagaacctatgaaacggaaactcgccgcctgaggcactgtctggaagaggcgcagcggcgaaacgcaaagttagaatgcgatgcggcctcgcccagagcagcacaggggacgaatgctcaaaatcaacctgaacctggagtgagaagaccacgaggtagacctcgtggctcacgaaccagaagataggaaaaggcccaggaagaacaacctggggaaaatgagacaccccctgaaaatcaggatgaacggccggatggaagataaccgaaaattgatgaacgagcaattcctcatgagaatgaggaaaatcttgggactcaaccgagagaacagaggtcacctgctagaaatcaccaactttcttcccaaaccaataaagcgaggactcatacggaccctgatggggaaatacgagaaattgctctcgggaggaaagagtagagcatgaggaatcaattaattcgaagaggagaaagtactcaacgagctaatgattgagaaagtatgggaaccagtaaatccgcgagccactcaaagacaaagtctatgagtaggacgtgatctgtgagtaagacaaggtttgccagcaattactctcaaccggatctgtaagagcacttgaatcggaagaaacctgaccctnnnnnnnnnnnnggtccaaagcaagaggatccaatctaattacgcataaacgagctggaggacaagttcaggannnnncaagtgggggaattagggaaactatctggatacgactcgaacgaggagcttaagccgtatcacccagatataatgagcaccctttttccttcgagattcaaaaacccgcatgtcttgtcatacgacagaaccactgatccggtcttgcattttaataattttaacacaataatgcgagcgagtaatgtgacaaataatttatgctgtattttgttccccaccttgcttgttggaacagcgagtagttggtttaacaagtttactcatcattcagtaacttccaaggagcagctgtccagggatttcaagaaacaatttcaggctgctagggatagacgacccgaagcggccttgctaaccaatataaaacagcaacttggcgaaacacttaaggtttactgaagtcgttttagcacggctgcagctagggttagaaatttggatgacagcacgcaacttacagcccttcaggtggggatctctactgatccat

SEQ ID NO: 114038 - DNA, 1878 bp, Cannabis sativa
tatagtaggaaatatatgtatatatatgttatatatatatatgaatcgattatccattaccataaaataaataattaattaaatggtcaaatataataatatataatctgaagttatgagcttgcaaaaccttatatatataccccatgcaattaaaaaccctagcttgcatatatttttccttccctatattaaatatccaaaacatatactaaatgaagtcttccaagccaatatttttgagtctaatcctcttcttcatcatcatattcatcaatgattttaacaatgccctaccccaatcatcatcaatgatgaaaaataataagcttattaagccatgtaaaagtctagtgttttatttccatgacattatatacaatggagaaaatgccaagaatgcaacctcagccattgttggagctccagcttggggtaacaaaaccctattagctgggaaaaaccattttggggacttggtagtattcgatgaccccattacactcgacaacaatcttcactcggccccagttggccgagctcaagggttttacttgtacgacaagaaagatgtgttcacagcttggttagggttttcctttgtgttcaactcgactgagcacaagggtagccttaacttcgctggagctgatcctcttatgaacaaaactagggatgtttcggttgttggtgggactggagattttttcatgtcaagagggattgctactttgatgactgatgcttttgaaggtgaagtttattttagacttagggttcatattaaactctacgagtgttggttgtgatcatgatcatgattgatcaatttattaatgttttacgatgatgatcatcacataaaaataaattaatgtgatcatcaagttattaataatttgttacatttaattatgatgatttgttattattttacttttttttgtcatttttctttttgggtttggtgttaattggtcgtttgttttttactttttgatgattaagatttctaatcatcgtgtgctgaaaataatttctagtgttagaaagtgtgatcattatttattaagatttatttgttcagatgctttcaaaaaaaaatttaataactttgattattccaacgaaagaacaaaagcttttaatattaattaatgtttgcaccaatatttgtacaaatatttttagtaatttgtggcataaatatttaaatttaacttctaatgataattatatttaaattatatatttagaactttagttcatacttaagtctaagtgtcaatttcaacttaatttttatattttttatatctaaaattattctagttttttttttttaatataatcaatatttgtatattagttaaaaacgtcaattcttagagctaacaacttcacatattatttgactttcagaaactatcaaccaagtattttttttttttgtttttttttttttttttgaatgtaccaaccaagtatatttaattattaggaacataaatcttttgtttcgtacattttgtcttcatatgctaaagctattataaaataataagagaagcaaataattatttataaaatgaaataattgtgccaaaaaaaaaaataattgttgtacacacaaaaaaaaattaaaatactaagagctccaacaaactgcttataggtcatttagttaatgatattataattatttttcttagttattgtaaattgtttagttagtctattattattaaatgtctagtttacttattaatagaaattttgtttattaggatttttatctcctgaattttaatatgtaccaaatcatgctcctaaatttttaaaatcgttaaaagtacctcttgaactattgagattgtt

SEQ ID NO: 114039 - DNA, 3339 bp, Cannabis sativa
  modified_base (3294)..(3296): a, c, t, g, unknown or other
gaagtaactgataccacatattttttgtacaataacatagtctaatgataaaactggaagaaaattactgttttataaatatgtacttatgccactatttaatcttattaataaaataaaataataaaatacaatttacatttataaatgtaaatttccctttcatctattcaatttcataaataatataaaaatccctctctctgtctcttgcaggataagcaaacctgaatttctatcagcggcggcaatggggcatatgtgactcgaaggctgtcgataccgtagtgtggaacgctctgtggaccactatggcaagccccgtgaagattagttgggtcggcacttcttgaaggttgacaacattctctcaagccttattgagatttgattgtattttctgcttttaatttcttcaaggttacttatagtagctatcctctcacttactccactggttactgtttttcaaacaattagcttgacagtctttttctttcttgctggggaattcgcttgacatttatctctgtgttttctttgcaaaaaatttgtaatatttgctcttgttgcttgtttaccaaaggatttcacaaggaagttctcttctcaaacgacaactcttgattatgttttcatttattttgtgttaattacaaacttttcatgattagtttttaaaaaaatcatgagacttgttttatgcctaatcttaagcgtttacagtgctttgggttttgtagattgatggatttagataaataatgggcaatgaaaaacctcatattttgcctgaaaaaaccttacaacctcaaacccagacatgctttcaacttctctgtcttagcatcagaaaaccaacaacttcgaactagaaggcgttcgttggccaaccttttacaactcagttcctcggaaaatcccattttgcactacaagaaagttcatgcccaatttgtcgtgttgggttttcagtatgatgtttttcttgccaactttctcttacggtatttcacaaaatctgattgtcttctcgatgcacggaaactgttcgataaaatgcctgagaggaattcaattacatggaccacgttggtttccatgtatgtccacgagggttattacgaagaagcattggtgatcttcttagagtttcggagaagttctgattggaaagctagtgagcatgtcttagctagcattatccgtgggtgtacacagttgagctcggttggccaaggttgtcaagtgcatggttttattattaaaacaggttttgagcaagaagtgtatgtgggtacttctttgattgacttttactctaagcagggtgatatagaagaagcaagaatgatatttgatggtttgtttgtaagaactagtgttacttggactacgattatcacaggttatataaaagctggaaaaagtgaagtgtctttgcaattgttttgccaaatgacagaagccaatactcttcctgacaactatgtgacatgcagtgtattaagtgcctgtgcaatgctcaagttccttgaaattggcaagcaactacatgcttatgtgttgaggctgggaatggaaatggatgcttcagtgttgaatgcacttattgattgttatgtcaagtgtggtaaagttcaagcaggacggaaactttttgatcacatggttgtaaaaaacattatttcatggaccacaatgatttccgggtatatgaaaaattcatatgatttggaagcaatgcaactatttttcgaaatggccaaatttagctggaagccagacgaatttgcttgcactagtgttcttacttcatgtggttcagttgaggcactaaaacatgggaaacaagttcacgcttacgccatcaaggtcaatcttgagtataacaattttgtgaaaaacggcctgattgatatgtatgcaaaatgctattctttagccgatgcaagaagaatttttgatggtattagtgatcccagtgttatttcatacaatgcaatgattgagggatattcaagacagcagaagttgtgtgaagcaatttatctttttggtgttatgaggcgtagattgtccaaaccaggtctcttgacatatgttagccttcttggtgtatctgctgtctcatttaacttgaaattgagccaacaaattcatggtctcatcactaaatgtggattctctttggacatatttgcttccagtgcactagtagatgtttattctaagtgtgcttgcattaaggatgctaggcttgtatttgaggaaatgaatgaaaaagatattgtagtttggaatgcaatgttctttgggtatgtccaacaatcaaaaagtgaggaggccttaaatctctactttgatctgcagttatcaggacaaaaacctgatgattttacttttgttgcgctgcttactgcaacaagtgagttagccagtcttcaccatggccgaaagctccataaccaagttatcaaaatgggtcttgattttgactctttcatcaccagctctatcttggatatgtatggcaagtgtggaagcattgaagaagcttgtaaaacattttctcatactagttggagagatgttgtttgttggaactccatgatctcaacttatgcacatcatggagaagcaaagaaagcacttcagatatttgaaagaatgataaatgagggaatcaagcctaattacatcacatttgtgggtgtcctatcagcatgtagccatggagggctcgtggaagacggacttggctattttgaatcaatgcctcagtttggcgttgatccagggactgatcattatgcttgcatagtttctttactggggcgagctgggaaattacttgaggctaagaaattcatagagaaaatgccaataaaaccagcagcagtggtatggaggaacttgctaagcgcatgtggggttgcaggaaacatagaattaggtatatacgctgcagaaatggcactttcgagtgatccagttgatagtggatcgtacattttgctttcaaatatttttgcatccaaaggtatgtgggttgatgtgagaagggtcaggcagaaaatggactttagtggagtggtcaaagaagctgggcagagttggattgaattgaacaatgaagtacatacctttgttgcaagagacacagcccacaccgagtccaatgccattttctcagtgttggacaatttgatgcttgagatgaaaggagtaggatatgtgcctaccaataaaatctaggggtgttcatctgatccaatccgcacttttttggtnnnacaacatccaatctgcactaagtgcggatttcatattttggat

SEQ ID NO: 114040 - DNA, 6295 bp, Cannabis sativa
  modified_base (44)..(54): a, c, t, g, unknown or other
  modified_base (137)..(137): a, c, t, g, unknown or other
aacaatctcaatagttcagggagcattttcaatgaccttaaaannnnnnnnnnnaaaaatcctaattagtctttttttaatggaaaactgtaaaatatatatatataaaaaaatctataaacgtaaaaatgtaattntttttttaaaaaaaatagtaatttatgtaattatcacgttatattattatgttcctttttgtagacccattgtcatttaataggccgatcggtagtatttacaaaacatccaaaatagtataaatagctatttcacttgagaagcttaaaagatctgaagttagcatatgatataagactgtattcgtaatctttggtcaactaaacgcagacatcttccttgtaagacgaggtcggttgtctatattttggcaattgagggtgtaaaaatcaacatattttagttgtatgctgagaaaagattgctaccatttcgtctaaccaaaactttcaacagctggaaacccaattgagatattatcaaaactaagatcttacaaccttacaaattatctctgcaacgttaaaaattatacatctgatttcaacaccattatgtcattaaggacacaacaattagagaaacgtcatgtaattacctgatcactcgaggtattaaataaataaaatgatcacaaaatgataagggccgtattggggatatgattcaaacagcttttacaagaagttactcagcagctgtattttcattgtcattgctatctggtagagttcccaagtcagttcgcgcatctttctcatcttgagatacagtagaatccgaagaattgacttgctgctcatcttggcctgtattgctgttatcatttgaggctacttcattctccttctggacttcagcttgttctcctgtgcctgcacctccattgttatttccattgctctggtctccattctcatttgcattttggctggaatcagaattgttgcctgtgtttggagatgcttcattatccttttttgcatcagtttgctctccttggcccgcaccttctttgccatttgtgttgctctggccttcgtcgccattcacattttgactggaatcagcattattgtctgtgtttggtgttgcttcactctccttctggccatcagtctgttctccttggccagcaccttcattgccatttgtgttgctgtggtctccattcacatttgcattttggctggaatcagcattgttgtttgtgtttgccgttgcttcattctccttctgggcgtccatctgctctccttggccagcaccttcattcccatttgtgttgctctggtcaccatttccatttgcattttggctggaatcagcattgttttctgtgtttggtgtagcttcattctccttctgggcattagtctgctctccttggcccgcaccttcgttgccatttgtgttgctctggtctcccttctcctttgctttttggctagaatcagcattattatctgtatttggtgtcgcttcattctccttctgggcatcggtttgttctccttgacctgcaccttcttttccatttgcattgctttggtcaccattctcatttgcattctgattggaatcagaatttttttctgcatttgagttatcatttgcattctgctgagcatcgtttttgttctcattctggccctcatcagcattgtgacctgaattatcatctgtcttctgctgtatgttgttcttgttctcattctggcctgcaccagcattattatcagaattatcatttgtgttctgctggacatcgttctggcttgcatcagcattgttttctttattcgaggatccatcattatcgtcggtcttcatcattagcacattttcttgagttccctcagatccagagttgctgttggcttctagcttctgaacaacttcaatattttcactcgttgctgattgttgagaagttccagaggtatctgtgaactctcctttagcagcattttcattctctgctgctgaagtctccccagaatcttgtttctcattgctagctggttctgacttttcagtttgctctggtacagcattttgctgagtagactcatcccctgtggtattaatattctctgcattctcatctggattttgagttgtatctgtcccattctgctgtgaggagccatgattttcttcagtgttagtatccattttctggtgctcatatgaaactactgttgaatcatgaaaggtaccatgtccagtatctgcatgatcactctcgttgccactatcttcggtggttttagagttagcatcattgctttctgtcttctcaatttctgagaccaaagctgagtcgttttggatgacatcaacaccactctttgtatcgttctccttctcaacaatgtcctgtgtctctttgttttcaaattgctttacctcttcagagtcttctggaccacgttgctcggtttcagttgtattctgagtctcatgagctacagcactagaagcatcatctcccttgtaattttcttctctggcctcattatttccatcacctccatcttgaacctgatcatcacttgaaactgtctcctcaatcttctttccattctcttctgtgtccttgttctcttccctatcttctttattatcctccctctgaccttctacattttcttgctctttggtctcctcagtcttgttgtcctcactttcttcattctcactttgctgttcatttttctccccgtctatttcattgatttcattttcactctctttattttccttctcttttccctctacactctcattctcatcaccaacattgtttttgctctcttcattctcattctgtgtatctacagaatcaccatgatgctcagtcatctcttcggtcctatcttgatcattttcatgtatttcttcatcttcaccgccttcttttccttcattttcattctcttcggacttgtgttcttcttcatcctcctccttatgccttacatctttaacaactggttcctccacattaggattgggatcttttcgccccagcttgagaacttcactccctgtcctcgtgttcaaattgagctgtgttctcttgttattggactgcttcaattgataggctagccaaacgcacacacccagcaagagaaggagttgaacagcatgcttcactttgacacctcgagatctcccattccggcgaggtgaatgcttgaacatgatgacccctcttgcaagctaaacttttatgggggtccctttcaaacagaatacctacattacagatcaaacacctataaaaacctcaaagatgtgtggtttgaacaaatggattgaatctcataaaaagggaaagaaaagaacatagatccaagttctgtctagcttcatcaagcaaattaatttttcaccacattaaaacaaaaaccaatcatgaaaaacattgcaaattctcccagcattaatgtaaatgtaacaatagcctttcaactagactagaaaccagaatggttaaaaactcatcagtctatttttaggcaaattatttcaaaagacctatgcttcacccattttttcagagtgtaaatgccaatttcctgctcaaccaaatctcacacttgcctttttaaaggcacccaattacagtcaaccaatgtaaattaagaaagtaataccaaatataataacaagcaagaaaaagatatagttgtagacacagatctgaacaaaccgaaaaaaaacttgccacattagagaaaatagaaaggaacttaaatgttcatacatacctgtggaaaagagattcttcgatgacagaagctttttaacttttaatgggtgtcggtggttaaaacaaccaaaataacaaataagagtaaaacagtaataatgtctgaaaatagaattgggaccaaaacaaagttcgaagaaatgaacccctaaatgggttaatatgagagatcaaatagtgggtttgtctgaaactgttggatctggaatttgccaaaatacaaatcacccgaaacaaaaggaagaagagagagagagagagagaagtgtcagcacaatttaacactcaaagccctcagttttatcagtaggatctatttaattaaacaaaagagaataaaaaaaatagtttcttaaagttgaagaagtggggtttggcttaaggatcgatacgatgtcgttttaagcctacgactttttaactgcaaaggtttcaatcatgtatgaccagaccagattaaaatttagaaaaaagaaaacaaaaactaaagccgtttcagttattattcatggcttgagatatgccacgtgtcgtctcgagattcccacttcgctaagtcggtgaatcatagccgtgtaccctatttgctccaccatcttcgtcttcttcttccttaatctattctaatctcctttcccacagagctacgcaaaggaagagactaaaaccctaaaaagctaaaacccaatggcttcgaagctaatcgcttcaaatctccgccaaaccctaaagagaacctcttcaatcttttctcatgcacgctccaattcaaccgccgcttccgccgccttagcttctccggcggaaccctatggggaaactgatggggtcaccatgaaaggagtgaaaatcgccggaaggccgctttatctcgatatgcaagccacgtctccggtcgatcctagggttctcgatgccatgctgccgttttatgtgtctcaatacggaaaccctcattccagaactcatatgtacggatgggaagcggacgaggcggtcgagaccgcccgcgcccaggtggcggatctcattggcgcttcgcctaaggagattgttttcacctctggcgctacggaatgcaataatatttctgtaaagggcgttatgcatttctacaaggagaagaagcgtcatgttatcaccacccagactgagcacaagtgcgttcttgactcctgccgtcatctacagcaagagggcttcgaggtcacttaccttccagtcggttctgatggcctcgtcgatctggagaagctcaggtcttcaattcgacctgatacgggtttgatttcagtcatggcggtcaacaatgagataggcgtgattcaacccatggaagaaatcggccaaatctgtaaggaattcaatatcccttttcatactgatgcagctcaggccttaggtaaaattcccgttaatgttgataagtggaatgttagtttaatgtctttaagtgggcataaggtttatggacccaaaggagttggggctttgtatatgagacgaagaccaagaattagagtcgaaccgcagatgaacggtggtgggcaggaaagaggtattcgaagtggcaccgttcctactcctcttgttgtgggaatgggggctgcttgtgagcttgctaagaaggagatggagtatgatgagaagagaattactgctttacaggaccgaatgcttaatgggattagagcaaaacttgatggggttgtagtgaatggaagtatggatagacggtatgctgggaatttgaacttgtcgtttgcctacgttgagggggagagcttgcttatggggttaaaggaagtggctgtgtcgagtgggagtgcttgtactagtgccagtttggaaccatcttatgtgttgagagctttaggtgttgatgaagacatggctcatacctccattaggtttgggattggaaggtttacaacagaggcagaaattgatcatgcagtagaacttaccgtccaccaggtggagaagttgagggaaatgagtccactttatgaaatggttaaggaagggatcaacatcaaggacattcaatggtcacagcattgatgaagaatttgaatgagcagaagagtattaagcttatattatggatgagctgaagataggacctttgagcctggagctgcataaccagtgtcagaatatatggtgttcgatacaggttgttttgtttcgttatcctatgtcgttttttatttggataactatgcctgccacttcatttgcaatacaaaatatttccaacctttctgaataaattaaaccggcttgagaagacgggaatagtggttgttgtttcctacagagatatacgttcttgtagttgaaaaggtactataatttgttttttttttttcttcacttttattgattaaattattgtgcatggtatgaaggatttgatccctggacatacatttactgattattaagcttagttatgttaaaaaaagttgcttaagaataataagctga

SEQ ID NO: 114041 - DNA, 3041 bp, Cannabis sativa
aaaaaaaaaaaaaaaaaacctgctgttattgctacatttgggaatcggtatgttatacatatgcgaatagaagtgatcatacttaaaatataaaaatgaagcttatttctgccaaaacatttttcgtttttccgttaattaagtcgcaaatatacacgcaaacgatgattgaaaatacgatgaaatattattaaacaaaacagagccatacttatgaaaacgacatccaattatagaatttaaccagggagttcatgagcaacatggcaccttctttcctattttttcttcgggaagcaggtgcgatcgtattttgccttacagcctgagtatccgatatttcttttccctgtgcaatgaggattcatgcaaaacccggcatgttcagcgtttaaaacagcctgtgacggtttaacagttgccactaagacccttcggcttatttcagaaggcatttggaactccagatccacttcttgttggccgatgaggcattctttactgcggcagacagaggaaatattggtggtggtgttgaggatgctcaccgacattgtatcattagctccgcattgagttgaagtattaagcacaagcatcgtcgtcatcaccaccgacagtgcactaacaaagaggttagtcgacccacagaactctgtcattgttataattatctactcttttttcttctctttcttttctttattgtcttcttcgcactctcttctcccttaaataagaaaaatactgtgaaaagaaacagataagaatgttgttcaaaaaaaataaaaaaagagataagaaggaattacgtggtgacctttagttggtcggtctgtttaagccaataacatatggttcatctagcggtggtcacggatgaaccaagattctcacttaaaaattagtgtcttatattattaaataatttaaatttgacacatcaattaatttttaatttattaaaaaattaaacttttaattgagtgaacagttaatatatttaatataaattaaattagttgatgtattaaatttaaattagttttacacactatgaaatgtcaatttttatagttccaattattattttttcaaaacaaaaccaatatagcagattttttaaaattaaaaaccaaacctaatcaataaaatgctcaaaccaaaccaatccacttaaaaacaaattggtttagtttgaaattgcccgagtttaaaatatttaattatttttttcttcaaataattaacaatgatgatatagtaacaaatctaactccataattttgtgtcaaagcataaaataaaatacataaatccaattacggtcataattctgtagctaactgtatatatcataatagtagcaaataataataataataagcaaattttacatgtttttttttttttttggaataaacttagcaactttattaactaacaatcgttaataacaatagaacgcacttcgttggaataattctccaattgaaacacacgaactggagagaaacatgtattctcgctaaaacatgggtcagcttgtttgcagatcgtttgaaaaaacgtctcaacattatttaaagataagagaggagtgcaaacatcatgaactaaaagaccaaaagaggatgacaaagtaatttggctttgcacagcttgaacacaaattaaactatcagtttccaaagtcaattgtccccacaaatgacggtcaatccagcttaaagcttcttttatgccaacaaaatcatatatttcaggttgcacctgccatttcggcataaaaatccctgtttctccgctgcccccattcactgataactactcgacgccgtggacacccgaccgaacccagaaccaagaaccgataagaaccaataacaacgccagaaaccaataaaccaaaaccaatgagagaaactatagatgcatgtcaaaagactagactaatgagaaaacctaattagtttcaacacatgaaactaaaaattctaaccccataaaaacacaataggaattaacctaattacagtaaaaaaaataaaagaacaaaataatggagacagaaagaaatataaactgacgaacaaaaggagagataaaagaataatattctaaacctataagaatgaaaggccgcagttaatcaacacaaccaggcgtaattgcaattaaccaaaagaaaccctaaatattactccaaacgaaaccgatcaagatccaaatcgacctttgaatgaatagtaacaataatgaagttgagattaactcatacccatcaacaataggttaccggtagaaaaaaagagaggattgcatttgggggtggatttgtcgaagtcactgaggtcgtctgcagtggtaccgtgagaaagtcaatgatttttggagcaggtacgggtgatccgatggtcactcgtgagggtaatgaaattattcgtgaagtttataaatggagtcctgaactagctgctgcttgtgaagtttggaaggaaatcaaatttgaatttgtctctcgctcgaacccatctctgtagcttgtttagcaaattaatttatatgttaattgtattaataatatatcaaattgtatgtgagaattagaagcaaaaacaatatttgtagaggaaaaaaattactgttgcaccattatcatcttcgtgaatcttaaaacaaggcatatgtatatagcttatatttagataccgttatacaaatatatatacatttcaagaaaaaaaaaacgtggtgggaaatgaatttaaaaaagtacgaattctgtgatgaataagaaaaattagagaaggattaatattaaaattaaagttttagtaagaaactgaatacaaatcagcattaacgatgaatataatatgttttcaaaatcaagtaaccaacaatattaattatatattatattaagtcaaatattttagaaaaagaatatggtatatagtgcgtgtgattactattgttatagtgagatttttctcacctagaaacttgagactggactcctgtttaaaggacacgtg

SEQ ID NO: 114042 - DNA, 2026 bp, Cannabis sativa
tgtcaagtttagtctgtaaatcacggcgattacggttgcctgctcaatttggaaggcccaaagtgagttggtttggaaatcaaaatcaactttgccgcaaatgtcattgttagctcgtgtggtccttaatcaatagtaaaaagctcactctaaaaagagaggcacactttttatttatatgggaatagatggtgaagtggagctttggactaaatcagaaactaatatgattaaaatgaatgttgatgactcgacttttaattaagagaatcgttataggatgggctgggtggctagaaatcacttgggtcgacttttggaggctatttctattagtagaccagggcgacttgatcctgttattgtggaggttattggtgtgaaagaggcattaagttagattaaagaaaaggctattacgcattttccttttggtatcattattcaagaatgtaaggctcttttcttcttctactatcaagtttagatttgttaagtgcacttactgctaacaagattgctcattttattaatcgcagactcttattctttaccagtttatatttttagggagaggaatgcccctaatggtctattaatattgtaatggttgatttaatttaattcaataaaattctcattcttattaaaaaaaaaattctctaataaatgaattttaatggttccatacaaaaaaataataattaaacaagaagaaaaagcaaaatacatttcatgacatggatttataaattcataacattcaggttagtttaattttaaataaaaaataaatatatttttttaacattttaaagcagttttcttttttggtatttgtatagaaatccacataataatccatatagcaactaatagatgaacttaaatcgcaactaaaattcacatagtaatccacataaaaactagcagaggcagagctaccgaaacagtaaatttgaacaaaaattaattttgtcaaataacttatgcaataataatttaagagtaatgtagtaattttgtaatagtttaattttgtatttcattcctactcaccaaacatatacgaaacaaatagatttttttcattcctactccattttccctttatcttttttttttttccctttttcttcataataacataaaaaattgtgtataattacaaaatattacaattttttaaacaattaatacatatcaataattgttttattgattttattaatttgtaagaatattaatgatgactataaataaaatacaaatagtttacttaattaatctataacaaaataatttacttatgtataaaagtaggtatttattaaatattgtttgatttattttatatacagaccaaaccaaacttattaaaaatgatattaacgatgaatgcaagtaatataatttgataacatcaactttaaatgaagtagctattacaagtgagctacgatatttttttaagaacttgatttgaagatattttttttattattttataaaaaatattacacgatgagttttttttttaattttttttaaagtcttctatataaatttattattttttaaaaatagtatacattaaaatataattaaaattatttgatatgattatattattcaattaatattcacatatataattaattttttttttctaaatatctatacgaaaattagggtaatatttttggacaaaaactaattttatgatatatttacatgagtttttagatgtaaaacttaatattcaattaatgtaaatttaatattttattaaaaatataaaatataaaagcatataaattttattaattttttgaaaatggatataatttattaagctttaggcacaccaatttttattttattaatttatttatttgcaaaagctacattttttagcaatttattcaccaatttggaggctctaattattcgtatgtaatttttttatgggataattgcggcaaaagtctccaaaaacttgaggttgatgccgattagtcctcaa

SEQ ID NO: 114043 - DNA, 1847 bp, Cannabis sativa
  modified_base (1764)..(1793): a, c, t, g, unknown or other
acaaaacttatttattctagtaaataatatggtgtaagagttttggttatgtaaatgagctttagaaagtctcttctcttccctaataagatgtatctgtttagtctggtatggctctttcactgttggagttctaaattttttttgctttttgacaaggctgaagtgcctctgaagacctgtgaagattgtgatggttctggtatatgttctgaatgcaaaggtgaaggatttgtgcttaagaaactatccgacgagagtgcagagaaggcaagactgacagctaaaaatgcagccactcgatatactgcagcgtatgttatctgctcttttcctcttttataccatttcaattcatatcaatttggaattggcttatcaagtaagtcattagattacttgcaacgaaaggaattggaatgaaaatagtttttctttctcgttctctcccacaacaaaagagagccttgagtttctattccttcctttcctaactcttaacttacttttaaaagctgcttttgggattctgaagttccaacaacacttttgttgctagttaagtaaccaatgaattttaacttttagctggaattaacttttggaaatttgtcgaaaagggcttccattcctaagaagctaaacataatccatgccctctttgataaaatgctataactgagattgtgtaactttcattgtccttcaggcttccaaagaaatggagttactgtacaaaatgctcttctgctcggtcgtgtagtacgtgtggcggtcgtgggaagataagctactagtttgtttgtaatcatccttgtgcagagatcccaacagaggagacaagatctttcatatgagtcatgaaggtaaggttgcatctgagttttttatgatttcatgcactttagtttcctcattaactctatgtaatatattaggctattagaatgatacattgtttttccttttaatttttctattgtacctgtttgactttaccattagaatcaatttttgttttgtttttcaatagcttcatttgatgaggaatgtacatattttgtgttgtaattgtacttttgttattgcaatattattatttattcatataggaataggatcaaccttcttataatgcttttgtatacatataattctttcttgtggagaattatgatattctctaataccaaaaatgtattataaatacaattcttcaacttcttcatattatctctcttataccaaaagtataattacaaacacaaacataactgtactttcgtaaaaaaaaagttaaatctatcaaaatgttgaaaaactgcatatatatccttatttttgtaaacattttgtcaatttttgattaaatacgcttaataatttttgctagtttgtggttctcaaaggttgggaatagggttgggttttagttgcccatttatgtgacaaaagtttgagtttgagatactgagtagagagtgcgaaaatatgtgcacagttgagaatactaattgtatgttattttgatcatttgattgttgaggcttttacctctttatcaacgaaattgtgctcgttttaggaaaaaataaataaatagataagtaaatttttacattataccatagaattatgtgatttctcttctttatttctttatctcaatcatttaaattatatctattctatataaagtaggtctatataactgaattctgggttataagaaattcatgagtgactttttatttatatttaatnnnnnnnnnnnnnnnnnnnnnnnnnnnnnnaaataataaaataaaaataaaacaaatctgattaatatttgaactgatatttga

SEQ ID NO: 114044 - DNA, 5234 bp, Cannabis sativa
atatgtattaaaccataaacatgtaacatacatgtaatcatacttcacttctaaattgataactaatcagattgtaatgaattttatttagggcataaaacccaacactattccacatagcaacgagtggcctcctcaactcgaacacctacagcctcatgttttcatgtatctgatctactcatagaaatagaagcaaggagaagatatcgaggctagagatatttaagccatgaatcgcagtaagatagcgactatgaaatgaatattggtataggagacaaggctcatttcatccgaggtacaagcaaaagaggaaattttagtgtaacttaggatgtctggtacatcagactacctgagatactatgttatcagatgtgaaagtgacttgacatcctatgattttgggatatgataaggttataaagtgtgaagggctcactataaatagagcccttagactcattgtaaagggaactctcttgtagaaaaaaggttaataaaattgtagtttttctaaatagtgaagagagtaatatttactttaagtattcttttattaagatcctaaaatatcatcttcagctcttgttattttgttgatgagttcttaccattaacattgttgtttcacgatctagtctctatatcatctaggtatatcaggtgtgcactcacctgtaggtgaaagacctagaatctgtataggaagtgaattgaatatgagccccagtattatggtagttatcaggtgcgactacctgatttttgcatgtcattttctatgattgatattgagagctaggggactaatggatggtgtgatatttatttgacacttaattttgtgattatttgtggtctctctactttgtttatatattttgataatggtgctgagatgttttaattttaaaagctaaccatgcaggaatttttattgatccaagtgtcctttggaattagttatttttctactgggctttataagctcaccccttattttttctcactctaggaactcagtttgatgctagtggatgaggatggtacagttgaggaagaaagtcgttattagtttagtcttattctatttatcaaactttccaatgaaactgattttgttttaagcttgaatggagtgtctagatgacttaaattatctatgtactagatagaaatgaagaatgatagatggtagatattattttagtattttattgactaattgttatagtgagattttctcacctaaaaactcgagaccggactcctattgcaaagacacgtgtactcacgctcctcaagaagagctgagatgtaaatgagacacctcgaatatgaacctcccctgaaccagattcagtgagatgatgcgaccacgaccgagtctagtcgcattttcgtatggctcgcacaatgtaggaccaatgaacggtttaacactcgcatataccagaatatatgaaagtattgccgagatcctcttacaaattgtagagattgatcctttactcaacgagctggtctagatgacacaataacctcgataacctgataaggacttgcatgccttaggttaccgacttgctataagatgttcgtataagcaacttaaacaagacgcagacatattagaatcgactagtctcaaacgcatcttaagcatgcgagcttatgcaagaatgtgaacatccaactcacactatagaagtcacgtatgttcttgtatgtagtgaattaagttgaaactgtccttcatttattatgtttacgttttttagtttaattattgtaattcaatgtataaacggattgataatgaattcaatctctatgtaaatcaaaggacacttgctttgtatataaaggagtgatccaacgtgaaatggacaagacataaatccttgcaacaatggactaagcaaaccgtgatctgactgaaccactatattctcttgtgttctttaaatttccaatttctattcagtattttgtgtccttagtttgaatactcgccactctaggttgagtactcgcatatattctccttatattatttctatattatttattttggtattgttaaaattccttcaacaacacttattaaatctatctatttggtgactatataactgtagagatattattgttctttttatattgatgagtggacttgattttgttactaatattttcttatcgatataggagttaatcctcttattttataaataagcactattctgtgatataaattaaagcatcatctataagcagtatcttcctacaagggtcaaagtgtgatctttgaccacccaagttatgaatgttacatatctgtcattatctagggctcaggttgtaacaacttcctttctcattcgaatgtaataataaaaattaaatgtaataaaattcaattatactttttaatataaaatttaatctagttttaaatttatttataagaaaatatatctaattttattaaacaataaaataagtaaataagtttagatatttcaaataataaacttttcttaaaaaaaattattatgaactatgattaattgatattaacgtctaatttaaatttaaattaagatttgtattaaagataattatctaattttcttaatacttcaaaataattatcaattttatattttaataaataaattaatttttaaatatttaaaattattttttaataaaaataaataattacttaatttaaccgtgttagtttcattaaacttaacaaaataaaaccgtttaactaacaatttctgttagatatccacatttaatataagagatgtatatgtatatataaatgtatatgtacatatgttgtacttatatatgttgtatatttcaatatattttttttctttaataaaccaaaaagttcattgcaccaatctcatttttacaacctaaaagcgccaaacaaggccttaaaattatatatatacaactttttatttacaaaacttggaaataatctatatcttttgtttcactttttttggtaatacacacaaaattctattttttttacagcccatttaagttgctttaccatttcagtagcttgttgcctatttgaattccaaaacaaatcattccttgctctccatattgcataaaccattgcagcaactgctgccatcttgagattctttcaaaatctggattccttggattttcagatccatttcagcaaaccatgcaacgaatccgaatgaacctgccagtgcaaccaatctttcagcaacttcaaacaatcaagtgtaatttcatacttgaaaaataagtgctccacattttcaggaactctgctgcagaatagacaatcgggtgagtctataatgctgaatttgtgaagtctttctcgagttttcaaacgattttgcacagccaaccagaattaggaaattgtgcttaggagaattaagtctattccagacttcattgctccacaaaactctgtgagaaacaggagcaaaccagctataaccggtgctgacctgataagtagcagcagtaaacactcctggttgctgcacctgctgcactttgtcctttatttctaccattttcctcccgtaccagctgctggttgtgggagcattgtacttccaccaatcttgttttttaatgtacacacgatgcacccatttaacccataagttgtcttttttgttagccacaacccatacatgtttaacaatgcctgtaatgttccatgtagcaatattcataatgccaagaccaccttctttctttggggtacaaatcttctcccaagaaatgctttcagcccctgtcatcaaatctttcccagtccaaagaaaacttctaaacaaatggattcaatctctttaattacctttttttggaattatcatcatttgactccaataaatgtgaattgaaataagtaaagagttcacaagcaccaacctgtcagtaaaagaaaggtttcgagtgccccacaccttgattttagcagccattttttgagctaggctactgcaatctgaagcattgatcttccttgcacagataggaaccccaagatatttgaatggatctctttatctagtaaaatcagacatatctaagactctctgaatctctctatttgtcatgcccgagtagtataaagctaatttctacttgttaacattcaagcccgatgtgagaaaatagcttaaggccttgcattaaaaagtacatactcttgaaatctcctttgcaaaataagagaatatcatctgcaaagctaagatgattaagtctcatttcagcacatctttcatggaaggcaaaatcctccttccccactttcgccaagattctgcttagatattccatacctaaaacaaacagcaatggggacatggagtctccttgcctcaaacctcttttagcctcaaaaaaaccatgaagagatccattgaacatcaatgagtatctaggagttttcacacatgtcatgaccacacgtataaattttgataggaacttcaaggctctcaacatttcctctaggaagtcccaatccaaggtatcataagccttttgcaaatcaatcttgatcatgcaattagacttagaaacctttcttccataattcctaatcagctcctgacatatcatgatgttatgtgcaatatatctccgcttgataaatcctccttgatttagagacgctaaatcagggaaaatatgcttcagtaatatgcttcagtctagagcaaatcagcttagtatatttcaatatttacattgttgtcgttattttttgtgttcttttggtttggaatcaaaataatgggtagaaattttgtttgttgatgttgttcaatgttctgtactagtggttttatgttttaatctaagttaaatctaattttcaaaagaaaatattaccatataagttgcccccaacttgatttgatgggttcttacctgtccagacccattaggtcatgctaatttcgatcagaatccagtacaactcggtgctatacaaggatggagagccaccctttcgcattaggctatatggtgtcccccggtagatgatcaatcttaactcaaactacatgttgcacatgcctaatttcaactaatagaattaaaaaaaccgtgtttttgcaaatgtcagttgtatataagaaactataaaaactgtaagcgtttgcagcagcaga

SEQ ID NO: 114045 - DNA, 4178 bp, Cannabis sativa
aacggctccaacaaatgtaactttggcattacaccatttggcataccaacatagttgatttgtggttttttctggagagaagtaaataatgaaggattagaacggacatggtgtgtggcaccaatgtcaataatcaagctagttttaagaatggaagtgacattaccagaatcttgaaaacagtaggttgctgatgattgtgatcaatttgacattgattagtttgagttggggatgtagatgattgagatgaggatgtttgagattgaggttggagcctttgtgcaagcattcccattaacctttgacattgtgaagataaatcttgattgttaggtacattttcaggccaattatttcctgttgaaaaatttgttgatgatcaactttgctaatttctaggtttgctagggatttctttaggaaacctttcatgtaatcgatgatttggtggataaccatgaactctgtaacacttggcaacagtgtgaccaggaagtccatagtgtgtgcaaacagttatgttattaattctattcctaaggccactccttgaaaattaccctacaaattgacctgtattttcattaggaggattagagttttcagtatgaggagtgatgattcctctatgtatctcttcttgaatcataactacataagctttcttaacatttggaagaggatgttggagtaagaactaagaatgaacattgatagatgactcattcaaaccaatctggaactcaaggaccttatcttcatcaagatattcctgtataattttcatagcaccacaagtataaacaagcttttgtctatattcttccagtaaatccctaagactctcaagcctggtgtaatatgaagtaacatcattcataccttaagtcatagtctgcattgatcgtttaaccctgaaaattcttggtgcattcttttgatgaaattggtcctataactcagaccaaatgtatgatgcatcttccatgtacatgatgccatcaaaaatcgtaggtgaaacaaaatgcaagatccacaaaatcactaagccattacaacgactccacggatcgtaatcttcatcatcttcctcagaagctggaagattaccattgatgaacttgaccttatttcttgccaggagtcaaccatcattgaacgcctccatcagctgtaattctttgatcctgtgagaattttaggcacaagcatcattgagggattatcaacattagaaaggaaatacgaagataatctgttgtcttgatcaagtgcaagaatatgaataaagtcatctgaagctccacgagcaatgcttcgagtttgagcacttcatcctcttgccatggaaaaataaagaagtaagaagaagaagaaggatcaacaagagaaggagggagaagaacaaagaacaaggaggtcacgaatcacgtggctctgataccatttaagttttggaagaataaggaaaaaatgaatgaaatctaattaattctcatagaataatgaaaaaaaagcaataaatacatgaaaatagagtgttgaacaaagaggaatgagtttgttacataacaaactctctaacagaaaaataacaactcactcaactaaattaactaccaactaattaacatcatacactacaccttatcaaacttaatagcgacaaaatttgctttaagcaataaatattatagaattattttatttgttggtcttttatcatattggttagatagtgataaaaaattaagatcagtgttttacattagacttatttttatgtttatttatgcctatattaccgtgtttgtatagatgctaaagttagggtttcctatatcatttgtagtgccagtttaattgtagaatgatataagttttttttacaattgtatttttttctcatataggtatgcctggtatgactgcttatgctggtttctttgaaatttgttctccaaaaaagggggaatatgtgttcatttctgcagcatccggagcagttggtcagcttgttgggcagtttgcaaagatcttaggttgctatgttgttgggagtgctggaagcaaagaaaaggtttccaactcatctctaatataatttatattcttagtgagagatgtttgattcagtattctcattggactgcaaggtcaactcaaactttaaatcaaatgcctttaaagaaattacattgggcataacttggtaaaatcattttcattaaatttaagctgttgcgatataatcatgacttggagttttgtttatctattactttttttgtaattgcaaatcaagttaaagttataagttatggtgaaaacttcttagtagatctagcagcacagaaaggtagaggatttgcctctttcactattgcatggtttgttttattaagtttgagattgtaggttgctttctttcctttttttttgccaattctttgttggttgattttatatgtatcatacttggtaaattcacaggttttatatgctctggtcattatgatatcaattgttagagccacttacattttctgactctttttttaattttgcttcttttattatttatttattatcctaggttgatttgctgaagaacaaatttggttttgatgaggctttcaattataaagaagagcctgatttcgatgcaactttgaagaggtaggtctatgcttttaaaagcataatatgaattttttttatttatctacttatacgaatttgggcacaatttagttcttgaaagaactatgaaatggtagtttattgataagagcaagagcaaatttaaaattccaagttattcaagaaacttaataaactccctaagttatattttactctaaataattcacacaaaattgcccctctcacaagactaattctcagtatttataagctagactaacaaataatcctaactagcccaccacattagaaggcacaaatttgagcataatcactaaggacttgacaacttagcctccctaattctaattagctatgctagtgagactaatattaaggcctaacatccagagtgatcaatttttttttttatttctgtttatgaaagtttttgacattataaaaattattctctcatttttgttttgatggtgccacttctattttcagtcaaaccatcattattatatcatgttaatagaaataagccaattctatgtacaagattagaaaataattttcaattacatgatttgtttttggacaggtactttccagaaggaatagatatatactttgagaatgttggggggaaaatgcttgatgctgttttacaaaacatcaggccccatgctcgaattgcagtttgtggaatgatctcacagtacaatcgtgaacaacctgaaggtgtaagtaatctgatgaatcttgtgtggaaaagtgttcgaatggtaggatttttggtttttgagtattatcacctctactccaagtttcttgaattcgttcttccttgcatcaaagaaggaaagattgtgtatgtggaggatgttgctgaagggctggagaatgccccagcagctttggtagggcttttcaccggtcgcaatattgggaagcaggtagttctagtctctagtgattgatttgctttgttagcaccacttttatcaataatgttcaaaagtatatgtcaaattgtatggtttataaattttaattgcactgtcttggttatgtttcatacagtaccgttttggcaagtagctttgtttagtacatttatgtttgaaaatgaaacccatttgtcatatttataaacatttattatttgtttcttcgcaattatattgggcgtgtcaataagatcaagagtatagtgtgttttctttagtgctgtagatttagaacaagaataatctaaaaattaatttagaagtttcccccaatcgactagccatttgtgctagatagttatttcgaaattctttgatttcaaaagtttgcgaaaacccaacaacattcaataattaaaacaatataaattatgttataaatatatttttgactctaacagtgtaacgccttgacagatagggacaccacgtgtgtgcttttacaatcttattatcactaatttattaatctagggaaaagtggtttaattaaaacctttggttaaatttaaa

SEQ ID NO: 114046 - DNA, 1824 bp, Cannabis sativa
  modified_base (57)..(74): a, c, t, g, unknown or other
  modified_base (1616)..(1618): a, c, t, g, unknown or other
acgcatttttgtttttcaaaaatacaatttttaaaacaaaaattttactttcatttnnnnnnnnnnnnnnnnnnaaacaaaagtgttaccaaacagcacctagacttttcataaacaaaattctttctctgtgaaaacttttctaaaagaaaaaaggtagttgtataactaaatatacacacaataaaatatcatttaattcacattaaatattcacaaataaattaaataattttttgacaataaaattgccaaaaaaaaaactttacaatcttcttctttggttctttagataatcaaaatatgtttaattttcaaaaatctgtaaaaaaaaaagttagcaagatcacaaaaataaacttgctctaaaaagcacatcactaacaataaataaaatgttaactttaacagaatttcaacacataaaccaagctcaactttccactggaaaacaagtccagagttgagtatacaattaaaaaaaaataaacattactctccctttttgtttatcgacaagagcaaaaaaaaaaaacaaagaaagtgcgacaagacatcaagaaaacataagaaaaaaaaaaaagaaaaagaaagagaacactaatcttaaggctcataaaattgaaccaaattggacaatttcttggacatctcttgttgaacatcctccatagcatccaactgactactcatcaaaactacttcctgcttgacttcgtacacatatgcaagagcatagcttgagcttgcagcagtagccgagggacttgcaccaacagacgcttttgggagcttgggaaagactccatcaaagtactccgatggttaaaaaattgtactagtcaaagtaggctctagagtctcattggactggcaacatttttctgagaggaaataaccttatagattagatttgggaaaataagcttatgagtgggtttcttacctcggtgaaacaaagtaatttgctccatgatgaatgaagacaaattaatggaaacacccatggtgattcgataaagaagaaaggccaaatcttgagacatcattgtcttgttggagttggaaaaccaattgctaaggataaactgcattagagaagcatgaccgtaagtgagatgagtgatgcgaacactatgactagcaggccattgaacttgttcatcagtttcagagagagaaaaaatcacgataagaagaaacagtttcactctcaacacctttcggcaattgtaatatttcaactatatcatctttagtaaaataaaaccaataccctcgaaataaaatagaaaagacacgtgaaagtaaaaaagatgaacactttcaatgtgattttaaaattaaaatttaaaaagataaatgtaatgaccgctttagtaattttgattagtaaaagcaaatagcactaatttctgttatttttataattatttatgaattttattatttgtggaccccattataattagtgagtattagaggtataatttctcaagtccggagattttattaaactctaggggtattatttgtcctgtatgtgaattatgcaatttttataattttgctcggcgacaacgaaaaatgcgatgaatggctagtttgatcacatnnntaagtttagaaccttatttcttaatgggaaatattttagagaaaataaaatatcgaggttaaacggggttatggaaattgactaatttatccttagttttgagaaacacctaggttatgacttagagggcatttaagtcattttctttagtgaaggataggtggctgccctaggaaagtgacacctagcaagctaatttcagcaag

SEQ ID NO: 114047 - DNA, 2365 bp, Cannabis sativa
ccacttggccaacttgtgggcatcacctagcttgtaacgtgccatcttggcacgcacgttacacccagccaagagccagtacaatgaggggatcatctggaaaagggctatcccaatcttggcaatcagatttgcaaagtaagtccttaacagaagatgtgctccattagagatacgggaacaactccaaaaattgaattcctccacgcttgtggacgcagatgctctcatggtagacatcttgtgccacatcaacctcgtaatatttcaaagtttggcaccatcagcatatgctgtcaacattccataggaacggaagcaattggcctttagatccatatcctaaattgagtcattgaaagcttgggcaactagaggggtcttagccctcttttttcctttagccttcacggagggttcgtcctccgtgatgggtccgtcctctgggatagcttcgacaaccatctcttgctgaagtacttcagtaggaacctctgcttgtgttccttctgcgagcacttattctacgtggtcaataagtgcaccttcaatggtttccacagtgcgcaaatgaaaatcctggttcaggtccatctctaccaacataaacacgaagggaaaccaagctatttgaagcaacaaactaagaacccagaacagaaactcaccaggtttgcactccaattgacaaacccctaaagatctatatatatgcacacctatgaaactaaaaaatccagaaaaaaaatatcaagacagttctaatctccctttcacggcaaagcatttcttgcattcactggtgaaggaaagccaaggaaggaaaagtttgcagaggggatttagagtttgcagaaatcaagccttttcaaaatcaacggtccagatctccttcccaagtatcattagatccaacaactggggagttgaaagggctgaaagcatttatttataatgatttttctcaagtccagcaagcaataaaagtgggtcatttcaaatcaccctatcattggcctcacctttttttgacagacacgccccagcacgcgcataatgagccaacaagggcatttaatataccacatgaacgccacgttggcaggccttaacgatcatttgcccctaatgtattacatctcactaaaaagatgtgtccacgaccctagcagtcagcacgtgtcagaagttagtcctagaggactcagggagaggttgcaagctcccagaactcaagaagtcctagaagcttgggggtaaatgttatttgtgtttttaagtagaagacacttggcataactagaggcaaagatttgttaacccctagattaacagagatgaccatcacaataccttggagagatgccctgttaatctgggaggggtttaataaatgcttaatgcagagagctatctctggcccagttagcgtcttcgggacatggaaggaccaaactcatccccgaactccaagaagtcttagaacaacaattttactacctaacgtctgagtaagagtaaggactttctaaatcggtcgcagacgaggactcctacgcaaatgaaaatggccacatcagatttgtatggaaatcgacctacagatggctatacctttttgtgacacagaataagatcttttcccatgtcagactatggtattgcgtgtacgcacctttggacataccctttttgcttgacggtttgtctagagaataatttataaaggaaaaacctttgggcaacatgtgtccctgatctagacggtacacctaccatccctgtacacctcacgatcaagaaggttcttcaaggttggacagttagatttgaagttgtatcttcctgcccttgcaatgggttgtaatatgaaatcctaagtgggtaaaaggaattcctttacccacatgtaagcctataaataccctcacttcttatgtacaatgggtgaaaaaatttcaaactagtcgaacctctacaaaaactcctacaagcttcttcttcttcaagagaaacaaaaagagtgcagagttagggtttatattgtaaacacatattgtattttctaaatacttgcccaaggagccaatacaactgactcgtaaactagagattattaacgttcgaactacgtaaaaattacttatctataatttactattttttttatttctaaagcttttttttatttaatttatgaaaatcttgataaataataaatttttaaaaatacatataacaataataaaaattaaaaatataactaaataaggtagaattagtgtaacaataataacttgtgatctaaaggcacgtaccccaacaactatagtgtatatatatataattgattgagatgcattga

SEQ ID NO: 114048 - DNA, 3585 bp, Cannabis sativa
  modified_base (85)..(87): a, c, t, g, unknown or other
  modified_base (3397)..(3397): a, c, t, g, unknown or other
aaggctcattaacaccccaaccacgtaaaaagtcttcatctcactttcttacagctccttattataattatattttaatagttgnnnaaaacctcggtcaacaatactattctgaaatatttgtttatgttatttgtaggtgttaaaaatgtaagattgatgaatttgagtcgttatgctatcaaaattctggtagaaataatatagtaagaatatagtcaaattaaagtttttaacacaaaaattgttatttttaaaataattagataaaaaaaagtaaaaaataattgaaatagaaataaaaaataatttggcaaataatgaatttaaattttacatttttaaaataaagataatctaataattaggaataatatatataaaacatgagtaaataattaagtttaatcataattggtgattttaaattgaaaaaatattgtattatttgataattagtaatgaaatatcaagaatataaattaaattgacaaattatcatttaataaaacaaaaagttaatcttaattataaaatttaattaggtaattgatagtttaaaattaattaaattaacaattagttaaatattaaattaatcattgttaaatttaaaaaaagaaattaatttttaatttaaataatatgttaaataaaattaaaagaaatggcataagacattataatatagcataaaacgaaattcttatcttgatttgatctctttgattataaatcaaagataggatagcataattgtatttgtattatcacatagtgatatttttttttaattattatttttacacatacacgaaataccttagacccatttagagaggctgagtcagtaaggactattaaacacgcttctctaaattatctaaaaaaaatttatctgcagggataatttaggtttgttgtatacttatagtttgatatattgcttatttgattgtctcattagtagagatttcggtacgttgtctccttacacgttcttgtaagttggtaaacttaattagtttgcttacttataagaactgcagggaggtcttactgaaattcttacaaaaatggaagcaatcttaaaagcagattgcactatatttatattacaaacctgaatgggataggttctataccctttcagtaatggagtgagaaggtgaatccaaccatttatttttatcttgattgcatagtgaatggtgttaagtttttggttgaggagaaggatgatatccacaaaatataaagtagcagtattatggtattcgataaagatagacaaaatttttattaaaaacttgaaaacattatagaggttacttttttgaaggactgcggtattttattatttaggtgtaagtggtttgacacaaataggagaaaaatggatagtgatggttatttcactagcatttacgtcaatcgggaatggtacaaaaatgaacttttcatacttgcatctcaggctatgttgatatattatatccctattttcaagaacaataaaagactagctgattgtaaatgattacaaccgtagaatgtgtgagatctcctagatgatgatgaggttacacccattatgaaggaaaataacctagccgaaatataagttgtacaacttctacagttggatgatgttgactatatctatcatgatgttgacccaactaaaattccaaacataagtgtgaatcctgatactcaagatttacatgatgtcattgtcaatgacgaagatgaggattcgaatgtccaagaaaaagaatgagtacttagaattagaaagtgacagtgatgataatattgtatcaacagctgatgatgataataattaattataattgtaataatgttataatatcaaataataattcagaaatattttggtatctaatatgctgtgaatataattatttattttaaagttagaaatatattctctatgtatagtatgcctacatcaggtagaaactctagtaaaaagaaaggggtaagaagtaaatataaatgtgcaaatgctgaggaagtaatttccaaaggtaaggagcccaaaatacatattacccttcatgaggagacagtaactccgtgcagaaaaaatagaaaatatttcaacaacatatgtagacttatgccctgcacaccatcaccatgaataagttcatgtgggcacttgtttctaaagttgaaattaatgtagtgtgggatagacttgaggtatttattttattattctttaatttataattaatgtaccaaattagaagtgggacgattgcaagaaagattggattaaaaataaaaaggagctaggagaggaaagggcaaagaagacacctccgaaatgagtaacttaagaagtgtggagtgataacattacttattggagaacagagaaagagaaggtatggaacaaaattattaatcttagtaatactttatgttataatcaacaataaataattaatttcaatagaattatgttaatttcaggcaagatcagtaaaaaaataataaaagttaaggtatgatgaaaattcaaggtcgatggggatcaaagcctattgtagcacacgctgcttttgaagtaactttttgtatttatttgtgattaataagtatttttttaaaataattagtaatcaaatttatttttacttaaatataggataatatcgagacatggaaactttcaactgctttagacactttcgaaagttccaccataataaagacaacacttgccgcaatgaatacgcacaacaagcttatgtaatttcacattgatatttattaatttatgaacatttctttcaatatgttttttattgaaattgaatatttaatttatttcattttatgtacgagaaaattattgaatggctacaaatcaatcagtgcccactgatgatcagcctgctcaggatgatatagatcccacccaatacccatgagacatgcctgctatgatgcaagtgctaagagaccaatctcaacatctgagaggctttggctatctcctgagattgaaggcaattggggccaaaagcacacacgtcacgttttttttgtctggctcgaaggccattactatagaacagtatgtatgaggccttatgttacgaaacttaataacacgcaagtgcacgtatcgttgttcaagtaataaactcacacgagtgaggttgaaacacatggaattgaactgaataccaataaattagacttatgattctatttgatagataaataattatgatagattttaaaataaaaaaataagaaaattaaagaaagcaataaaggtgtttaatcaaggatgagaaattagggaaaagaatcatgttcatttaattacccaattgttaatgctaattactantctctttctcaatgtgaatgacaaattataaaaattaacctaactctttttcagatcttttaggtcctaaatcacaagttatcaaattatctctgagatagattaacatataatcagaattaagcaataatctaaatgtcacaaaggctatgtaaatactctcgtttcacatcaaaacctagattatc

SEQ ID NO: 114049 - DNA, 5007 bp, Cannabis sativa
  modified_base (4608)..(4633): a, c, t, g, unknown or other
ctaccggagcttagatcgctaaatctggattgaaaatcgaagaaaatggatatagagagagaaggttttgtcaaaggagagagaacgagggttcgtttgttctttcgtttaactgtttctgatatatcttacaaaatataacttatataatctgaatgtgctaacaaggtaaaaatcactatggatgatattgaggatgaagtattgttttggaaaccgtctatagtttgttttttttagggtcaaatccacccttacacatcttagaggggtttcctaaaagggtctggaatgataaaattgacagggtgaaggtactgtcgtatgggattttcataatcctgttcaatttgatcaaggacatggatgaagtgttgaatgggggctatattttctttaatcgtagacctgttataatgaaaccctgggatcccaatgttaatttcaagaaagaagatgtgaaatgtgtcccaatttggattcaaattgaagatttagagctgaaatactggggggaaagatcattgttcaagattgtagggcaattaggaaatccagttatggtggattcggtgacaaaggagagggacagattgagttatcctaaggttctaattgaagctaggagggatcaacattttcctggttttattgagtttgagaatgaacatggtttcaaaattcaggtgggtattaaatatgagtggaaacctgtgatttgtatgcactattcggggttaggccacacagtggaagaatgcaggaagaacactaaaggtaaacaagaatggattgtgaaagaggagaagaggctgagtgtgaagaagatagatgaagattgcttcatggaagtgtcaaaagggagtaaagcaacagcaagaaagggtacaacagaagctatgattgtggaaaactcatttcaggtgttaaatatgcataatgagttgcagaatgatgaggttggagtagtaggggaccaatccgaagagggtaatactagaggggggagaaccctctctctatctaatggataagctactatgttggaatgtccgaggagctaacaatcaacaaaaataggggttaataaagtaatttattaaccttcaaaaagttgatttttttagcctccttgagacaagagtcaaggctcctaaacttgggaacttgtaccctaatgtgtttgcgggatggtgtttctcttcaaatattgcttggcatgcgggagggaagattgtgatagcatggaatcctttgagattcatagtggatattattagatgcacaagtcagcttatgcatctaaaagtcattaccatggatggaatttttgatagttatttgaaagtgatatatgcatcaaacaacagaaatgagaggagggaactttggaaagatgtaattgagttgaacccaaaggggaggtggtgtatgatgggggatttcaatgagatcctctctaaggaagagagaattgggaatcgagttagaagctctcctgatgaagagtttctaaattgtgtgaatcaatgccaaatggaggatgtgaagtatagtggtaatttttttacatggtcaaacaagcaacatggagaagatagaatttattctaaaattgatataatcctagctaaccaggcttggttgagtttcttatgagaatgctgaggctactttccttaatgagggtttatttgatcattctactgggattctaactttgtatcctcagttgaatggtggaatttaacctttcaagtactttagaatgtggaattctcatcctgagtatgagaggatgttagcagagatatggaagcggcctattggtggttcaaagatgtatcaggtggtcacgagattgaaaatgtttgaaggggtgctcaaggagataaataaggaagggtacatggatttccaggctgctacagctaaggctaaagctaaattggaggacatccagactaaattgcagctaagtcctttgaatgttgatctacatattgaagagaaggatgctagggagagatatacaagggttcagcaggactatgtatcatttctgaaacaataagcaaaaatggcatgggttcatgagggagacaacaacacagctttatttcatgctagtataaagcaaagactgaggcaaaataggatcttctatattgagcagaaaaatggagagagggtcaatgatctagtgatggttcaggaggcttttctggagtactacaagagtctgttgggaactaatatggagaataggaagtcagtggtcaagagtgtcttgaggaggggtcctgtggtatctcaagaacatgcagagctactcatgaggaaaatcactatagaggaagtgaagaaagctgcttttgatatccctggatcaaagtctcctggccctgatggctattccagttactttttccagcataactgggattccattggggactctatattccaagcagtgtcatctttccttgagagtagcagaattctcaaggaaatcaattcaacgatgattactttggtgcccaaggtaaaatgtccaaacactgttaaatattttaggcatattgcttgttgtaatgttatctataagattgcaactaagcttttgagttctagaatctaagagatactgccagatttcatttctcactcacaaggaggcttcatcaaaggcagatttatagggcatattatcatgatttttcaggatttgatcaggcattatgggagaaaagcaaacaagccaggttgtgtgattaaattggatatacaaaaggcgtatgatactgtggaatggcaattcattgaagagatgctacaagggcttcagttcccatctccctttatcaggttgatcatgcaatgtgtctcaacacctaggttttctcttatgttcaatggaaccctccatggattcttagaatctaagagaggccttagacaaggggatccaatgtctccattactatttgtaataggaatggaatacctatctagactgatgaggaaaattggggaaaaggaagactttggttttcatgatagatgttctgagctcaagctgaatcaccttgcttttgcagatgatgtaattttgttcggcaatggggatgagagaagtgtcaagtacttgttgcaagctctgaaactttttccatcacctctggtttgcagcccagccccacaaaaactgcaatttattgcagtaatatggagcattcggttgtagagaggctgttgaccctctcgaggttttcaaggcagaatctaccttttacctacttgggaatacctattaatgctaagaagatctcaggaagtgaatgtgagatactaattgagaaaatgaccactaggatacggagctggagttcaagaaatttatcatttgcagggagaacagtattgatcaattatgtcctattggcaattcaagctcattggagtcaaatcctcatctttccgaagaagattatcaaaggtattgaagcagtgtgcagagcttatctttggaaaggtcaagcaatgtttcaaggaggtggagcaatcaaatgggacatggtttgctctcccaaatcagtagggggcttaggcattaaaaaagtggaagaatggaacaaagcggctatgtgcaaatatgtttgggcaattgcaaacaacaaagagtccttatggatgagatggattcagagggtatacttgaagaaaggggattggtggagccattctccttccatccatgtaagttggtattggaagaagttggtggctctaaaggatcaagtaaaagggttgactgatataagagaatttactgcacataagttctctatagcagcagggtatagaatgcttgctccttccttgacaaaatcactttggagtaaagaggtatgggctcgtttaaccttacctaaacatagtttcattttatggctagctatgcatgggaggttgaagacaaaggataggttgttcagcatgggaatccagcttggtgaaggctgctgtttgtgcaaggaaggaaaagaaactgcccaacacttgttttttgagtgttcggttgcagagatggtcctcaaaagcattaaaaatggctgggatggaagatgaaaagtggtaatttgcctaacatcataagatggatcggcatggctaaaagaaccagggggcataagcaggtgtttactgctacgactgcctcaatggtttatcatgtatggactgtgagaaatgtagtcatttggaagggagagcaggtggcaattgatcatcttattgcagagataaaagagaaggatgagattatccatgtttcaaccatagaaaataaccagcaaggatagagattggatacaatccttgtaatcggtatattgtccatcttgaatatactggtatacccgattgtaactagaatttcttgggcctttaatggtgtcattaggatgtacaaatgattggtttatgcaaatacaactcactgatttatcaaaaaaaaatataatttatataatatatatatcaactttcatcaatcagcgtgaaagttaaaattttaataataatataataatataatattaatannnnnnnnnnnnnnnnnnnnnnnnnnattatttcttagccactaagaaacttctatttctaggataattagccaactctgagtaccccaatatactctggtatatctaaaatcaacttatcccaataatctcatcaatatttctaactaaaactgttgtgacatttttggcctccaatcgggtctttagggtcgccgactatgaaaatatttttattttacaaataactcatattatatccacgtatttcaaataaatctccgtaattaacaaattacgcttatttatccacttatctgatcttcagggtccccggacctaaaaatatttttattccacatatagcttatattacattcacacatgctatataaatcttcgtaatttataaattacgctt

SEQ ID NO: 114050 - DNA, 4958 bp, Cannabis sativa
ccccattaagaaatggtaacaacccttgggtgtaggttatttgaatttcaaaatatgtgatcttaaaacaatataaatagaggtctttggttcatttgtgaagatacaatttttgagtttctatcaaagagagcactttgctagaaactataagcttgataattccagaaagctatttccatttctttcttccctaagtgcttgtggtagggggaaataagcttttggacaaaggtccaaaaccttgttcaaattttgtgattcccctacttgacacttggtgttagtgttgttgagattgttctcacatctatatatatgctactatttatattgtgttttataatcttctcttcatcttcttttctatactatgtgtatattttgtctagagttgtaacattattttatcaatattattgttcttgtatttttcattttgagttgtattttgacattggtctttctattgaagcacctataaatttccaacaactaatttattaaaaatataaagatacttacatgcaattgttgtgtgtgttcatcgcgccatttgttatccttacagtggaactttgcaaaagtatccacaacactgggaagtttccccgtctggagatcaacctatttttaaacaaaattgaaaattagaaaaatattattaaaaatttgcttattaacaaaattttagtcatattgaaaattttataacatcttcaattatcatttaaattttctaattgtttaaattaacaatttttttaacattttaaagtttccaattatttaaagtccacatattaatttttagcatttttttgacgtaaatttttaacattttaaagttaccaattaacttatttaaatgaattttttttcaaataacttatataactttttaacttatcaatatttaacttaataaattttacctattagtaatatgctaactattttttataacatctttaattatcatttcaattttctaatttgttcaaattaacaatttttttaacattttaaagtttctaattatttaatatcaacaagttaatttttaacattttaaaattactaacttctttaaatgaatttttttaataaaaatcttaactaattaaattaccaatatttaaattaaatttaattaatatgaaattaaattaaatatattttttcaatttaacctattatcatatatataatattagtgatatatattctaattattttttaaaatttaacctattatcaaattaaaaatattatgctaccgaaaattcgacagcataacactttataattgatcattctcaaatttgtaacacctacacaaaaatcacaaacacaataccaaaacagtttacatattattttttgccacccatccgaccacagtatatttttctacagaacctacttcactatggatgaatatataagatattaaaactctactaatatgcattttcagttaaactttagttttctattataaaacatataatataagcatactaaccttctaatataaccatgagtgattttttttccaaacaacgagcaaagggacaccaaaaatctatttaaaaaaaatattaaaaaaataaaataataactatactacttaggctcgccggcaaaagtcgaaactgaaaaatagcaatgaaacgtagcatttcattaaggtctatacttttgccggtgcatattagtgcgccggcaaaagttcccaccaaaattttcaaccacgttttcaagtgggcgggaagttgaccgccaaaaaatttcacaacttttgccggtgctaaaagccaaaatatgatgcaacgtgtcgattcaataaatgcgaatactaattgcgtcggcaaaagttttcacctacatttgcgcgcatattttttcactgcgagagaatttgaccacctttttttaccacttttgctgcgcatttacgcgcaggcaaaagataaaaaaaaattattaccttttgtcggtgcctttgagttcgccggcaaaaggtgactcgaactgccaaaagttcccatcttttggcagttagattgccaacatttgccgataaatttaaggtacttcgccggcaaaagctcctattaccagcaaaatagatcaccagcaaaagtgggacctggaccaaaatttttgactgcttttgctggcgaatttgttgactttcgctggcacaattctttttgtagtgtcatttgataattttatattgtttattttttttttctttaaatgactttttatgaggttatggtattcattttattttttattagataaattttaaattatttaattagtaaaaatttaaaagtaagtataaataagaaaagaaaaataattatatcacacactaatttaagttgtttacaaactaaaactaatattattgagaactagggcaaactaaacatatataaataacaaataataataataaaacaaattaaaataaattaataaataaaaaattgttaattatattatagtttttaagaattaatttcagccatttaattaaattaatctttataagttactatacctatcaataagtaaaaaacacaattgtattagcttccagtaataatgtaattaattaacaatgtttggtttaatatattttaatttaataatttttataaaaaaacaaagttataaaaatcatgaaacatcgtgtgttaggagtcttcatcaaacatcctatatcgcacaaactgcctttactacatcacaccacaaaaaaaaaaaatgcggtttgaaattttttgtggtacgattgcggtttgtattttcgtcaaactgcatggtgcggtgcaatttgcagttttaaattttaattattgtagttcaaactgtactgcattatatattacaaaaatattaatttttacattatgatttatcttttttatatatgaacaactcatatgtttacaaaattcaagccatacaattaaatttaaggaacatccatataaattattcttaatttttatttttttgttaattttgttaatatattattattgagatatatattatatatacatgtacattatataattttttagagataatttaatacaatataacttgattagtatatatgttatgatgtgaaaaatttgataagatatttttttttaattgttgaaactttattagactaatcttttaatttttattttgatgtttgatagtgaagataccataaatcacctaagctgcaccatatttttgcggtgtaatttttgcaattttaatattttgcggtgcgattatagtttgagaaattacaaaaatatacaatttagtttaagaaaaatagtctaaacccgcaccacccacaccacaaactctcttatcatgtggtgtggtgtaactataatcagtgctgattaattggacaatatgaaataccttttaatgggtattatccattaataaaaactaaaattttgtaaatagtatctatttatgacttatgagttatgagtatctaatatcctattaaaagtgcatatatatgagatttttattgttattatgattacatagcgcggtgattgaagcttgctgtagccatgtgtataaaaagttacgtttttgtcttctaattaaacgtgttgatgatttcggttctcattattatgatcaattaattgaaagagaaatgtgtacataaatatatatatattttcaaaaagtaaaaattgtgaacgtgtttcataatttaacatttaaagaatcatgataggctagtaaatattaataatgaatgattatgttatggaaaggagaagaaataaataataatagagcagaaaatgaggagatatgtaggtaagtgattatatatttaattattacaacgaggccagctttgatgtaaatgaaaaatggtggcattgttactgtcgttgtcgtagtcttttaaatgaacatcattgtcgttgttattgtcacctgtgagtgatcagtatttattattatgtatggaatatggaatttttttagttataattttataattaatttttttttatttatttataaaaataaaaataactttcaatattatttcaaaataaaaataattttataaaataacaaaaatacaaaagtgaaaaaaataaataaaaaataatgtactaatgacaatacggaatatgcaattttttttttaaacaaacagaatatggaatgcatgtgttgtaaaagagagaaatgttaaatgacaaccgtgtttaacacttttttatgtgttaatgtcgctattagtacaattaagtatcagatcttataaaatttaacataataacttttagagagatcgctaaccaatcataagacgacatgttaagaagtattagacactattgatgtccaataaaaatgcttaaactaggaaatagatagattgtcaattttctttataattcaaatatcactttttcaacacccgcgtgcacacaagagacaactactttttaccctttttaatataattaaaaaatatatattatacagtctttcaatatatatgatagaaagttttttagtttgtttttgaaaggaacaaagttttttagttatttggctatcatttttgttcttaatgtaaaaacattttttgtattttccatacgtagagatattattttactttatagtgatagtgggtatattgttaacttttagaaaatttaaaataattaattgcacaaacataaaataaaatagacatgcctaacactaactatttaaattctaattttgataaggtaacttataggggggatttttttttatgtaaaaagggtacttataaaaaaatattatttttttaaaatcagtagtaagatttatgggcttttttatttcgggggttttttcatttttatacttcaaaacagttt

SEQ ID NO: 114051 - DNA, 4095 bp, Cannabis sativa
agttcgggggaaaaaattactaattagccaaatatcaatgagggaggaagtcgtgcaaactaggccgacttttatgctttaattatagtgcttagatttagtttgatctgatggtcaaaaaataatgtaaaaagttacgttaaaagaatgtgtctaccaatcctgtcccatatttaaaatattaatttaagaataattagtaattttgccccctaaacttttgacaatactaattttgcccattaaaatatacggcttgttaagaattctccctgaacttttacatttacagaaatttagtccttttgttaggttttgtctcattattctgtttaaatactggcgtatctttgaaaattagcaacttttttccctaaactttgacaactatcaaatcgtacccgctccaaaataaaaataaaaaagattcaatattttttaaataaatcttaacaaattaatttagatcttgaaaaaaaaaattattttgaatgattaagaaaattaaaaaagaaattaaaattttaaaagtaataaagcgatttaaaaatcatttagatattaaaaatatatattaaaactcaatttttgtaaaaaaaaattacggaaacaaacttgagtctatttatttttctcaaaaaaatgtacatttgtttaagtaaacataaaaaaaaaaaaaatagtttaatttttaactttttttcaaagtaattttatattttcattgaatttttaattatttttctttatttgttaatatatgcatttataaatataaataagcttgattttttcttcaaaaaatcttagtttgtttaaattatttattggattctcgataattttagtttaattttttgagatacgtgtttagaaataaaataaagtttaaaattatttttttagaaataatttaagttttttttaagtaaaattaatatattttttaattaatttaatatttttatcaattttttttaataattttaataatttttcaaaattaatataatattataatttttaaattaatttttttttaaaagaatgggacaaaattttgtattagtcaaagttcaaggggtaaaaatactaatttttaacggttgaaaaaacggaacctaatagaatgggcataaatatataactgttatattttagggaaaatttttaacaaaccgtatactttagagtgtaaaatcatgtagtgtcgaaaatttaaggggacaaaattactaattattcttaatttaaatatttctaatatatttatgtataataatttattgatttagtggtgctttttcatataaaaaattcagaaacatttgtacagtttttgagcaaaatgatgcttttataatgctttgtcgatgattatgcgatgcctagccataatgtcatgaaaatttagtttttgacgcaaaaataatggttaacaatattttgcaatgaaatttgataatttgtttcctaacaatggctagcatcaaccaacttctgcttatgttgatgattggacagccccacctttatattgggttaagattaattgtgatgctgcggtaggctgaggcaagatgatgatcgctgctattgctaggaacaattgtacacagattgggtgggttgtcaccgagatcatagagttcaaagagcctctcattggggagttaacaacttgtgagttggctttgaggattgtcgcttcaaaaggcttactcttttgttattattgaaagtgattgtgaagttgtgatcaatgctatcaatgaggtgatttttagatgggaaatcagtaactatgtcacaaattgtaagagatactttaatttacttttggctcgtaacttttgtaagagtcctcgtaaatttaattttgttgctcataatattgctaaatgggtgttaacaaggaacattactagatttattgaggttttcttcaattccatgcgatattatttgtaatgaccatatggtttaactttgtgtttgttttttttatatatataagttggacgtttgtttaaaaaaaaaaaacttttctcttgaacttctatctttgttaatttttttttttctaaatttacgcgtttagaatgtattagatgcttaaattagagtgtgtagaacaaaaaatatattgtttgaggcaataattgaaatttgttattatgcttactccaaattaaggttttacacattctaaagttttagatcattataaaaaatcaaaatttaaacaaaaaaaagccataaaactgacattcaagtgaaaaattatgtcgccacaattttcatcaaattttatcctagactattgcaaactatcgttatcatttctatgtcaacatttcatagaactatcgttaagtattacaataagatattttcgcttaaaaatgatgtttttatgacatcgtcgttaaacatcacaaatttgttaaagcgtccttttgttcaaaactatgtagacttatagattttttcttttttttaaaaaaaaaaaacaaacaaataaacaacaaacttgtaaatgaaagaatgtcatagatgtgttggaaggtttaagttaatattttaagagaaattatagtaaatgatcttaaatcatagtactatgtaattaaatgttcttatttcaaaacttagaaataaccattttacactatttataatttatattgtcttttgctacataaaaaaaataaaatcaacaatttttttttagaattagaagcatattacttaaaaattatggtatatctattttaattttgtcaaaaactttttttattttaaagttatatcgattttcttaaattttttatgggttgttggtatagattttgttgtacaatatatttctattttattgtatgatatattattattcttagatgatatttattttttattgttatgtatagtggtggtatataattttattaatataataaaaatattttaatagagatatataatctcattaatatactacatatatttaattattatttttatatattttaattttatttatactcatttttttacttataaatattctatagaatttgtttatcttacttccttaaaaaaattacaatcttccctcctccctcccactttctatcacatagaactacccttttatattgaaatcaccttggatatattctttcttttacaacaataatccttctaaaatttatatatagataatcattaataaaatcttaacttgaatatatacacgttccacaaatttcttaattaaaaatatttcatacatgtgtttatatatacatataaaaaaaattgataacaacggatttgaacttgtatcaaaattattaaaaattgaattcaatattgttttatggtttaattgtcacaaaataaaatacaacagcatactacgaagcgtgatttatttattagtatacttataaaataaaattaaaatatattttaaatattaaggtaaaaaaactaaattaaaaaattatacgaaattttattaaaaaaataaattcatatatctatataaatgacataacaatttaaaatctctcaaaataatactatttgttatctctttaattttctcatttttataatttttaattatatttttatatatattaaaaagattgcactgctgccattcaaaaaaacattgtggccgaatatttttttttttcaagaaaaacaaaaaaaaaatctacatataaccacttaaccaacaaaaatatctcaaacctaaataatacattcaatatatatacatatattttagctctccctatctattcttcttctttctattttaataattatagttatggagtattatataaaagattttgagaagataacgattttaaactccacttaattattgatttgaaggcttagagagtcatgaagtaattcaacacaaaatgatattgtgagttatcatgttttatttaaaaaaaaaaattattgtaaattgatggtttgagaataaatttgtattagtttagatttgaataggtcgatatgaggaataagtgtttaatggttgttatggtaattgaagtagtg

SEQ ID NO: 114052 - DNA, 1544 bp, Cannabis sativa
tttttaatattatcaaagttcattctgaatttagaacatgaggaagtatttgtgttctagactagaccttcaattcagtataatattgagtttacatgcacttcaaaattcaaatttgtccgatgctctatctccttatcttttgttttcttccttgccagtgcttagtaatccctttacattttctctagctctttgatattactgtgggcattgggattaataaccatgtttcattttgttgggagcggtatgaaaggtttagtttggctaatagttgattttcattttatatttatgttaagtgctgccattaattttggctgcttggttattttttattttttttttttatcatgttttagatagtttaggtttgtgcctagaacttgtttggtatgtgctgtggaaaaaattgaaaatactggagatgctatcattttagaattttgcatttaatttgtttatgttgattagcagataagccatttctgtttctttaacttttactgtgtctggccgagaatattttgatgaggggatatttgttgaactaaagttgtataaagttgatttcaattgcacaattttcactttaatagagtttgattgtatagagtttgtggaattgttattgtaatgtcttaatttagctagggtagtagggaacaagttgtagcttttagctttcttttataagtttatgaaaacaccaaaaggtttggaaggagggagacatgggtggatggagagggaaggagggagaggggtggtgggagatggaaaatccttttgtttggcatagaagattgtgggagggagaggaaaggtggaatgatttacaatccatttgggcccactattttgaatccttcctcaaatgaaaggatttatagtactcttctttctaatttattttaaaattacaaatacactatcataaaaaaaattataaaaaaaataaaaaaaatggataataaaataattttataagtatatagtaatatatccctccatttctccatctttctttccaaacaacttgaaagaataactaccatactctccctcccttatattctctatcctccctcaactctccatccatctcaccaaacatagtgtaagtttaagtgattagagctaacaatatattttttttttacattgctggggttgtaaaataacattagtccacatgccattgcattaaggtgtttagagctacaataatggtgttttcaaagtattgatgggaaaatctgcaattgtgcccaagttgcatgtgaaaaaaattccacactaaaaacatctcatagtaccttcaggccaaaaaggtaagagtgaccttgcaagtgtaaggacctaaggcaagaccatttgtaaggacctaaattgtagatgaatcatcttgagttggggtcttaaggcaatggagcccattgaagcattttggtcaatcagggataggaacatggggaatgtgtaaagcccgcttagttaatttggaaattagcagctgtttatgattaattatgaaatta

SEQ ID NO: 114053 - DNA, 2356 bp, Cannabis sativa
  modified_base (66)..(68): a, c, t, g, unknown or other
tatttttaccgccaaaaataggacttaagtattaatctgctactcgacataaaacttaggtatttnnnccgcaaattactctataatttatattatattatcaaaacaatctaacacccaatacaattatgtcaaactaatttttaataaattggtttggctttttagagctcttcaagaggggttgcccaataaagtatctatgccacatttaattttaattcaatcttcaataaaaataagagtaaaatcaatgtaagtgttgtcaccattagacaacattcatgtgagtatttttgtattattttgttttgtaaaaaagaaatattttttcataaagtaaaataaaaaaaaaaaatgtgtgtacttttgacaacttttaagatgatctattacggaacaactttgtaaaaaaatgtatcaaatattatgttggatgagacatttatagatagttccctcgttgtaaatgctcttacttaatgtcattgtagttcatttcaaaaaaaaaatgtcatcgtagtctttttcttcctctaccaaatggtcaaccgttgagaatttctcactcaaattagagtgttttcaactttgccctttgcatgtttagtccagaaccttgttaacatcttaaattagactcgtgagaagagagatctgactaacaattaattaaatgttaatttcatacacatgtacatgtttgttaatattccacttattagttaagatatatttatgtttttatatttgtcattactagttgaccattctccaaactcaatgtagaacatgcattctgctaattgaagagtcaatttaatttataattaacaacttggaagattaatattttttttttgggtgatccattattgaaatattataaataaataacttctttattataatcattattattagagatgaaaaaagtagttatttgtgagaacatattttgtatttctccataaagtctctccataaagtctcattctgctatgtttggaataataattataaagtgtttctacaatatatgtttaaaaggttttactaatgtatttttttttttttttttgtatgattgtctacattgtaattatttaagatattttataaaattttaagagatttgaaaaaatttaatacgccgaaaatatgattcaaataaattgtttgaactctgtttttgtcgtattaaatctttttgaatttttcaaaattttacaagatatcttaattaactataacgtttatgaaaaaaaattagactaaaaaattatcttagatgctgaaataaatgggagtgcatcagtaaatctcttttaaaaagtgcattgtaaatttttccacataatataaatgacaattcttaatttttttttaaaattttattttggaattatcatagaagacaacttaaacaagtgtgacaacacaattacaataaaaaatggaacaaaaaattaaaatttacatcccatactttattttggctttttttttcaattatactgtaacacgacataatttacttttagttacaacataatttacttttatactgtgtacagttttcatttatactataatacttttttaaaatttcttttttactgtgttgagtgacatttgtcactattattagttttttttcctaatttaaacacgttaccgcgttcttcgaccttctttctctgtttttcttttttgttttcatcatcttcaacatatatatcttctccttaattttcttttttttccagtctttttctcttttcgtttgataatttcatcctcgattaaaaggaagttatgaacggttgctaatttttgaactgcattccaccttagttcagatatttcttttcaaaaactattttctctctcctttttctctctttacactactacaaaattggactttggaggtagtttttaagttatttcagcgtcaatttttgcaaaattcgctactgaagttgttccaggcgacgctgtatgcgttggttattatacaataaccgacaccataggaccctatagagttggttattaagaaaaaattgacgccatatgaaatgtgatttttataaaaaatcaatatattttttcaatttcaaaacctaatataatttcaccaaatttaatttattaaaattaaatattatttaaattaatttcatacaactaaaaaataaattaaaaatttacttaaatatattcattctaactaaatatattacacgatattttaaaattagtccaagtgtcaacaaattaatatatctaattaaatatagaaaaataatagatataaaaattacaagttaacataaaaaaaaaaaaaaaa

SEQ ID NO: 114054 - DNA, 1744 bp, Cannabis sativa
  modified_base (1684)..(1698): a, c, t, g, unknown or other
gagagagagagagagagaggcttggattttgtatgaagaatctgtttattgggtaagagtgtgagagaaaaatactttgtgagaatcctatagagaatcaatctcgattgtattgtactatgttcttgttcaatcaataaaaaagattggtggtgttccagaactagagtaaagtcatatatgtaacgtcctacttataggatcaccatgtgacgtgattacaatatgttaatcccattaattggtgtctataagccaagtgatgataatatatttaacttaaaaaataaataacttataataaaagtatactttactttaaaataaaatattaaaattacatgtctaggatcccatataaaattatttttatcaaaaaattacaagttattacgtacaagctgacctaagcgttaaaataggatttctatacacttccctgttggacccaaccctcgtggtctagcttggctagaatatgtacaacgcaccgctaaagcccttaaatttatggccgatcgaaaatcatcttatcttttcttgcacattagagcacccgtgagctaagacccaacaagacagaacaattaaatagtatgaatatttgtaataatcacatttgatacgctactcctctgcgtatataattgtgccaccgcactgtatattacattatctcatgtacattgatgccaccacatctaaggtctatatgatatagacctatgcgttacgctcacacatctcttttacatataaggccttaatagggtttatctcgattttagttacctagtatatcctagttatcccttattcgcagaactcttctcatttatcacataatatcttatttacatatatattcacaatatacatacttagggcaataaccctaacttataatttaatttagacaatcacataatatataatcgtgccaccgcgctatactttatgtgctgagttcactatcatacatgatttccaatgtatgaggagaattccaatttataggtgatcctaaccaagtgttggtattcatagttacaattcacgaatttcacataatagagttagtcgcaaaatcacatttcataaaaattcacatttatgactccaacagtgaaccaattaatagagctcaaaataattttttttaacgatataaagaatgtccaaatcagagtttagagtccaaagttatgccaaaataaaataggtaaaattaaactgtcactgcagggtcgtcgcgaccatcgcgaccagaccatagggtcgccacagtgaaattgaacaagagctataccctattttgggatcaagtcttgccacgatgaccatacatctggtcatgatgactgggcttgaaaaacccataaatccaaaatttccacaactttgaaaaattacctaatcaactcaattttacaccaatccttaaattgatttcaacataatcacaatgttttcaactaaaaatacaacaatagcaacatgctcaaatacactaagacaatcatttttacaatcttacaattctcataagcaaagctttagaaaactaactcaattcaatcattcaaggtatttataaaaacaaaaccagcatatacccaatgtaacatcatcgcttcaagtcgactttggatccttacactcacagaataatggctcttatacnnnnnnnnnnnnnnntggctgcttcatggaatgacgattgaccctacagaccaacacgagt

SEQ ID NO: 114055 - DNA, 3578 bp, Cannabis sativa
tatatatatataactaactgtatgtacgtgacaaattcaaaatacaaaagtttaattatagtacctgatgatattgagaataattgcaaggaattgatgcaaaacaggaataagccaactccacggtcacttcggctagtacacattacaaaccttgtctgagaaaacaaagagtttcaacccttaattaatttgttggaggagttagaaataaaaccaaagtgagagagtgaagacttgctccacacgtatttgtgtatatagctacaccctcgaaagatgacttccttcctttattacaactatgccctttttgtatcctctacacgtcacgtgtaggtatttggtaaatctcgaccttctatttcaacttatatctccatcatcgcatctgaaataagatagaatattaatcatttgagaagtgtaccaacactcttttcttataacctcttacttaatttttgtgttcaaaaacacacatattttttttaattgcattgttcgttgttatgcttacaacattattcttataaatttttaaatagtttacggtgtcaaaaatatgtttgaagttttttgaactatttggaactctattttcaatactgtaaattattcagaatttttttaaaaaatttacagcgataatactgtaaccataacgaataccgctatgagaaaaattaaaaaaaaatattttggcatataatttcagacaagaaagttgactaaaaaattttaataggaaattgtaattagcactcctcatttaattatttttttcgaactttttcacgaaagtgttttttatagttaaaaaaatatttctataaatttttaaaactttttgaatagttaccataccataatctgaattaataatgaacactatcaaattaacgttgtaatgagcacttttcaagttatgtcaaattgattaaaattaaaagtgagtattagtataatttaatatcgaatctcgtacaaattttaatttaataactgtgataaaaatttatagttgtataatcacccataaagatatatctcatgatggttagcgctgttattgtctaatagtgttaaacacattcttgattctgttacttaactgtgacagttagtagatatagcagttagtggtttattttctgttttcattttttgttatgatttagacttgtaattactttgtgttattaaataaagctcgagctactttggttgagtaatgctcttcattctttctcttgttcattttctgttcaactggttttggctcttgccttttcttctctgaagcccttaccttctacatggtatcatcgtccatctgacttgcgtctagggaatcttcctcctttgatcctcaaactaaggttcccactatacatgctgctctaaatcctacatggaattcattctccaattctctttcttcttcccttacacacaagctcgatcgtaacaattacctatcttggaaatctcaggttgttcccacggtaattgatcacgatcttgatcaaatattgttctctgatgtcactcctccaggcaatctggttactggtgcccctaaccccaaatatgtacaatggaaaaaagaaagatcaattgctcctatcttggttgtgatcatcgatgtcagaattaattcttgcttcaatggctactctgaattcctcataagtgtgctctttaacaaaggttctctagccaaatcaaagctcgtctccttcagctcaaaggccaattcttgcatcttcaaaaagtaaatatctcgatttcttattatgttaataaagctcaggcgatagctgatgcgttatccattgctggttcaccaattaccaatcaagatctggtgttgcatcttctcaacggtttgggacttgagtttaactctgttgtctcaagcatcacatctcgtagtgatctgttattatttgaagaagtgcaagctcttcttctctcacatgaaacacggcttgagcatcataattcagttgttgatctgtctttgacgctgcaagcaaatcttacattccagcaatcaagaaatgggaattattgttcctatggtcgtgttgtggatcatggaaacacaactgacagtaattgcacttgttcatatggacgtgcaacagaaaatcagttgctctgtcaagtttgtcttcgaatagggcacactgatgctgtttatcactatcgatttgatgaaaagagggttacccctaaatatggtaacttcactcaagctcatttaactgaatctgacattccttatgatccacaggcacctctcaccactacgattcttgagattggtaatgattggtatgtcgacattggcgccacagaccatgtggacaatgacatggctcatcttgatactgctgcaccatacaagggcactgaaactatggtcgtggtcaatggtaagaaattggccatttcaagcattggtcaatctaccctcctttccctactaaacactcattctttacgcataaattttgttcttcatgttcattccttgaaaaagaatcttattagtgtttctcaactaactaatgataatgatgtctttcttaaattcacaaatcctgttgttttttcatggaaaaactcacagggatagtgttgcttaaaggcaaagctaagggaggtctataccagcttggtgatcaccccaactcctccattcagtgtcatcttacaacattttctaatgactctataaagcattataattgtatgtgtaattatcatttgaacaatcttgttacttcttgtactaatcaagaaatcaataaaatcaacattgtttctcatttatctcagtttcctagtcaagcttttaatgtttcaaaattaaatgacataaataactcgcattgtaaacttggtcatccaggaaacaatacctcggctaaaaaatttccatagattccacacactggctcactgaaaaatttgcaattttgcaaagcctgtcaccaaggcaaaagccacaagcttccctttccctcttctaatagtagagtcactgaaactttggctctaattcacacagacttatggggtccatctcacatcatctcaaaaaaaggctttaaatactatgtcaatttccttgatgattatggtagatattgctggatattttccttgactttgaaaggacaagcctttgatgtctttataaaatttaagagtctagttgagaaacaatttggtttacccattaagagtgtgcaagcagattggggaggtgagtatagactatttgctcattttttatatgaccaaggcatccattttagcatccttgtcctagaacaagtgagcaaaatggaaggcttgaacgcaagcatagacacacatcacagagataggtttaacattattagctcaagctggtctttgaatggaatattggtggcatgctgtggcatctgatgtgtttaccataaacaggctctgttacgaaaattttgtttattacgcaagtgtacgcaatcaaatagtatctcacacaagtgaggttgaaccatagggaattggattaa

SEQ ID NO: 114056 - DNA, 7126 bp, Cannabis sativa
cctaccccccctctccttttttttgttattaatttggggatatttgtaaactactcaggataggctgttgggatataattggatgttatcttacattagcaactattatatgttttattcattttttttttctaaattcccctcccttttcttttgctttagccggttgggtggcatttggagttagtgtatgatggctcagagcttttgcttatgatctattacttatagtgggcctctagcttttacttagtttttctttatgttaaggttacaactcttttaataatttttccctaattgtgttttaaatcattgttgcatctaagatgatatgattattctctcccagagagctcttcaccgctgctgatggtgggacgattgccttggactggctaaggagttctgatggtaactttgaagtatttgctctatgaaaataaaatgtattgctatgtattacacaaaaaacggaagaaaaagaagtcaagtagaaggaagcactcacacacataccgatacatacaaatgcaggcctagtgaattgggccagtattacattttttttctacccaaagaaaagtagaaaggacaattaaatgtcttcaagttaaatgaaacaaactgtgttgggcttgtatatatttgattagctatggatattctttttatgatgcacatctggtcggtgtacgtctctctcaattattgtttggtgcattgtggtaggcacttgtgtctattgtccattagcctagtgctctaacagttgcttaaggtcatctccaacagacgttcagttttaagattgtaaatttggtttttttttttcgtaatatctgggttctcctttatatctctcctcttgtatgtgtgattcttggatgaatgtttctcagaccttagcttcttatcactgtggctttggtttgtaaactttttattttgcataaagtatatgcttttatgtttgactcccgcatagctttgagttattgtcaatgtcacaattagaatgcatatgcctctgtttacacgtgaacattgagtagcctagctgggtgggcagttttttcagcttcttatgatattggtttaattcaagtttcatcactttttccttttcaagtattatagccttgtgtgaaatgcttttggaatatacatttttgttgttaatgtatttgagattttacagttcctgatggtgggtttcacataaataatgctacttctgacaatgacacaactccgattgtggtggtaattcctggtttaaccagtgactccacgtctgctgtaagttctctgctgcacgtcttgaccttataacttggttatattttttggtcatcatcatcgtcatcatcgttgtgtttattatttgcagtatctaaagcacctcgcttttagtatagcaaaaagtggatggaatgtagttgtcagcaaccacagaggtctgggtggcgtttcaattactgtgagtagctcttgaatattaaaatactatttcttaattgttgtgtagcatttcaatttccatataagtttttaatttttttctttctaagattgaaactaggctcactgctaaacccacaaaatttagggatcaggaaactaagtaactaatattattatgcttagtgcatagaaaaagtacctctttttacactagataatattaattttagtcatgattagaagaatgtgaatagtaattaaatagaaaaatttacataatagacaaaaaattgaaaaaaattacaaaaatacgtcaacacgattttttttatttttattctttaaacttttttatttacaaataaatctttagtaaaaacaataaaccgtttttttggttgttttatagttcacatgatgttatttgtttggttattttttagttgatttatagttgtcgcgaggttggtttcttgttgttttttagttgtttttttactttctgctgagcaaagtttatttttgtaattttaaaactttcaagcgtatttttataaataaaaactttaggtcgtaaaattgtaaataaaacataaaaaaaatgtatttttgaaagttccccaatttgaatatcactgatgctgtgtaaaaattaagaattttcacataaatgagagacatttcctagaaagaaatagaattttgaatagtaggaattttctactctcatgagcatagaataggtacaacaaacaaaacaaatgatgtgaactctattcttatctatacttcactgaagtaaaagtaaaatgtttttctttcttttctattttgagttcttatttttaacatttttccacatcttttttgtttcttatagaagagagtagacatgtcattgtctagtcttgtaatcttttggtttaaatttcataaactttctttttttacagtaaatatccttatggctgcggttgaacattgtgaactttattcacaagttttggcaatatttgtcacctgcttttactctggccctttacatgtttggggttttgtctattatgggatgtttgctgcagctgggttagtctttctcagtgcaaggttctgatttctgaaggagcctttattttatggacttgtactgtgtttttccttttcttgggtgctgtgttgtaaaggaatgctggtacttttattataaagctcgagaagagctgtttctttgggataaagataggttttcagcttctttatgatcttcagtgcttagatgatatagaaaatcaagtgtcaggttgttacgtgactttaaaatatggagtgttttgtcactttcctttcactcatcttttaatagatttgggatttctctctcaacatttttggctttgttgtaattgagttggtattttttttttttgagaaaaacttggtctcactaaaaacaggaaatgttattgatgaatagtttcagtcaatacaataggagcaatagaatgagggtagccaggccaacacaacttatgctcatcctcccccaacactagttcagctaaagagtaaccccattagccaacctaggacaatcaataaactgaacaccaaagaccattacaaatcaaaatgacatttctaacaatagatcctagatgggaatcatcacaatgcttagctttcaacgcattaaaaacaacttggcaatctgacttaataattagactcaaataacccaagagtttacacaactgtaaccccttaaggattgaaatagcttctgcaatagctgattccaccttgggaaaagcgggccaaatagcagaagcacgaacctcgcctacggagtcacgaaggacaaccttgttacccattttttttggtctcggccttgagcagagcatacacattcatcttcaataacccccagccgggggagtccacgtggggcgagggccgtcctagctacttatttgctccactaacccgatcatgatagtcaatggcccaagtgacaactagtttcactttaagcgtaacttgttcatgcaaaacttgttcctagcaaactagatacaccacaaacacaatcatcatctgttcgagctctatttgggaaagacatgatgtaagtgaagcaaaaaagagtcgaaagaatcatgagaagaagccgtcacagttggggttttatttataggcacactttcctactttttcttttggttgtactttttagtatatagttttaatttttcattcaatacaggcacgaaagtgaatgttctcaatttgacatgtagtgccttcttaatgtttgtttaaagtgaacgattgcttatgttgttattcatctcttttgctaaaaattttcaatttttcttgatttgtttttgttaacagtttgtttttatgtaaaattttacagtctgattgcttttacaatgctggatggacagaagatttacgcataattatcaatcatcttcataataaatactcgaaagctcctttatttacagttggaactagcattggggccaatgttctggtattctcactttttaaagcattatggaaatatttagcactaagtttatcatatttttttgacttatagacttgattctttcaagtactcaatataaatgagcatgaatacacatgttttaaaagtttgatttcaacaggaacatttcaatgtgttgtgaaaaccttgacttatatatatatatatatttataccttaccccttaaatatttttcttgcaggtaaagtatcttggtgaggatggtgataatgttcctgttgctggagctgtggctatctgctccccttgggaccttttggttagtgtgctgacttggtgcatgtccttgtaattattataacatttaaagtagcatcattattcatctagtatttccaatttttgtttaactttacactcgtatccaatgtgtatggtgagctacctgatttgattctcctattagttctatggggatccacagtctattgattttacattgcggttctcttatttagtgcaaggatacatttttttagttccaacacccatctccatagcgattttattgattgattggaaattgggaaaatcaaatccctaagatttggtgatttgttgtaatttattcagtgtatatttagtttcctaattgataggattagtattaattttatatttatttattatataccctaattcctataaatgtactctaatttgatacatcataatattataaatttcaaatatatcgttatggtatcagagctgaaggtctttcatctctgaaagtcttcaattgtccattaccattttttttgacgatcaatccataaatctcatgagatattccaagatatatgaagaccaaccacaagtcactaaccaggtgtacgacagttgactctcaagtgaggttattgttcccgaccaggcacacatcagtcaacgttcaggtgagatcaccatcaccgaccagaaggctctctcaggcgcacaatagtctttgttagtcgtagaaaagctccatgacctaagcatacactcaaagtcatctctatttttttttgtgatgtcgaccattggagataccacctcttagaccaatgaagcaacaactcagtcccagactactccaacactctctagtggctccattggttccctttacagtcatgacagtggttccattcagataaaaaatcataaacttgaaggaaaaaattacttacaacgggctcaatctgtcaaaattgtaatatgtggtcgcggtaaacttggttacattactcgtgatcttctcacaccttctccgattgatccatcctataaagtatggcaagctgaaatttcaattgtacttgcttggcttactaattctatggatccgaaaatcagcagcaagtatctgttttacaagatggctaaagtattgtgagatgctgctagaaaaatgaattccgaccttgggaatgcatcacaaatatttgagattcgaacaaaactcaaagagatcaaacaaggtaataatactatgactcaatatttctcaaacttacaagatttgtggcaggaactcaatttgtatcttgagactgcctctccatcttggctgtagtattatacaccgaaaacagttagaaaaagaacatgttttcgaattccttacgtgggcgtttggtcgatcgtttaccatttcctgataccaaagaagctctctttgaagttcgtcttgaagaagctcgtcgccatgttatgctcactcattctgaggtttagaattccgaaatgcttgaaagttcagcccgtgcttctaacaggtacaaatatccatccaatagtaagcctaattgtgactctcgaccaaatcgaaagggtgaaaggccatggtgtgatcattgttagtgtcacggacattctcgctctacttgttgggaaatacatggaaaaccagccaaatggactcctcgacgtcctagtggctgcaaggcatatcaagctcatgacacaaacaaccctgaaattctaccacctgccgcatcatctccattcagtaaggaacaacttgaccatttacatgctaatctgaatcaatcctcccaaaaatcttcatctggtttaggattgcatagtgcatcttgctctggtgtacactggtaatttctcgtctacccaaaaggactctcaaacactatggcttattgattcaggtacttttgatcatatgacaagtttatattctttgtttgaatcctatactccgtgtcctaatcgttccagtgtcaaaatagcagatggcacgctttctcctattgcaggaattggtaccattagattgtccaataatttagttctcaaatcagcccttgatgccccttctttgaaatgcaatctaatttctattagtaaattgattgataatctttgccttactaaatttctaccttattcttctcaattttaggaactatcctccgagaggacgattggcagtgctagaattcacggtggcctttatttctttgaagattgtcaacaaataacacaacaacctagtttctctagtttgggttctagtttatctaaatctgatcctattttaaattatgtttctatttcaaactatgataaaattatgttatggcattttcgacttggacatccaaatttttcatattcaaaacatttgtttccatcgttgtttgtcaatcataactttgattctttacaatgtgatatatgtcaattagctaagcatacacgagctatttttgctcaaaaagggtatataccaaccaaccctttctctttagtccacaatgatctatggggaccttcaaaggtaaccacctctaatggtcatcgttggtttatcacatttgttgatgatcacacacgtcttacttgggtttatctactcaaacacaaatttggcacatatcatgtgtttcaaacctttcatgccatgattcaaacacaattttagtcatctattcgtgtgttacgaacagataatggcactaaatattttttttttgaaagagagaaaagatccttttgtcattgacaggatccttcccgataatattagaagcctcccttgtggtggaagaaaaccatggttacaa

SEQ ID NO: 114057 - DNA, 2426 bp, Cannabis sativa
tatgagccattgaggattttaatccaacaaccacaaaaaggagccacatcccttaaacaagcagatgcaacattttttgtttctctagcccaacgagcaagagaatccgcaaacacattctataaccgaggtacgaaggaaactagcacatcatcaaaagatttacaatgattcaaacaaaaggagaagatggggaaaacattccatccaaacagaagagaacctactttgaaagcgagagcagacgccttggaatcagtctcgatacgaactttcgacacattcttgtccaaaccagcctgcaatgccaaagcaattcccctaagttccccttccaggactccttccacttcatcgtgtcccactgccacccacgagtcttctagattttggtgtctatggaacaccgcgaagcctacagagtaaccaaccacagaggcatccacaaaacaacaccaatagccctcctttaatcgaccatcatccacctaaagaggcctaccatcctcatccaagtcatctctccaggaaccatctatcaagaactcagcacatctcaagtgacactccttgtaaaccaaattaatgtccaactgtttatcattgaaaaccaaatcattgcgccatttccacaaggtatcacaggcccatgcgatgaaagtctgtggatcagcatcctccagagtactccaccagcaaaggcctcttctaaaccgaattccgcaggaggcagggcatcaacaaaataggtggaaactggtttcaacctcgacaaggcagaatttacatagatgggagtcctgattcacaaagtcaagcttacctttggtggggaggatatccgaaaaaagcctccaacaaaagaatttcagtcaaggatgaattctgatcttccaaagttttccccataacacctttggctccttgaaacgatgcacttgactgacccagcaggcacttttgacggagaaaattcctgatttagccaccttccaaaataaaatgtcgtgaccttcctgaagaggtatgattttccaaatttcttttccaatctcagcttcgatgcaatctcaaatcaagccttcattctaggcctgggtgccttccacaaataaatctttgaccttccaaaaggtatggttacatatgaaatggaagcaagccttaatgccctccaaatccttcccattgatccagggtctatcccagatttcacaatcatcgtcaacaatcagaattcccgcaccttcaagacaaaccttcctagcttcaagcaaactcttccagtaccatgagtctttcccttgtttctcgagtgaccacacactatcattattgcagtattttgccagaaaaatcttaacccagattttgtccacatccttcaaaaccatccagaagagtttacctaagaaagctatattcatatccttaaaccttctaaagccaaggccaatattctttctctgtcttaaccaaatgcccgacttgtcaataacactacctatgcaatttcgtcttctccggatgattgtcgaggcatgaaaattttttgtattaccatccccatatcgtatctagttttcacataacttttgtctcaaaattctatccatccttctttcaagttccaatatctccagttgtatctcagcttctaattccaccgtatcttttgagattggaacattttggagatatcctagctgtctacgaagatagttaagcttcctatcacagaaatcgaaaacttcttggttccatttcttcaactctctcttcgtctctgagaatttcttctgtagcactaaatcgcccctggcagcttctgttgatagccacgagttttgaataactttcttacaatccggtcttgacgtccaaacttcaagaaatctgaatgggtaccttaactttggagttacaccccacgaatttaggagtaaaggagcatggtccgatcccactataggaaataagtgaatggaggccttaggaaaatcattaaaccatcttgcatcaataatgaccctatccagtcttttacgcactctattctctgcatttctcaaattttcccaggtacaaatgtctcccccacatccaagatcaactcctccagagttaaacaagaaatttgcaagcatctccccttcccgcatatcaaaagctttgcctcctatcttctcagactgatcaagaatcacattgacttaacccattatagcccaaggctcgatgcactcaccaattttagctgtgagtcattgccaaaatgatctcttcagagcgtaatacagggttccataaatacatattaaactccattgaggcagaccttgttgggttttatgccataaataaaactcattttaatataattagatttacttattaatatagaacagaaataacatttaatgttg

SEQ ID NO: 114058 - DNA, 4366 bp, Cannabis sativa
  modified_base (4319)..(4337): a, c, t, g, unknown or other
aagattgcacaataattgaaaaagcactgtagcgtgccttagcattaaggcgttacacttatttactagttattgaactataagcacttaatcaagttgattttttattatttagtaattaaaatatttttcactataagcacaaactacttattttacaaattttcaaaaaaaaaaaaaaaaagttattttaccaatttgaattcttcacataaaattaaatacatcttcatgggctcaataataatgaggttgaaagcacacgatacacgcccataatctccagggagcccattgggctataaatcagtaaacacaagcccataaaaccaaaactaaagatcttaaggtacactaaattataatacacattataatttgtaattagttagaagtattaattatacaattgaaattaattgatgtgtaaattgagaaagtgactatcattattctttgagaaatactaaggagcaccttaccttaaggtgtcaagcattgtaagagatgatttatcgttattggtacaaattaatatcaaatcacatttataaaactattaaccattcataacgtgccaccttggtatggtgttgggtaccataaaatacctaatagcaatgctatattctttatgttgtaagagcaactccaatgcaagtattttaaaaaatagctaacaatttttacattatcttaaaatattatattttattttttctttcattcacattatttttgactactttactcttaaaattactccaatgctaagcaattttagaagtcaagagaatggacccacactctattatttaatatattattaaagtacatttaatattttaaatattatattaatacaccttttgatagaaaaattataaaaaaataaaaaaataattcaactactattgctagacagtagcaattgtagtagcccacacaattttctttagtggtcaagcaatcaagattgcttttcttggactgacaaaggcttgatgagcaaccaatattagagctgcttttaagatgagtaggacacttaattgttggaaatgaggaagcatgactaagctaagaataatatgcaaaatcctagatattatgaagggtggcaccaattaactcaaatatttcaatgttttccattaatttctttatgttattatgctctagctcaataattttatatttttaataatgaaaatacttaaactttaacagttttaagttcgatttctaaattattgtattgcccataaaatttatcattcatctctgatactttcattgtccgaattgtctcaaatcttaaagtatttttatgatacaaaagtgtgaaacaccgacttaaatctaaaactctgttatgatctacatagtttagaaatactaactcatgaaatttaataatgatagtttatgaatctcatgtcatataagtatgttcaaagttcatattttggtcattgaaaatagatgaatttaaatattagattgataaaaatcacagaagaaaagcaagtggtaatatagctacaaataactatactttacttttgcctaaataacgtgggaccaaccaaagaaacaaatgtacatatataaatatgctcttcaagaaatttacattgtacaaacataacataatgactagtgacacatgaagaaccgacacaagatgatttccttgttgctttattatcattatgaatcctatattcatattcccaatctcaaataaatacaacttttatttattactaataactaagtactacaccaatgtgaactatactttatactaaataattatctaaatcaaaaaggtgaaataattaaaaaatatatatttttatattatctcaaatcccaatagtagtgtaacttataagaagggagatttgatttagacattttgtgatgtgtagtggggttaggttaggtgcaaactttttgggttgttccccccaaaaaaattataaaaaataaataaaaattatattttttttctttaatttgttgtacttatgtatttatgatgagtttgagttatgtattgtattgaatgagaaataataaaaacaagtgtaagaatattgtgaataagagaggggaaggaaagtaaaagcaaagaaaaagggtgagtgtgtcttttgtgtattggttgtaaagtgttttcttattaaccattcacacacaaaccacgtgcaccccaatttaatctccacttcctacttctctgtattactatttttgttgaagattgttattgggtaccaataatttttaatatatactttctataggtgacgttttataattggttagtaatatttcttaaaaattattttcttaaattatatgagactcaatacttaattacaccaataacagtatgacatcgagaaagatattagcaattctcattttatttgtcgttattagtcactagtattgtctaacatcataaagagatagtgtcttacagtgatcaattgttttataataattattagatggctaagtagaatttctactctaacatgtatcaaactttcacatgtattaaattatgttttaaattttgaagccgttaaaaagttcttctaaactattgatattagagagtctcactagggtcattttaaatattttggaagctttgttctaattttaaaaattaaatccataacaaaagagaaaagtataatttataaataatatttttaaatatcttatcatatggttatatatatatattactaaaaaaaactcaaattattttattaaataataattgatttcaatacaacttaaaaaaatgataaaaaaaaaatatgaaagtttaaaaaataataaatagtagtaatatatatatatatatatatattttcatgggagtgatcaacgaaaaattgttagcccattgaaaagttgggttcatacaaaaaaaaaaaaaactaaaaagtattaaagaaaaagtatattgaaccctgtggagtagcccagcttgtataactatatatagggccgagcctgagtctcataatggtaatatgtggaaacttaataccatacagaaaatgtatgtgttacttctctcattgtcaattaattttgagatgggactcattcatcttaatcctaaattctaacatggtatcggtttccaaaaagaagagccaaaataaacacttgggacccgagaatagtgagccaaaagagtcacttgtgattgagccgtgcaagattggtgagtaaaaatagtcactattatagagagtctcgtattgataatgtgtggaacttaaatactatacataaagtgcataaactactccactcattatcaattatacttagttaattatataaatagtacacttattattatttgaatttttaaatatttacatgttattttaataattataagatacatcattgtaaaatgttatttagaattatgactaccaacataacaaaaatataagagattgcaccttttattaggtgtggtgaagcatacaattacttaaaaaacttttaagacaatcttttacgccaaaataaatatataaaaaaaaaataaatcgataaatataaggaatagatattggttatatttatttaattatgtttcttgttaattaattgtcggaaatctttcattttttttattacctaaccaaaaaaactatatgtggtattcatttagtactaaactacatattgttcatcaaattgaggtagaaatgaagttttgaatattttttatttctacatagaaaaaactttaaaaaataattatgattgctcattatttttatatatttttcttaaaaagaagttaattacatcaagaataaaaatctttgaatataaaactagctaattgagtaaatttgaatagataaatctatgtcaccttattgcataatattaatactctagatttaattaactttgatatataaaaagaaatacatatatatgactagtattgcaaatttgcaatgtaaatagctctaagaaataattaataataacaaccatatataggcaattttcttactcattatgaacaaagactaagaagttaaaaaaaaaaaaaattaaaataaataatagtcattgaccaataatacaattatagtgaagtatttaatttttgatgcctttcttctcaaccgctagttgacaactcacattatattcaaccctctcttaactcttaagtaagcaattaaattctaataataataataataataataataataataaatttctttcaaaaaaaaaaaaannnnnnnnnnnnnnnnnnnaaaaataaaaaaaaaaatttttttaaaaa

SEQ ID NO: 114059 - DNA, 2509 bp, Cannabis sativa
tggtaaaataatttctaacaccatttagattcttgactctttgagtcatgaagaacacaaagaacaatgttcaagttcttaaaaaatgaagttttttattctcaagagcctctagccagcacatagggtttgtttgtgacccttgtcggctcatacttctaagtttggaatttggtcggtttgtggctcaagcctttgaaccctggctaatttatgactttgaaccccatacctagtcagttcatggttttgtacccaaggtctggccggttcatggtatgtggtttttgtgtcattgggttggccggttctaaccaatacttagtctttgcaaagactttgtatggcttttcgagattatttcacctttatccagtacttgattcctgtaggaacgatctgtatggcatatcttaggttgagactctcttggccaattagcggcctaagctcaatgtctgtttaatttcttgcacctggatcttgtacattgccaattaacgactttgtacattaggtttgtctagctaatacgcttagttgacctgtgctttgtttaagtctttttatttcgtccagttttttgcctccctctgccttttttacatagatgaacccgaatgacttttggggaggtgacaaccgaatcgacgaagacttgctaagtcttctctacgaggatcatcgtccagttcattgaaccagctcttcttccaggggttctttgggtagctcctcaagcgattttgaggttagcagcggttctttggagcttgaggtccaacaccactactatttggagcaaataggcggtgaattttacggtcagtttatttgggaattgaaccatgggtggaggcagttcctccttagaaagtggacctatattgtccaagatggtgtgcctgacatgttgcccactggtcaagaaactcttttagatgaagatttccctacaactgagactgttgtcactgttgccagacattccgagccaaatcctaccatgacaagaacaaaacaaacgtcccttagggcatctccttaggaccctcatattgctaagttgatgacaagatggagggtccgtcatgtcgacaaggatgaacaacctcaagctaaatagcatggggcctccaagtagaggagcatgtggcctagcaacccatggtcgaccagggtgaggagactgcgaccggtccaaatagttaatctgcagtcgagcaatctgaatctattgtcaggccaagtactgccaagaggcagtataagacttgtactgtgatcttaactaatcttttaggctctcatgatgaggtcaggcgacctttgaatgcccagggtcatctaccagaagtcaggattaaccatgtcgaagaaaagaagaggcccccaagacatgggtccttaagtacggggatcaacagcgatgggtatctcctccatcttccttataagctaagaaactttacggaatcaaggaagggggactcgtgggaagagcctaatgtgtcaggcctactagggatcagttggtgcatcatcttccatccaacaagaaggcttagttggctcctcatatttagcaaggggcgattctacccttgcatccctatttcagggacatagaaaacttctttaagctgtgtctaacccagattaccttgaaaggtatcaagtaccttttgacgctcttcattctctacatagagctaggatggccacaaccttcaccttacgagatagggtactacttttagctgaaatctatttcgaagcagggaaggtccggatacttctactttagccaattaggctatcagtggctagcaggcaccaacgacagggctatgttaaaaattgggaaatactcctggaagtgtttccttgcctggaatatgaggtacgtcagtcaccactttcaaagggtgccaacattcattcgttcaatccccactctccagctgagggatagagccaatcatatcttgtctctttttatggagaagtgcgacatttgtagcctgacttgtgaggaaaattttaggaagtacgacatgtatcctcccgtgcatagtactaaggctactgaatgccctctcgaaggtctcaacgacactcctatggcagaggaggctagtcaaggggaaagcctgcacctaagcaggaaaaaggcaagtctggtgatggcgttcccctagctaggattgctagaactacaaccaggagagaattggatcttcaacaatgtttagcatgacgaggcacaactgataatgcccatatgttaatcaggctaggaggataggactttgctaggcttgccagaccatcacctgtgtccagagataaaggcaaggcttctgcctctaaagatagccttgatgattcctcttctgaggatgataggcttctagattaccctttaaatggtagtaactttttactttcacttacatttagtacttataacttgtattctaactttattactgtttttttttttttt

SEQ ID NO: 114060 - DNA, 1844 bp, Cannabis sativa
  modified_base (1772)..(1787): a, c, t, g, unknown or other
taactacatcgaataacatcataaaaaattgacatttttgaataaagtaagctttattacattcatgcacataaaacataaaatggcatgagagagaatctttgcatatccctatgttctttgtaacaaagttattataaattatgttcaaaatattaattatcaattacaccactatatggaacataaaatcaagaaaaaagtgaaaagaaaatcttaaaaatataaaaatgataaataagaaaattttacagtcaaaggttatcatcttaatatttgtctaaattccatgttcaatataattctttggtgcatttaaaacatggtacgttacccactattgttgatcttcttattaattcaaagttattaccagaatttatttcctttaatttggtctaatttttgtgaaaattaattatgattaattaatatgtgttatattaattaattttagtcttatcttttaggaaggaaaacacttacgccgcccataaagctaagatatatatattttaagctttaattttgtttggttcagatacgatgcattaatgcataatattaaattaattaatactattttattatattaattaatataagtataaaaattgctgttaagatctggtgacgataaaaaactatattaaaatacaaacattggtcacttataattcagacaaaataaactaaatcatatttatgttccaaactttaatttgttctttttacttacttttatttatttattattaaaaattatttttggtattattttttgtttcttttaataagtttacgtgtttgtttagcaagagagtgagataaacaacgattcttaaagtttaaatattaaaataaatatattttcagtattttttttttgagaaaatatattttcagtattctatcatataaatatatataaattattatttttattattattattattagataaagaataaacttcattaagtattaattcgttcattaatacagatttgaactttatttagtattataattgctcgatctaataatacggtcagaaataaaataagtaaactttaatataatcatctagtactaacatgcaattgaattgtaatttggtaaactttaatatagaggtagatgatttggtaattttttattttttttttcttattttagcacaatataaacaaaaaattaaaatgcactaattctcaaaatctatagaaccagaagtcgagagattaatactataggcagacaagacccgtgcctcaatcctccaaagcccaagttccaaaattttaattaaaatgatagacttaaacataataaaacatgaattaatactatgtagtcctattgttgttgtaagaaggtggctcaacaatggtggctcgccataaattttggtgaggagagtagtgcgagtgacaaaaggagatgaaaagataaagcttgagattggagggtttttggggctaaggacttcgaatattaattcattagggcaattggtgatcagaaacaagtcattcaggtgatgtagagaaaatgtataaaaaaagggagatgacaaaagggaacgggcgggagagagtgtataaacgtctcttataggtagatgccacataacacgacatctacctattggagacgtccgccaagtgatacgtctatagctaggagatatctatgctctaccaaaatttattttaattgtttcatttctacgtcttctaacactataagaaatgtcacttttaccagcnnnnnnnnnnnnnnnnctggtaaaagtaacttttatcagcacatttcaaaaactgcgctggcaaagagatcaa

SEQ ID NO: 114061 - DNA, 1178 bp, Cannabis sativa
atagtaatcaccatcctaagcttacacataaatacagcagaaaataaggaaagaaatcagccatcctttttcttgattgaaaatctagttctagctcattctatatttctttctgtaatcaagcactaattctatttctttattatttgatgcaaattaatgctcctactatcttacagttagaaatttgctaataagcaattgcctgcccatgctaccttcacttcctataagccaaaataaaattatctagttcttcaacactacctatggcaatctacatgaaattttacgaacttgatgaccttatcaagacacgtctccagggtttctgtattaatgtaaacaatatgaggttctatcaaccatttatttctgcattgcaagttctcttcgtatagtgaattcatattgcaaattgcaatggtgtatgccacagtgctgtacagatttattgccttttgatgctttggctggttttgctagacaacttatgtggttggtggaagccatggaagagttggactagtatttttttgtaatctagatctctccatctaacccctacaatatttggggataatgaaactatagcaattgcctttaagtatcgaaaagggactcaaacctcaaaccacgtaagagaaaatcacatgcctaatcatttgagctactcctattagtgtggcgacacaggtgtatgggttgaaagagaacatttgaaggatctgacaaattttttgaaaaagagaaagaggcttttgtctttgactgaccccttcccattatataaagataacctcacttgtgcagaggaataccgtgattacaattactatttaaaaaaaatttaaaacaaaaccaatccaacaaggcataaacaaatcaggtatactcttaaacaacattttttttttaaaagagaaagggtccataagtcataggcaggacccttccagaattatattaagaagcctcgcttatggcggaggaaaaccatattacagagaaacatttaggaaaattagcacaccaaaggtgctgaaaaaacaatagagatattgaataacttccctacaacaatgagttccaatctctacataaatctaagaaagacaagtcctcaaaaaacttgattttaaaaagccaagtagctgtccaaaatttaactttctccc

SEQ ID NO: 114062 - DNA, 2750 bp, Cannabis sativa
caaagagaattctcaaaagcctataaaattattaatgtttgaaatattttgatggcatatgaaaataaatatatgataaaattgggtcggacttttcctatttatttcagtacaaatattacataagttgcttacatacgtgtgccataatcaaagtgtatatgctaaaatttcgtgatttctatagtagctctagacaatagatactgcgctagtgcgtttgtttaatcggttaaattaacatgtgagctatatatttggcacagccaatttacagccaccggcgcccccatacgtagctaaatggaccggttattatagatgtccttgctaataaaatgaccccatttacttgtagctagtcatagatttttctttctatccagacctacaacatttagaaaaaaaaaaaaacgtgatcaaaatgaactagtaatgtaaattaaatgtatttattttgctacagtactacatatgaattaccagttttattttggatcagatcttagtatttatacattaatttacatgtatgtatatgtaattgatctcagtggcggagggagaaatatatattacgggcaaattgtacgaaaaaaataatttgggaggggcaaattataaataattaggtataattttttttaccaattaaatatatacaaaatacacataataaccttttttttttgttgggagggatacagcccccaccttacaaagtggctccgtcaatgattaatcttccatcaaaagaaaatatatctgtaattgatcacttaagaaattcatattagggatattattatcaaaattataatatttggagtttgagtcttcttgtccaaaggaccatgcatgtgtactacgtaagcctgacaaggatatgagaaggagagaagatagaatggataagggtattgaaagagaagtaagaaaagcaaccccccatggaggaatttgagctttcatatccactttattaatattcttggtcatgaggatatgagatcatcgatcactaatataaagctagtccacttcgtttttgacaactaattaggatcagcactttctttctttttcccatgttatgtatagtaaagtttattttgttcatgaattattaattttgaaccattttcataccatcttgagcaagctacatatactggcccaagcctcgattaatactttataactacgataagcatgttattattaattagtattatagaagcgagtatatatatatgtcgcttttgaatatgagtacatatgtatataatatatatttatataagtaaaattgtaaaatgataatcaaactatgtatcaaggatgtgtgtaacttaataagcaaggtcgcgtgcctcgaattgggctgaaataattgtcacaaaattataacttgtgttgtctcagtcccctgtgtagaggccggtaaagtaataggagaagacctagtgattttagaggtaattatgatatttgttaatgagctttaacaattttcttttttgcttgggaactatttctagtcatgcatagcaaccattttttaagacccaagagagattttgattgtgacttcctctacaaatgaagcaatggaccctccctctcacatggggttcacatggtgactctaattttaatggcttcaaaatatatatatatatatacaacatgacatgcagatcataatagtaatggccaattcggtccttattaatattattacctttaaccattaaaggcaaatgactcatataaagaggtcaattggaattcacagtctccttccaaagccgtgaataggtaactccaactttttgccaaagatatcaaaaaagtaaccaaagttatcttctattttcgtttccctcataattatggaccaagtagctttttgtacatttgacttttcatctagctagcttaccaattgggctccaaactttaaaatttaaaattgtcacagtcacagcacagcaaaccacccacatgaaaattttactaatcatcagggccttgtacttaaggggtggctaataagcttttgggaagtaacatgcaagtcatataaagatttttaagtacgtcacttattttattgttagatcaatatagtttagtcacttagtagtacatattagtctaatagctacatcacctttacagttgtgctcctttaatatcagaacagttatatggataatggtggaaagaagtaacatggcattgctgttgatatctatccaaacaaattgttgcccacaattgtatacttaaatatattctttttcttaaaattttattacaaaataaaaccttgtaaagggttctctatttttccaagtggctcgaacatctctacaattgaatattggacagtttttttttttttcttcctaaagacgatttcaatcttcaaaacatcaattcttgaccacatcatcttatacatccatttggttggatcctattgtcgctatacttgttaaaaaagagcaacaaagagaaataaaaaaaataaaatcaaaccaaattgattgcactttaatggagggtctccatcgaaaaattgagagaaatctacaatttttatcccattgaaagaaattgatggaaaatgaaaggattaggagaacatggctagtggaaagggaagaagaagaagaagaagaagagatgcctcctcaagctcctcccatgcctacttttccccaattcaaccttgaggaagc

SEQ ID NO: 114063 - DNA, 3037 bp, Cannabis sativa
  modified_base (2870)..(2876): a, c, t, g, unknown or other
  modified_base (2913)..(2918): a, c, t, g, unknown or other
agtctactactttaaacgatacgtacacttgcgtgtgcaaaaatatcgcaacagagatattttatttgcttccttttattgtaaagaaataaaagacaaacagtaccgacaactctatgagttataatggtctaatttatttttccttgtaactttatttttgtgacagtagtatgggaatttatccaacaaatcgtattagagaatagaatttattattaaatatttgtaggattagataataaaattattatatataataggattatatatatatatgtattgttaatatacttatgtaagaatacatgtacaaatgaaaagtattaaatgatcttctcgcgaataaaaagacatacaaagactttctcggtaaccgttaagtacgacaaaattatcaatgagttatatgtgaaattaataatgagcatcgcacatttcataagaaaggtcaagcttggtgcaagattaagtactctaaactcagctcatataagaggtacaatttgaaaaggcttacttatgaggagaggggtcactcatccaagcctcactctcggccatcactagaaagagtctatctttcaaatctcaatgatccccgaagaagtttgtgctcactgctcagtacgtgcccatccattagcatattcctcgagaaacaaaatgtcatcttgaactatagcatgatgaagatctgtgtcatagaatggcagttattcatttcaaataaaaatacataaaatgttcccacttatttgtagataaaggaaacgtgatgaatatctacatttcataattgtaatttagataagattgtggtaactagtatcctaattctataaatagcagtacttacattatgaaaagaaaaggacaattttcaaacttacagaaattttgccgaattgtatccctgttcataaaatctcagaaaaagattgtctcgtaaagtatataaagttaactacaaccctatcttttctttattatccaattattaaattcattgtgtttaaatagtgatacatattcagaagtattaattatcaagtctcaattaatattaatgaaattctgagttaacagtaattgattagattctttcttttgttaaataagaattcagactctatattttttaaagtgacacaaaatagactctttaactccaattctgttaaattttgttaaaaacaaaacaacctagctaacactagtttttaggatgaacaaataactatttatgtcataataccttctcgttaagttattaggttttaagaacacaagatctaaattatcaattaacgaaacagataattgtaaaatatagaatccaaaataatatttaagtatattatcattgtccagtcttacatgtaaattacatgaatatatacaatatgagtttgttatgtttcaaagtgaaaacaaagtaattagacccatctggactggagtggactactaaagaatcagctacgaaacacacaaacattgctgcgaggctaagtaattaaagacacaaaataaaacacacacttaatttataattaattaattattagttctaacatataaaatatatacataaatgtattatatgattggcatagttacaactaagaaggtttcctggcttgacacctgcctgaaaagagcattatataatactctacagcctaaccattacattaatacaccttttaatcattaattaattcatctgtgttcatattaaatatttgcccaagttaacagtatccaacccacccttctttagggccggtcttaatgtgtacgggaccaaataaaaaactcttcaaaatttgaaagtttaattttttatagctacacatttaatatttttttaaaaaaataagagattaaaaattgatactttttagtttaaagtaaaactctttaccactacatcaaatattaatatgtttttttttttcacaattcaaaaccctaaatattcaaaaactcaagacacatgcctgactcgcttaccttcagaattagtcttatttatgatatataaaaaaaaattcacataaaaatactaaaaagttgataattaactattttaatttttatttttaatactataaattatttaaaattctataatataaataagcaaaatgtatgctatacataaagaagtgtcctctatatatatatatagagagagatactcagatttagatttggttaacaacctataacaatgcatatattacatcttaaaataaaaacaatgaaagatattatgcactgtatttgattggaataacaatctctgcttaatttttgctttacatttttctaattttttgtttgtttgtatatatattttaggctatatatatatatattcagatgcctaaaaggtagacactatacagcttgaatgcactgcttagaagttgaaggtagtgtggggtcttccaactctcattttaggcccttaaacagccattgcttataatattaattcattagctaaagataacaaaccactttcaaaagctttcttttaagaagtttcttccaactttcatctttctctaaacttatcccttttttccttttcagattagaaaataaaaaaaaaataaataaagaaaaggaaagaccattggttttaattcctgtctatctatctaacttaaactttcatagatatttattattggagtacttataagtatacacatatactttatactttactatacattattacttaactctactgcagagtactacttatccttatcctttcttattagaaacaactttcatatttaaatatctattctatataaagtgtacctatataacagaattcttggttnnnnnnnaattcatgagtcactttttatttatattaaaaataannnnnnttatgagaaattcatgggtgaccttttctttatataaaaaataaatctcattaaataaaaaaaaatacgattgaccctttaggtgatgattttggcatatacatgtgtatgatcatgga

SEQ ID NO: 114064 - DNA, 3952 bp, Cannabis sativa
  modified_base (955)..(957): a, c, t, g, unknown or other
  modified_base (3541)..(3549): a, c, t, g, unknown or other
agttatattgctttgtgttttactagtattttataaaacacagtatttttgaaaaaatttccgtgtgacagtatttttgtaaaaattaatccgaatttcagtatttttgtaagtttcccctagaatataacaattgcaaggtttggaaaaaaatactttctaaaattcgaaagaaatatgtgaaagaaagagagggcatgcaagttctaaaagaatgaggttagaaatgtttgagtttttctttgagctttgagaactgaaatggaaaaaatgtggaaggaagaagaagatttggccttttaggtgcttctttgacaccaaaataaaacattggaaggagaaaatatagtttttaaatatgctgaaataatatttctcaaaagaaacaaaactaccaaaataaaatgtaatcactgtgaattaggggaaatacttttcgaccatttcttattaaaaagttattcttctattccaaaaatcactttatatggaacaattgttatgcatatattataagcagaattatagtcacgacacgtataaattaggatggataatagctcgctcgcagttcgaagaatgtaaaatgttggttaactcgcctggaagaatattggttacagacgtgtttaaatatttctttaattaattaaggacgagtaaaaagtgaaagctgctaaaccagcaaaattaaatcattaacgggaaatgtccgtctcgagaaataccaagtacacaatgatcaagaccaaacgatatgtgagttaagcgagacaatatagagattcctaatctaaggagcacaaaagatacaatcttaagaatcttatttgaaagatttgttagggtttatgtcctaaaaaatctgtaaagatatttttgattatagataagagttgaacatttttgtatgtgcttgaacgtcaaatgattaatatttaatattgaataattnnnatataaatatcaaaaaatttcttactcatacataaggttgtgacttgtattgtacggagaattaagacctcatagccatgaataaaatagtcagcaacatataaagttattgaatctttaatcaacagttgctagtatgattcacagatacgtgttgttcggtgcaagtaatctcaattcagattactgatgtagtatgaaatcttattgaaggtgttgtatataatagagattatatacaacaaggaccgatatgaataaagttatctttatcaaacttactgtttaccatgaagacttaattcatatcacaatgatgatcaatagtagatcgatctaaatcacgagtaatcatgaactcttgttcatgttattagtttcttcgattcacttgttaaaggttcttaaagaagatgattcgtacaacttctattttaagaatctaataatgtggatggctgggaacatggtcaaaaggtaaatattcttttcatctatttactttcggtttaatatatatatatatatatacatatcttaatcttgaacatatggtataataataattagatacaactcttccgctgggtaccttagtaccataaaaccaacaagtttgtatacaaaaaataccaaaatctcattctggataaccagcatgaggaataaatgaataaatcatccaatctgcgagaaaggatttgaggaatataaacacatattcaacaatgtgatttgcgaacaaccataaagtgatgaatagaagaacaacttgatgaaacaaccattttagataaggacaaaagtggttaccaacagttaatttatttatcccatatgatgtaaatatgaaacatgtggattgtccacgtttcatgagcggttatttagataaaattaagcaaagaaaataattgttattccaaaaaatttctatatataaggacaaaaccgatgatagaaagcacgaccaaaattatctaggatcatcctgcaagaaattgagattgtattagttacatttctttaattctatactctgtaacacgaaaaaaccccaaaaataatgataacttgtagattatttagatttaactacaaaaccacctagatatcttgtgtcaacctatttattattatttattaacacttaataataattattaaagtttttcttataagttacaaaaatgtcttatttattgttaacaattatgagttaacaactaaaataaaagataaatgaactataagtccacatcatggctgaaacctatagcttaggcccatgatttgattttttccaacttatttcaattagatgagaatttatcttttttcaaatttaccatttatccaatctaaactatttaaataccaatttttaactttaataattataataaataattatcaaataaagatacaatttaaatatatttattaactaaaccctaaagagtcttaattaataaataaactctagtttctattttttttttctctcaaattagtccaacctaatgtttttttttttctaactcaaaatgacattaaagttatgttgggcgaaatttttcattatctcaacatcaatatcattcatgatgcataaattttttgtttttcattttaggtttggagttggtaactagttaccattcacatttttagatgtgattttttctaaatctaacctaaataacatcttataatgcgagtaaccatctaccctgggaagataacgagttacattgtgaggagtaaccagttagtcgagttaccctaagaggtagcacgttgggcataataatataaataggactagttacccatgttttcgcaaatataagtaatttcctaccatgcaataattttttaaaaaaaatgatatggtgtgaccaccattcaatttataggtaacgagttacccatattacaaaaatagacattgagcattaaactcaaacaattggtaaatggtcatccatccctaagataataacaacctacacttaactagggctatgtaacaggtaactagtaaattattcctaagattctaacaagttatacagaatagatggtatataatataagtaactggttactcctaatgtggtagcaagttcccttgatggtaaatgattacttgatgttcccttgaaaaaaaaaacgttataaatatgtgaaaggtaaatgattaagtagttaactagttacttaacagtaaatattacaatctatacatacacataccatatagagacagtaagaaaaataatacaataatgaaaaataaatattatatttatgtaatgttaaatatttaaaaatcctttttaaagaaaactatgtgctgaacatataatgcttagtgtgctgcagttgagatttgaaacactaaagtaagcacagattccttacagcttgttcaaattagaatcaaaacacttgcataaaataggatgtgttacttataaatgatacaaatagtattaatttgttatctttttcccctaaagcctttgtttatcatgttagaaaaatgaataatatacccaagatcaatttgtatataacnnnnnnnnnaataataatatataataattaagtatgtgtaccgattcatccatagcaattacttcaatttgtttatcatgcaccaagatagtgtaatctagcaaaaaagactttagggtaagataatcatgaatatgcttgaaatggttaagttccaaatattgtttaaatcttgtaactcaaatcctaacttgtcttttatcaatgaaagtttcaaaaaaaagaaaagaaaaaaaagactagtatttgtaccgattgttaggtgtgtcaaaattctcatgctcgccctctttttaatttgttctctgctttacattaaaaaaataaataaataaataaattaaagaaatttttacaccaaaaatacaaaatgcattctttattactaaaataccctcacacggttattgtt

SEQ ID NO: 114065 - DNA, 1694 bp, Cannabis sativa
acagtaaaaaagtaaaaaaaatcagtatttttgtaaaaaaatagcagaagttagtataccatgtaaattttcctttaattaataattgcaattaacttattttatttggaccttattatcccgcctgattgtcttatttgaatctcacatgtgttaagttaatgagcgaatttttaccactacactcccatctcaattaaattactcaccttagtatgaaatagccccggatgagtcgagacaaccaatggatcctcaagatcaagtatccatagttcccccaacacgttaatactcgagccatcaccaacacaccaatttgaaccacatgttgtgctttccatatgctccttcagacatagataggattattacccatcttagttgtgagatatcttccattagggaaataataacatgctttgaagatatgagatgctaatgaatcaggtcttaaaataaactatgattatgtgttacgttgtttagttttatagtatatggataaataaaaatttcatttatagttataagaattgttttttgaaactatatctgaacaaaaggtgaatttgatgaaatcatcagttttcttcggcattaatattgatgatactctgaaagaatctttgccacatgttacaaaaatacaactgaccaatgataacaatttgtactttggacttccaagcactataggaagaaataagaaagtagttatagaatatttaaaagagcgtgttcgcaaaagagtaaggtaaatttcttttgaaagctggtaaggagattcctattaagattgttgctcgatctttgcccagttaggctatgagcgtctttcttctatctcttgacaatagtaaacatattgagagcttgatgtcaaaattatggtggcagtcctctaataattcacgtcgtggtattcactagatgtcttgaaatcgtttatgtaagcataaaagtatccgcgacatggatttttgtaacttaaaaggttccaacattgctttacttggtacacaaggttgtcgtttcctcactcgccctacttctttggcttctcgcatttttaaggcaagctattttcccaatgagagtttcctagatccttagcttggcaacaattccaattttatttggcgtagcatttgagaggctcaacatgtggtccaaactggggtaagtcggtaaggtggttaattggagatggaaattctattaatgttcttagtgaaccttggctgcctgagaacatttaaaaatgcatataatctcctccaaaaactttatgaaatgtggaatgaagatatggcatctgctttttgaaaaggtttgtggaagttaataatacttccaaaagttaagaatttaatttgaagggctggtatgagttgcttaccaacaatgctttagcttcgtactaagagagtggatgtgaattctttgtgcccaagatgtcaattggaggaagaatcaatttcccataatcttgtaacttgtactgagattcaacaatcttagaaccatgtggggattggtaccatcttagctcctgatgctggtcttttggacttgtgcatggaaattaccattgattgaaagtatcaaggtcactattgatgctgctttgtttgaggaaggtcaaagcattggtgtaatgaccgctttagtaatttggattagtaaaggca

SEQ ID NO: 114066 - DNA, 1360 bp, Cannabis sativa
  modified_base (1301)..(1302): a, c, t, g, unknown or other
aaattgaataggtttcggaagcaggtcctttttgcctattttgtagcggttgtttaccagcaataggaatgaattagctctttgaatctaataacttattcaatttatttgtattgtaatacaattagaggcgttttgcctaaaaaaagtttttttttcaaaaagatagaattcggtttgaagagttgtaatagaacattggagaccttttttgattgtgatgctacttaggttgtatttatgttttgtagtaatataaacatctgatttactaaaaaataataataaaaaaattgtgtataaattttttgtcattttttatgaaaagaatatatattaggttaatattacttgtattactacacttattttgttatatttttaatttttattttaattatgtatatttttcattggaatataattatgtatatttttagttgtataattagttttctttaatagtagaaatatatttttttatgaaaaatattaaaagatactactagtgttaagtacttttttttgtgtcataccgtcctataacttaagaaaataacttttagagaatatttctaaccaaatcataaatcactacttataaaaagtattagcactattggtatccaataacaatgctttttttttaatgtgtacagtgagcttaaatttgaattgtaatattaaaaaaatctttatattatatagatatttaatataaaataaaagataagagaaatatgtatagtttaaattgaatagtaatatttgaaaaaaaaaaacatttttattatatatataaccatatttaatataatatacatatattatgcatcaattttttttttttttcatttagaaaaatgtttgaactttatttgaagtgtgaatacaacactgcaacacttacagaaatagaaaacagaaatatattgtttaagaataggattaataaataagacgcgtatagtttgagtttgggtggccaaaaagatgaaatataatggccacatataatatggtgaatggtatatatatatatatagataatgaaacagtggtataagtactacacaccaacatagtcttccagatcaaattatgtaaatatcacagcagtacctagctagtgccactcaactcatcaatttaattcaattgctaattctctgggtgagggtgggacccacttccgctgtgttttgacagaaaacaaaaaatagttttcataacagaatctgaacaagaagaagatgtatatacatatactagcaaaaactacgtgcgaggcacgtatactnnattttatgctagtttttttttatgttatttgaaagtgatacaataaaaaattaaagaa

SEQ ID NO: 114067 - DNA, 2767 bp, Cannabis sativa
aaaagcaaagaaaaaaaaaaaaaaaaaaaaaaaaaaaaaaatatatagaaggattgtggagatagagaaagagtggaaagaggatagagacggggaagaattgataaagacttgaagaaaaatgatgaattgatgaattgcggtacaaagtgtattgttgtaaaatttgaaacttaagaataataaaaatttctaaaagaaattatgaaaaggttaaaatgctggtgataatattcttgtaacaaaaatgccaataatttatgtaaaaattctaataaataatagaattattagtgaggataagggtgtctagaattcaattatgatcagcaccaaaacacactggtggtggtggtggtgtctattcttttccactcagaaaatatgtgtggctgtggcaaacagggcttctccaataattcgtttctcacctcatacacttttattagacaatagtgttcttaaaaaatctaaaatgtttatattttagtgcttctaccacattttcatttcaattctctattagatcaatttgctagtgatcatcataaggtgaaagtccactagtatatataataataaagaaaaagatgatgtcattggtctctaagaaagctgggaaagaaagtaaaaaaaaaggaccacattgccactagtagtactcactagatactatttcataattacagggttgttttaataatattaatttacattaaaatataaattaattataaaatcttactattttaacaattagataaatattatttttgtgtaactgaagatattgacataaactattactttatataccgtttttttaactttttttttaaaaaaatttatggtttgagtttctaatgtggttgtagtactaattgcaataggggtttctataagattttttgttgcaatttaagttgtagtgctagttgcaatatgaatttctatgtagaattctataaaaataaaaaaaaaataataaaaaaaaaaactgtttcaaagtgtaaaaatagtaaaaaaaaaaaaacctcctaaatttagttaataatatatttattgtacgtttgctacagagtattgaaataagttattaaaaaaatgtaacggaataaatgaagaataataggaattaatatttataatatgttattgtgtactaaaattatttggaaatggaataacaataatctattgtttattttaacaagaagtataattgaaatggttaaattgactaaattatctttttgaattaaattatagtacatagtaattattttataaaaatatattttaatgaataaaatcatcattatatatttaatattaaaagtaaaataaaattaaataaaatttattacctttaataatattctttaaaaaattagtaaggggagtatttttttattattatttaattaattaaatttttattttttaattttgataaattaaaaaaagataagagaatgacttacttattatttattttcattgtttattaataaacatatgataatggagagtacattgcatgttatcgttctcaacctatatggataggacccaatttatgcctagagggagcggaaaaaaaacttaacctaatttctttttattattataatattattttatttttaatatgttcacaatagtttcgtgtgcctatttattttagtgttttaccctactattactactatcattctttccttcacttatttgtatgctacttgttaacgcggattttcgttaattatatttgagcctaaattgtggtagacttgcacagaaaacaaaagcaataaagaaagaataagaacacagaggttttttacgtgattttgcagttaatattctgcatagtccacgagtcaatcttattagagttttgatacggttttagagccttttctctaatgatttttccgtccctctttcagtataaactgctcctatttataattacatagggcagttaattacagatttgactgatattttacaacaatgatcccctgaaatcgtgggattgtattacatcccacgtaaaataaatgcaggttaatatttgaaaatcacacaactgtgattggtatgcttttactgggtcaatgtaaatgtgtattaaatacgttgtaacacatattgttttgggacgtctcgctgggaacatagcaacaataacattggtagcgagctagaacttttcacatgtctttccgacgttgataatgtaaatctcatcgtttccgcgcttgaagacataacactccatttgacaattgtagttcttggtgacaaggtgaacttcaacagtcaacatcaattaaatgccagcttctatatgagagggctgactcgacagagctgtgaatctcattgaaagatgtctggagctgattagtgaaggtaccatgagcaagccttcctatagtgaaatggatgccttgctgttagttattctgatttactcgactgttatacttagtttgtataatgtgtattatactctaagtgtcttaacagtctgtaatacccggtaaaaatatacaaatattttaaatttgatttgttatacaatttgtgtgagaataagtattttatttatatctactaatgacagatttctaaacatagttgaaattgtagttagtctcaaggtaaaattatggtgtttttacgaattaggataattactcaattaaagcccaatatgaaagtctattagagttttatagattatttagtgggttta

SEQ ID NO: 114068 - DNA, 1205 bp, Cannabis sativa
aaaaaaaaaaaaactaaattaaaatacttatcaacctgaataatactatgaactttcccattataatttggggtcatttctttcaaaataaaaacttattatagataattttttttaatgataatttggggtcatgagattatggtggataaaattttcaaaaatcatatgttgtctaaatttttgcaaaaatgacatgtgaaatctaatgaaaaaaatcgagttattctttagctgatttgagcctctcgtcctggcctcaataaaaggctcccccagaaggtacatccttcacaaggtaaggacacacggaggctcggttgtgcctgccacttgttcctcctaggtgcggaagaaaaggtgttcctcccggactcactcgtggaaaggccctcctcgcggaaggtcatcttccgtacttgtcagaccactaaagtgacatcgatgcttgttttggtacaacatcagtttctgtcccccatgtcaagccatagtacgatgcatgtgcactgtcgtacatgcctattacccaacggtcattgggtgatttttaaaggaaagacatttgggtgacacatactatatgttcagacgatactagtcagtatccttgcgcatcacatgatgaagcgaccacctaccaaacgaacggtcggatctcttgcagtaggggtggccctaaaggcatgttgattaagaaacctcctaaaatacccttatttttatgatgtacagagaggataattttttacctacaaaacctctacaaaaattcctacaagcttcttcttcttcaagaagaacgaaaggaatcgagggttcatgttcatatagtaaacacttgtaatattcaacacttgtctataaggctaatgctatggacttgtggactaaaaataattaaccccgaaatcaggtaaaaaactgtctattatttattgttttataatctttcttaatggcatgtgttgggtttagtgtaatgggaattataatggaatcattattaccattacattgtttgctttcattttttaaacatttgtaatggtttacattgtaatagtcattacactattggcatgtatggtttgttgtaatgggaatggtaatagaatcaaattatccattacaatgtttgctttgcttttaaaagtgatgtaatgggattacattgtaaccataattacattaaacaagagaat

SEQ ID NO: 114069 - DNA, 2080 bp, Cannabis sativa
cgttccaaacgagcccttaatgttcacttgctttatgttgcatattactataaaataaatgcttagccagattgccaaaattacttattataccatttaaatttattgcagaaaaaactgttaattaaaaattgcaattaaaactctacctttattcaaaacaaatgtttaaaccaatgaaaatttactggtgattaaaattcaaaatattcaatattattattagttcttttagtgaatatggacccacaggctagaattacttttgagaataggttcagaattttaacatattaaaatattaaataaattgtcatatattaaaataatttggcgtgactcatccggtctccgtactaagaggtatggaatcggcagccataatttaattaatagaaatatgattatatataacattatccaaatacaatttacacatttccttataattatcttctccttcataatattctctaataatcaaattattttgaacatcccgtaccaaacgccctttaatatttgttgtatgtagtgtccttggggtgttctataagaaggtaattgaggcaaggcacgtgtttgcgtggtgggaaacatccttttattgaaagagaacaataataaataatgccctcccatccaatccacatttttattttattagtggagcaaaagtcggtgttcagatagggtacaaaatctacacaagaaacaccaaagcaaatcaaaaaatgtacattaaatgactattacatatatttacttagtgactactttaaaatatatcacatgcaatttttaattaaaaactaggactaaaaatatagagcaacaattattagtccaaataaaagagagtaacaattccttttcttaaaataagaaaataagtaaattactttgctttgtgtttgtaatgaaaatatagataagaaagttttctttgcttatgtattaaagaaaaattgcaatttattgtaatattaaccgataattaatataaatcttcacgtgcactacaagtagcccaccagattataagcatatattttaatttcttagaagcaaaagcaaaagaaatcttatttatatgtttttgttttataaagtgattcgattctatttattttcctttaatgtcatatcttgtaatagaaagcacaagaacttagtttgtaatgttctttgagaatatttgacagttataaggtatgtttctcatgattttaatcctgtttatttctttaatttctcgattcccattttgttttcctttcttaataattattattggtgttaatctaaaaaaaaaaattcttgtaggtgttattttgaagtattaaaatctgcttacaaaaaaaatatttgcatatttgaacaaaggcaaaatgaagaacaaaatcagttctcacataaggaaatttatgccctgttccggtaatatttcttctctttcacaaccttttgttttagtaaggttttacataataacgacattaatttgcacaataatgtaaaagcatgtgattaagtaaataatttaatgtattgaatgtttttttttttgtttgtttttctttattagattcttgtatggattgggccttaagaaaattcgtttgattaattattcaaaatacatgtttttatatatatttgcatatgcatactctttaaattttggttaactgaaaataaaatttaaaaattatttgaactagaattttatgtaaaaatggagagagagaggaagagaaatgtataaaaaagaggtcaaaattttattttagaagaaactcaaggtaatacatgatgatggaatctattttaaacgggctgataggcttatgggttataagccttaagttactactttggtcatttcaaaagaaaaacaagttactactttggggagtagaaacctcaaaattattttgggaaattttataatgtatctccttaaaagaaaaacatcgataaatttctatctgttttaacatctaaaataattttttagttaattttttctcatgatcatgtaaattatagttatttaagacatcttgtaaaattttaa

SEQ ID NO: 114070 - DNA, 9905 bp, Cannabis sativa
  modified_base (8564)..(8577): a, c, t, g, unknown or other
gtgtatgactcttggatactggattgtctatttaatttaagagataaatagatgatttatatagtaaaaaaatataattcaaacaatctgatctctcagacctcagtccatgtacaaagagaaatttgattaagacacttaaacaattcatactcaaacacttagtcatcacatatatataatggaattacgaaagctaatcaatgagcactaaaatataacaaaacaaatcagtagataacttcatctcaataaaacacacatgttgagaattatggggttccatctcaaaaccaattggtgatgagtggagtagccccatgttcttatatatgattcaatacttttacatttaatccatgtacggcaatgttctccaatatcccccctcaagatggtggctagtttttgctcaccaatcttgaatcaccttatcacaaaccatgtcattttctcgcttatttttgttcagatatcaagcgtctttgcactatctggatctaatgcggttggctaactatttagatagatgtggatcgaaagcgctaaggatatggctctgataccacaattatattacaatgagaatttccacaatgaataacatctttttttcttttttttttttccttttttttttggatgtcacatcttcaatgaaaacaattcacatcttatgggatgatcaattattgtgggacaactagtatagtacattgtatgttattacataaagaaatgtgagcatataaattaaagtagaattggagaaggacaaatcatatgcatatgtagcagaataacttttaaaattaaattagattcacattccaaactcagtttggtttgggtatacaattctctgagcaagaagattgagctggaatgaaaatggtggcagtgaagtaatgtttatctaaatatttagttattgttatataatattgtattgttttatttaatgtatgtttagtattactagcattaatgtgtcgtattaaaaaatatttggtttatgttagtttaaaaaataattaaataaaatatataatttttatagtatcatatgtgtaagcagcccgattcaaatctcttgggcatccatttacggacttataattcttataagtgtactttgtctttggcatatgtaatattcatcaatccaattgagacattagttgtttaggcttatacatatactattagaattatcacatttaacttttctcaaataatgtgatattacacaacttacctgatatttttcttgcagatcacataattctgacggccaaatatgtaatgctaatcctgactctacccttcgaccatgatcatgactcctagtctgtctcttaatccttacttgatgcaggagacagacttgaaccccaatcctgatccaaactcaaactcggaactaaaaccaaacctagacctcgaaccttgactttaaccatacaccctacatcctacaccttgcacctcaaaccctgagaccagatcccaatcctgacactgtaccccaacctcggacccaaactctaaacttggatttgtaattgaaactcaatagtgaccatagtgtaccctagactcaaaccttgaccttgaccttaatcttgacccgtgacccgaacatcaacctcgaccctctataccaagacccaaacccaattccaaccttaattaacactgagacaccgaaattgaccgcaatcacaatttttctatgatacaaacctaagttcatatataaatatacttcaatacaaacgtatatagatcattaatttattatatattgaataatagaatttgtattctattaaaatttatgaacacaataattaaacgacaccaaattcaatccaaatttagttaaatgattatttaatataatttcctcttatatgtcatgtcaaagtaagtatataaaatagtatgatttttataaaactaaataaataaatatgagcaatgacacaatgaataacaactttttctttttctttttcttcctttttttttttttttttggctgtcttgtctttaatgaacgattcacatcttgttggatgatcaattattgtgggacaactagtaaaataatacattgtatgttattgcataaagaaatgtgagcatataaattaaagtagaattggagaaggacaaatcacatgcataagtattagactaactttttagaataacttttaaaattaaattagattcacattccaaacctcgcaagaaaatttgaaagaaaaaaaaaaagaaaaaagtagactggatggtaaagtaaagtggatagaaattgcttctccctttacctaaaaataatatcaaaacttcttattatcttcttttctttttccaggaaattctagagggcaccattgtttatgggctcctatctctttcggttacatataacttgatagtgtatgactcttggatactggatagtctatttattttaagagaaaaataaatgatttacatagtaaaaaaatatagttcaaacaacttatttcccacatttattataaaaaaaaaactgagtataataaaatatttaaacaatctgatctctctcactctcatactctcatattcgaacacttagtcatcacatatatataatggaattacgcaaagctaatcaatgaatactaaaatataacaaaacaaatgagtagataaattcatctcaatcaaacaaacatgttgagaaatctcaaaactaattgtgatgagtggagtagctcatgttcttatatatatatatgattcaatacttttatatttaatccatgtagaacaatgttctccaatatcccccctcaagatggtggctattttttgctcaccaatcttgaatcaccttatcacaagccatgccatttccttgcttatttttgttcggatatcaagcgtctttgcaccatctagatctcatgcggctagctaaccatctggataaatgtggatcgaaagcgctagagatatagctctgataccatgttaagaattatggggttccatctcaaaactaattggtgatagcccatgttattatatatggctcaatactttcacatttaatccatatgggacaatgttctttattatccctcctcaagatggtggctatttttgctcaccaatttttaattactttatcataagtagtgtcatttgctctaataccatgttgagaattatggggttccatctcaaaatccattagtgatgagtggagtagtccatgttcttatatatggttcaatacttttacatttaatcgatgtgagacaatgttccccaataatacagtttctcaaaaaacaaaattatctttgcaagaaaaacaaaggtagagcattcaaagctgttgagataataactgatgctgtaataccataaggtgttgtcaagctttctcatttcaattccaaatctcatgttttgggagtaagacaccaacacaaactcactgccttataattcaaagataatactcatattagtgagttgtgagaactaatataattctccacagtttcacttactaaatagatagaattgcaaaatgtagtaattgaatgatattttgtagctgatgaacaattacaagagagtgattgtattatttgtcataaatcagatccaaatgtagatttgggatgaaactcatcttcttccaatctgtaccaatatctttttcacatctccttaataacatgtcacactcctcaatttgttgtgtctatacagattgaagcttaagtttgcttgaattatggagttggcctatccattcagggatttccacagtaccacagcgccacaattggaattctttcaagctgactacatgttgtagtcccttcggaagactcgccaagtttggaagacaatcgaatctcaagaattctaagctttttagagttctccactatggtgaaagatcatcctcaaaacctgattgttacagttcaagaaaatacaattcaaactagaaccaatcacaaaatcaaaatctgaacttaattgaaacaagacaagaataaacttagcttgaaaatgaatgaatcatgaatttgattgattgaatagttagtagtacacaatcagatatgtccaagaatacaaaagaatgtctcacactgagggaaatcacattacatccctccacacacactcgttgtgatcttggactctctctctctctaaacttgactctgaatttgaagtatgagctttggagatcacttgagagagtagaggcacatttatagatgttggtgggactctctttaagttagcgtcaaagcaattattataactaaccgcagctttcttcaaattcatctgatgagagttaagatagacctacagacttgataagggttaagtgagtataatcccaacatccacttaatttcatcagcttcaagccttcaatgcctacaattcgtagagctttcaagttgaagagtggaagagatgacaatgatgatgcgatgatgatgcttcttggggtgcagttttcttgtttaaggtgcattgaaatggcttccaacaagttgagtccagagcaagaccttcttccagagttggaaacaatggcatagatttcaaatgtgggcaatcctcaataactaattatgagagacaagggaatgacacatcaacattcatgacttcatttctccaccaactctgtaggttaggtagttctatgagctagagttctttcaaacaatgaaagaaaggtgtggctactgaagaagcattcttattcttccgaaatatattcgagtttcataagttcgtccagtacaagtaccttaagattcaacagttgtttgagtggtggtaggctttgcagtttacgcatttgcgcaatgaaagtttgaccaaaatgtttggacagttagaagagaataagaccttccccttaaaaccaagcagagtcaattcttgaagagctaacaacaagtcactctagtagtgttttgtgctcatcagactcaggtgcattactttcccattccaaagacaatgattaaacccctgataccacattcaaatacctgctcatatcaaacttttcatgccccaaattattgatatcaacctctttggtaaatgtattattaaatccaatatttggaaaggttccttgatctcttactgcaagttgagatgatatttgaagtctagtccagtggacgaaaacagcaacaacaacaacagaggaaaaaacactgcattttcatcagttaagtacatttcaactcgtctgtgtctcaatcaatcatcttgacaatcattggaaatctctctctagcattgagtctttaacattagatcatcttccatacatgaagactctctctgaagggcttcaacatctgatgaacatgaaagagctttatatttggaggtgtaacaaattggaagacatctcggattgtgttgagcacttcaaatcgctcgaaagctctccctcaagctctgcctcaacttgacattgtcgattcagatgattcgtagcctcgattctataaagacgaagatggaattcgaggactgtcctgagatcaaagtttcttttgctaggtgaaataattgttgaaccaaacaagtgttcagtttaaacaaatacttttctggttttatttgtgttttacgatgtcaaatgtgccttaaaaaatatagagtccattttattatttaataaaatatacatcttggtgctttagttcaaattttttaataagttcagtggtgtttttaattattttttctcccttaaaatattaaccaagaagtcatttttctattgatgcctcaattaattctaagtccttcaaacaatggaattgtcagataaatattatatcttctttgagatattcatttttctcttaaattatgtttaaaattataatctatttctactttatctttctcagagaattaatgataatattataagtgagattttagctccagatttggtgtacacttaaaaaaaacacacctataggcaccttggaaaatattccaacaaaattggattaaccactgctaattataaaatataagcaaacacttcagattacacaagataagagttgtagaaaaatataaactactactttctttcttaactaattccataaaagaaaaaaataagagtaaatacaattttagattctgtgttttgcaattaaactctattttgttaacaaattgaaccctgtattttcaaaataattttaaataaccatgaactgattttttattaaattaaaacttaataataactcgatttagaagtgttataacaaaactagttatgttttctacatttgttcgtgttaggaattgtcttcaaattggttatattaaaagaaaaaattattaaaaattgagctcatggtcctatttgtactattttaaaaaatacagaggatccaattattaatttttaaaaaatactagtccaaaatagtattaactcaacaaataataaataaataaacataactctataatgagacgaatcatccgattacgactgctccaaagccatttcgtttcgaaacagcatcttcagatatggaactactttcgggagcacaggcaaatctgctacgttgacactcatcatgtcaaatgcaatacacgagttgtgcatttgtgtcaaatcaaatactgggattttcgaatatctttggctgaaatgtgtgagaatcattctatatgcaccagcagagttccccactcctatggcttcctctattgtgctgtggtctttatccacagcatccccaaccattccatcctcaaatgttgcctcatgtataagtatagttgcatcacgagatgcttctatcgaagcttcacagggcctagtgtcgccagaatacaccatcttccatcccgggatagattttccaatgctattagctctctcagctgccttcaacaccacaccgaatgcctgtgtggaatgaacaacaggaaaactaatcaaggcctccaaaccagcatcactgagaattttctttaagctctttatttctgtgacattgtcaactgagtcgattttcccattaagtgaatcttttgtggtgtggtgacagtcaagaaacatcatgtctaaatcttcaagtctttggtatgcatctaaatatctcttgagtttttccggtcctataacaagtactggtttgtgaggatcttcttttaacaattcgcgtctaaagacaagtattcttgccaagcctgcataatgatcagcatgcatgtgggaaatccaaatgcacctcagtcctctcacgacatcatcggctttgtctacaccatatctgtggcaccataaccactataagttagtagatgagataaaaagtgttatggataacaagcttgggtttaccttcgtttgagctgtcccaaggttccttcaccacaatctaaaagcaaacccccttttgagaaaagattgatatggatagagctgacattccgatatttcgatggctgagatgatccagtcccaagaaagacaatctccatgtcttctcttcctatattttccaaacaactaggaagagtatcgtcatccaaccacggccctttaacgctaaacttaacatctttaacagagcttatttctcctgttgattcagtggatgtatgccacaactgtttaacattttgagcagcaacggcaatatctggaatctcggaatgtaattcatcaatgatttctgtgggcaccaacaaacttggtacacaagatttatccaatccgtgcttactatgaggtctcaaaacaaactgttcaaacaacaaacagaggaagtagactattttgccagttctaagatcagtatttcatatatccattgtgtgaatgattaatgttaattagtgtgtcattaacttcatcacaaatatagttacagtgaacttttcaggaaatatgaaaacttaataaataaataaggttacaagaagattgattatattaaggatacatatactgaataaattactagctaagtccaagttaagatgccattcatagtttcataccttctgaagattttcagcagcaatgctttcacaaagctttagatctgaatcctgaaaatattataacaaattatattacaagtggattgctttccaaattgaaggttctattacaacattttgacaaacctcatttgaaataatggaggttgattctggagatggaaagaactggggacataaataattaagcctggttatcattcttgcacttgattgaaaaattggaattttcatattctttctgtcaacaacataggtagtcaaataagcaatttaacaacatttacataatttattatatatatatatatatgtagaatacttctcaataggtggtacccattaatgggtactaaacaaattcaactataaatattaattttaaaaatattaaacttagattttggtgcgatagcaaataataaaagagaaannnnnnnnnnnnnncttaatttaactacttaattaaagaaaatatcaaaaaatatctcttcttacactatatcaaaaatatatttatatgaaaaatatttaagtcaaattcaacttttttttatcacttttttgccgaaattttttttattattattttttttttcaactgatggaccaatcccagcccatatagtgtaaaaataagaaatttttctaattaaatagaaaaattaatcataaaaactcaaatttttctaatattacccattcattggtaatacccattaaaagatttttttaagagaagaagaaaaaacaaactagcaaaaaaacctttcatgtccagccataatatgctgtgctgaaccaaatctcttcatccaattctggtacttcgggctgttaactacagatgcaggactcaaatggataatacaattgaccaccttagaactcctgggtgaacccgagaagtctgtgaaataattattgagatgatctgtggacaacaactgttgcaaatgagactcattggggcaatctacaaggagtacaatgggaccgggaagagacgagtccattacatcacttggatgaacctaaacagaaattggagaaataaaacttactttcaaaacatcaaatgcataacaaataagtaactttattatgtttctataactcaccatgatatcttggtgatctgactttactgattgtccttgaacaagttgactatactttggcccaggtcgaacacccaaagccagggcttttgctttgttgaatctccccttgatttcaggcaactcacagacatatactacagacatatcaccaggagttggttgtaaaacaatagatgatattttcacatctttgacatgtttaagatcaatggagctaagtgaggattcgaagctctctatatctaccaaagcaccatttgagatgaaagacctcattgtgtcgactaaatacttcagatttgatggaccccgtacacttaccttaaaaatatgagaaaatacaatttaaaaaaaaaaataaagaaaaaaaatagagaatacagttatccatcttgaatcaaatttaaaatagataaaggagctaagagaaaaacaacaagttaattaatccgatactcacaaaacatctaacaccatccaaagtcaaaagcacacctgcaatgcatagataccagtataggggacagcaacaatcactctttaactaattatttaatggctaattagacattttgccccctgaactttgatatgtactaaattatgtccctgaacttttaaggtcgttaaaaatacccctgaactattgag

SEQ ID NO: 114071 - DNA, 1498 bp, Cannabis sativa
  modified_base (29)..(31): a, c, t, g, unknown or other
  modified_base (1445)..(1471): a, c, t, g, unknown or other
atagaaaagattacattgaaatagagttnnntttagggcacaaagcccaacagccaccacccgaatgctcgatgacaattggatcccaaactgccactttctccctatatccttgcctaatcaccttatccatgtctctaacctcctcctccctgatggtggctagaacattacccttttaaacaaccactttcctaatgatattgttcatgctatcctgtctcttccccctcttgacactaatcacttagatactcttttctggcagcataccacctcccactatactgtcaaaacaaggtaccatctagccatatccatagctaatgtttccaagccttctgcctcaaacactgacctcctcaagtcttggtggaagtccttctaggtgcagaacattcctcccaaagttaagcattttatctatcttctttgttctgacacccttcccactattgttaacctatatcacaaaaatagttacccttccccaacttgccctcgttgtgacctgcatcttgagtttatccagcatgctctatttgactgtaagggtgttaagagagtgtggtcaagtacaatttttaaatagactgttagtgatttgagaggaaaaaaacatcattgatatactgctatgtattaaatcccactttcctgataattttaacctttttctgtatatacttttgaagatttggaacaataagaattcttttggggtaaaaaaaataatataaataataaatagtgtaaaatggtcatttctttacaaattttaaaataaagacatttatttataatataatttggggtcatttatcatattttccaaattttcttcatatatcttttaaatttttcttgtacttttaaaattttccaataataaattataaagataatatatctttttttatttatattaataaattaatattaccctctgaaagagaagtactgaggggatcattcgagattccttttttggaaaaattacactttgcagtttgcaccatcttttagaataaaaataataaaaatccgtatttaccgcaaatataattaattacaaacatacaatacctgtttttgtaaaaaaaaaaaaataaaagtgtttacaaacatgtaaaaagtttctataaataaatttacaaatttgtaaaagcttgattacaaacttgtaatccatatttttgtaaatataatttgtatttttgtagtataacctatttttgagaatttttttaaaaatttcagtatttttgaaattcctttttttttttaaaggaattccaatatagtgtaatgttgtaggactatgcaatcatacaaccagaaatgggctggtccaaagcccatttaaatgtgacccaaattattgagcttagctgaattttcttgtttattctctagggaatttttattttggctaattagtaatnnnnnnnnnnnnnnnnnnnnnnnnnnnaaatcatgccccctgaacttttttagc

SEQ ID NO: 114072 - DNA, 2594 bp, Cannabis sativa
aaaaccaaaaaaaaaatttaaaaacaaaaaaactgaaaaacaaaaaaaaaaaaaaaaaagaaagaatcagtgaaataaagaacaacccagaaaatcaaatagctgaacacttcaaatgataatcttaaaccgtaacttaaacaagaaaagaaaagtgtataataattagataaaggatagcgagaatgagctattacccaagccaaaatcgggatcaagtaatccaagtgtggaagcgataagagtgatgaatgaagagagaaaagggcaggaaattgaaagaaaagagcaagaaagaaagtataatatatattcgatcgaaaaggagagatgcttaccctcaaaggtgttcgtttgatgctccaatatttccaattcctcaaaaagtgcttttatttatttatttattttaattatatcttttatttcttaagattgcgattgagagagggaagggaagtgaagaaggcctctgtgtgaatgcaacgtggacgcgccaaaaagaggaaaggggaattaaatttgggtggattgtctttgagaatatacgcacatttactatattaccctcacattttaaagccacactactcatggttgctcattttgtccaaagggtactttggaaaatgttgcaattcctttctaaaaaaatttatagtattgcaattctaatttagggcttcccataattcatttcaaggaatttagattaaaattttacaaatttactcgtataaggagagttcaaagaatagtagaagacgaatggaggcagtggagcttctactaggagtatgttacacccttttgagatcgaagatgcttggcactgcaactgcaacgaagattttagcaacactcaatgtcatttaataattataatgaagatattcatatctcttcttattttgtatgtccttcctatttttcagatttgatgctgttttaaatttatttttattaaatgcttaaatagtttagtttcttttaacaactttcccatgtatggatttggtagtaaatatatatttatatatatatatatatatatatatatttgagaaggatgatagtaaatactttaggtgtgaaatatctacattcttaagtaggatggttttgatgtgtatatattgttcaaaaaaaattatcatctattattgttgttacttattcatagtgttagtttgctgtattgattggtttttttttttgtcatttttcttttataacaattgtattagcacaatcttcttccaaaaacaattcttctttaaaaactaagagcataacacaagagctttggaactctctagggaattctccctttcttctactccttccatctttcattctttctgcgtgatgctatacctctccattttctttctccaatcatcatgctttacctattttcccatgattactctgcatttaatgtataccactcctatctctgatcgagacccacatttaatgggttttcaaaaaattcttggtttctctctcccctcggatctcttcattcatttaattaccgccattttcttcaggcgaaggctcatcatcatggctctaggcttgcgtagatttgggctaggagatgctaggacaactttggcatctctccaccttcctcttcccctgctgattttatccaggtactatttctatcgtcctatctatttaagggtgcagtttttcattaaattttacctctcatcttccctatcatccctattatcgtttagccctccaccttgcatgtttctagccatgtccacctcttctaaaaatccagttctaaatatctaacttactaaagaagaagccttaatctatgagtttgatcatgtttctcttcatcatgaaccccaatttgagtcctattgcttggttgtgaaaatcctttcctccaaaactatcaaacctgaatggatcagtaatgctatgaaggaagcttgaatagctcgctttctttttacttttttttttttactataactctggccttttcctggtgtgctttggatgtgaaggggatagaagaagggttgttgaggttcaaccttggcactttgatcgatccctgatgctctttgccatccttgatggctttgacaccattctccccactcagctcaggtacatccctctttggatgcaaatccactttattccctttggaaataggtcgtacagtctggccctgtttataacttatgctatacgtgatctcattgaggttcaactttcttctctttatgactctattattccgtttatgagaatcagagttctccttgacactactaaaactcttcatagaggaatgaatatctgttttagaaagttggctatcacaaaatggctcaagtttttgtatgagggtatccaaaactattactaccactgtggcaagcttgatcacactcacactaagtatgataggttccatcagcacaatgacacttatgcctatcccatatctttgagctacaaagatgttgggatttcatgccctaaataaaactcatttcaatctaatctgatttgttatcaatgaaaattagaagtcatttatgtttaca

SEQ ID NO: 114073 - DNA, 996 bp, Cannabis sativa
ttaatataatagcttttaaggagtatcgctaactaatcgcaacgcgacatgttgcaaaggtactaggcaccattggtgcctaatagcaatactcccgtatataatatgccattaattgggctattcactgcataattaatgtgaccataaattatttcaacatattttcctcacaagaaaaaagaaattatatatacaaggtatataaataaaaataatttagtgtgatatacaataagcatttatttttctcatcctctccatcttaactcatctatttccacttaaaaaaaaacccctcatctactttctatcttttaacattttttaaaaatttattataaatttaaagtgaaatcatgtaaattttacatttaattaccataaattattttgtcttctagctagctagagtccgtacattgtttcttatatgaagtttccactaaaatattttgttattagacttaacagtgatagatctaaaattcaaagtgaggagaataaacttattaaaaaagaaaaaaaaagtattattggtagatttaaacattgacctctattatatatacaatctagcttacacaaaaattgatattatgtctataaatattacttacacaaaaattaatattaagtatctataaatattatcttctattacaaattactatgtattgtactaactaaaatgcatgtataacatatatacggcctcttacttaacatcatactaatgtaacacattgttgataattaatattttcttatattatttatcaatatatatattaaaattcaaaattaaattatacatatatataccacgtttggtgatgtttggcaccttaaaatatctcataatatttctcctactaataaaaagatctcataatttatattaggctaattaataattttttcccccgaactttgacatgtattaaattgtgctcctgaacttttttggctgttaaaaattcccccaaactattg

SEQ ID NO: 114074 - DNA, 2322 bp, Cannabis sativa
  modified_base (47)..(47): a, c, t, g, unknown or other
  modified_base (74)..(74): a, c, t, g, unknown or other
gttgcagcgctagttgcaatataaatttttatgtagaattctgtaanaatgcaaaaaaaaattattttgaagtntaaaaataaaaaaatttcatgttattatttatattttaggatcttattttgttaataacccatattataatttgattcaactttatgaggatatttattataagttctaaactggataagggtgagaggatatttattcaaatatggatataggtgtaacctgccatacccatcatattaccatattaacacaatttggaaaataataataattataatatttattaatataatttggataataaaaattattttgtatttattatattattctaatttatcaaaaaaaaatttgacaattaaaaataatttttctttttgtaaatgaataattattaaatacccaacattaaataatttgacttttttctatttaatttatatcttgcattgaagcatattttttttaataattttttacacaaaatttacaaaacaaataactaaacgtatcatttaaataataattagagagtaaatatgatagaaaaaaatctatcaaatcaaatttttttatccacattaaatgtatatacaagtaatctatgaggtgtcatgtaataggaatacttcaggaaaaataggaagtaaacttgtgaaataatatatgataattatgattaattttctcaaaataaaataataattatgattaattttctcaaaatgtatatacaagtaacaataatttaataaaaatatttatgtaaaatatattaataatcaaataagtttgatgtaatgaaaacaacccttatcaagttttagaggttttaatttttattttttattttaattttgtgggttgaatggaatacctagtccaatacaactttgatgtaatgaaaacaatttttattttattttatttttttgaaagcaatttttatcttatttttggtaagaaatgtaaaccgatcgtacttgtagtacaatagtacaaaattagtatgaaaaggaaaaataattctttagaattttctactcaaaattattattattatactaatttatcactacatatttaacttaaaggaaataaaatagtttgttgttactcaaaggaatatacttttaaatttagtcgcatagtgtaagataccaagcatattctaatcaaatttaaagaaaaaaagcagattctcatacataataaaatggaatattggcaacaaaattatctgaaatatacaagtttacaagttctcacacttaattctataaattgatttttttttttagacaaaaccctctaaacacacattttattttggtatctactcttccgtacccgaaatattagtgtcatggtagacgtgtcacagtgtatcctgatgtacatgtgataaatttttaatagtttgcacataatattaattatttaaatattataaaaaatatttaaaattttaaaaaataaaataaattacaaattttcctttttttttattttcttcttcttctttctctctaaaaccatgtttctttctcctcctcctcctccttcttccaaaggacccctcccactctcacaacgctccctaaaaccttaatttaattttctaaaagtataaatccaaaacaagaatccctcccactctcatgattctccctctcgttttcttgattagtcccctcgtcccggagccaacatcgtccaacaagctaagccctagaatctctctccctctccttcactcacgattccctttctctcactcacagattctcaaatctcgagaaccctagatctcgagaacctcaatcgacagagaactctcacagaccccctcgtcctcgatctcactcaaacctactcacactctcactttctttcacactctctttatcttctattgtttttttttttctattttttaaatatggatcattattttttttagattggtagttgtgatagtggtgatagttgttgtggtggtgataatggtggtgcggtggtgataatagtggtgtgagtggtggttcgatggtgacgattgtgttggaatgtagatagtggtgtcatagtgtttttgctaagaagaagaagagtgagaagaaagaaaaataataaaagaatggaaaaagaaaaaaaaaataattgtttagttatttttaatttttttatatgatttttaaataattttaataatatttttgtaacgtccctgcttcaagtctctattgggcccttacacccacggaataatgactcttatacacgagtacgtcactctggctgttt

SEQ ID NO: 114075 - DNA, 1612 bp, Cannabis sativa
  modified_base (49)..(55): a, c, t, g, unknown or other
tattgtattaattattacgataatttttttttaatacaatgtaagttgnnnnnnntaatacataacaaatggtctgtattagcttctactataacatttacaaagaatccgaggtcaaccctaatctctgacccggaccccgacaagaactcgggacccagactcaaacccgaacccggacacaaacctgaacccgaagccaaacctggaccttaacccacatgaggacgcggacccaagacccggacgcggactaggaccttgaatgcggacccgagactcggactcaggtgcccaacccgggaccttggacccggactcaaactgggatccaaatcgagatccagacttaaaccgggaccaggactcgaacttggacctgaacccaaactggaacttgagacccagacccgagatccagacccgacacgtagcctatgtttgcgtcgagtttattaaaaatatattataactttacacaatctatcaaatataatatcaaatataatacaatattaaataatactaatacaataaaatacaatataacttaaaaaaaataacctctaaatgaacaaaaaaagatcaacacttgtagttgtagctaatgattaatgataacatgtagtttagataagccccacaacctgtaataccatacattaagtaaacacaaacaaaagaagaaatgttgcttttttatatttgtataggtaaataagaagaaaaaacaaataataataaagaagaagataagaatagaggtgaggaaggaagatcaataatgcaatgtctaagctgactggctatccacttatcgtgtatatgggagtcttgcttcttcctaggtagagtggtaatttgggttagatgcaataagacgactcaaaattcgcacaaaataaataagtttaagtttactttaaatgagttttggtcattttcaaattaattacggttacctgtttattaaacgagtcatttttaaattgatacatacgtttaatttagaaataacacgataatatataaagagtatacatttttaaattatatttattacacataaattatatattttttaattaaataaaacataaacatattaaattacgtataaatgtataagattttaaacatgttaaacttgttataaatatgttaatgtattataaattaactaaaattaaacatgcttttttatataaataggtttaacaaattgatcagtttgtgttttaatttttaatatgaataataaataaatcaaatttagatttgacatttgctcataaacaagaacgtatagtcctaaaaacccataatgtatagtagccttaaacatagatgagttaagcctgtaccaaatgtttacttagtttaagggtctaaaaatttgtttttcctttcaaatttatatttttttttttacaaattttaaaaaatactatattttcttctcaataaaagtccaataatttatttatatatatttatagggaaattctatctaaaatacacctccttaaaatagatatattgatacacccctctgttttagcacccgaaataattttttagtcaaattttttctcatggtcatgtatgttat

SEQ ID NO: 114076 - DNA, 1099 bp, Cannabis sativa
gcttttagagcataaatctcaacacttgtattgaaatgtaactacataaagcacatcaataagggtgagtgaattggtaatgcatacagtgccacttttgtaaactagcaaatgattattgttgggaagaatcaattttgtatgaggaatagaatgaatgctttggaacatttttatgttatagcaaatgtgcctagtggcacccaagtctactatccaagaatcattttgaggtagtatagaataattggacaagacaacacctgtgttacatgttgaagttccaagattcgtggtagccataccaggtgtttgagttgcaagaagattgagaagctactgctattgattgacagacaactgtggaagtaaggtatgattgtcatttgtagaaggacaattcttgtttgttgtttacacgtgattggccacaacatctcttggcttgcttgtcttgttataccctggagggtagccatgaattttgtaacacttattgatagtgtgcccatggatattgcagtgagtgcagaagggtttgcctcttcttggtggacgagacttccttgagaatcagatttgtttccagtagccttgtctccttgaaaggcaaaagccatatttggattggggtctgctgagggattttgacttcccctttgattctctaactgtgtctccaaatgaaaaactgtattaattttaggtaaaggatccatgacaaagatgttacctcacacttgtgcataaagatcagacaatccgattatgtaatccatgctatagtgttcttggagtttctttacacctcaacaggtgcaattcgacctgaaattagatagttgttcccatatggtcttgagctttataaagtacatgctcatggtctggttttcttgcttgcagttcatgagaccctttcttaaattgtagatgtgagcacaattcattttgccgaaattgcactttgagatctctccaaattgttgtagcagactcatcatacaaaatactgttgggttttatgccctaaataaaactcatcttaatataatcagatttactaataaagatcaaaaatcgcattttatgttgcatg

SEQ ID NO: 114077 - DNA, 2427 bp, Cannabis sativa
agttcctggtaaaataacttccaacatacccaaccaactctaagtcttgcaaatggcagtcatcaatagcctgctgaaaccccgacagaagccagtcgggataaggattaccaccccgtttgtcatcatgactaaaaacattgttgaggtcgcctataatacatcaaggtaacgatgattcagaggacaaatcatgaagtaaatcccaagttttacgtctgagatgccgattgggttcaccatacatctccgtcaactgccacgagggtgtaccagaaactgtgattttcaaatcaatatgtgagtttgaaaatcccagtaaattagcttcatcatcaaatctccaaagaagagccaaaccaccactatgtccttgcacatcaaccataaataagccttcaaagcccaacgaaatacaaactctctccatgtaatctcttttactaagagtctcacataaaaagataaaattgggtctcttttggattaccaaatccttaaggaattgtaaggcccacgggtttcaagcccatggcaattccaactgagtaggttcataattctcggtgggcatgaaaattgttttttgacccctcaataatatcattatttatattaccaacattcatttcctcttccatactaaccggcccataagacaggcccaattgagtcatttgacgtttattatcaattaccacaagcatattacttgtgacagctggcaaaggagattggcttgtggatttattaaaatccttgtgagtcagcgtgtgagaatccccaggattatgggatttattggccgaaagagttgggtcaactctaacattaatctccccaaaatccatggccccaacattaactcccctgatcttctccatggctgacgtgatcccagctgtgttcgtagtcaagtcatcctcaacctctggtagcaacagctcctcgccggcgtcaataaattccgagtagctgcccagccacttggctctgatcttatggttacgacgatgtggttgtgctctcatgaacgatccatatggcttcactattttctcaagaggtgtagtgaacaaagaaggacaatatccctccgagtgacccaatatcccacatatgaagcaaaacaatgagacatgttcatatttgaaattgcaacagaattcctccgtggcatcctttttaactctcctcctccttttcaaaggcttattgacatcaagtgtaaccctcacttgtagataaattctccacaattcccatgaagttcttgggattggactccacaaagtttccaatataattacccatatttttcaccacagcctcggacatgaatcttggacggagatcatgtagttgaacctagatacccacattatttagatggacaaccaatggatcatcacccagttttagtcgctggaataccagtaaaaagccattaaatgtccaaggacttttttcaatcaccctccgtatatcgacttcatgataaaattggaacaaataccgattatcatctagttctttgacaaacattctgcggcctggttgccataacgaggccatcaagtgttgcatggtgtcaaaatcgatacttcgttgggctaagaaccgtcccaccaaacaccagcgatcgtcaatagttggtgtcggttgaatagtctctgagaaggctaaaacatactctttctcatcctccaaagtaatattagctccttgctttgacatcttgaattctcatactactagaagccataaaaaccaactagaacaaaacaaaaaatggacaccagaagcggaaaaaccttaaacaatatgattaaaccaacatgtcacaaggacaagactcagtactaaagtaatattaaatgatgtatacacaatttagaaatagatgggtgcataattccttttttttctctaattataagtacacactattaatttaatagttgcagcaaaagaattaataataagatcaaaaagaattttaataaaaattaaacattataattattttttaatttttattcaactgtgagtaaaatattagtgaagcaattttattatattgatataattttgataattaagataataatattaggcctaattattgtataaataaatcaaaagataacacttgttgttaaattataaaaatagtacaaagaagagtgcaaaaaaaaaaaaaaatcatttgcactcctagttaaacattaagtaaaaaaaaaaaatcaaataaatttgtaaaaaataaaaatagtaatcatttctaaacttttaattactatatatttgttattttttttgaacaaaaatatattttttattatctattctatataaaatgtggctacataacaaaattcttgatttataagaaattattgggtgacttttttttaaataaaaaaa

SEQ ID NO: 114078 - DNA, 5866 bp, Cannabis sativa
aattatatagtttatttatttacaaaaataattaattttagttggtcagaacactagagaatcaatattcaggaaaaaaatattgttactggtatagttattagtgctagctggggattatggcctttaaattttctttaactaatgttgtaacaggctcttttattaatttatttttatctttccaattaattggggttatgggaaattccaaagtttgcactttcttgataaatccaaacttcgcatttatcattttaacaaatgtgataacataatgatttggaaatacttgcgccgatttgtgtatgttgatgtcatattttactttaaatataaataaaaaaactaagttattaaaattagtttttcgatgtagacacatgcagccagtgaaaaccgacaatgatttttattttattactatagtttttttcatatctatctctgtctatgcaaattgagggcgcaacttgcaaaagttatgatgtcactaataatatggacactatcaaaaattgttattttgaataataaatttttagtgatataaaaaaatattacttataattaaaatatattatttagttataagtgtcactaatttaattttagtcacactaattattttaattaaaaatatatttagttaaaatactgaatgtgtttgtactaacgcggtatgaaactacaggaggaggaaagaaggtgacacgtgtggaagttacaatggacgggggtgagacgtggcacgtgtgcacgttggaccatcctgagaagcctaacaagtacggcaaatactggtgttggtgtttttggtctttggaagtggaagttctcaaccttttggtggccaaggaaatagccgttcgagcctgggatgagtcccacaatacccaacccgagaagctcatctggaatgtcatggtacgtcagccttttattaatttttctaattctttagtcaaataaatcgttctcatcagaacatcaactaattacgacacagtaaattgtagcctaaaataactcatttattaaaattatgaaaacctcaagtgtgtttgtcgtgtctgtactgtggaccaaattggtccactgtcaagtcagttacactgaataatatatatgcccctagttgatgatattttttttgtgccttagtgaaatttaatgatcatggaaactcaattttttttttattatcttactttattaaatatatgcacaataattttgcggtaactgattaatatttattatggtatccaactatagggaatgatgaacaactgttggttcagagtgaagacgagtgtgtgcaagccccacaagggtgaaattggaattatatttgagcacccgacccaacccggaaaccaatcgggcgggtggatggcgaaggagcgacatttggagtccaccgatacaaaccacactctcaaaaagagtgtgtcatcaccattcatgaacaccacttcaaagacttactccttatccgaagttaggaagcacaactcagcccagtcttgctggatcatcgtccacggccacatctacgactgcacacgctttgtcaaagaccaccctggcggcgcagacagcattctcatcaacgccggtacagactgtacggaagagttcgaagccatccactccgataaggccaagaaaatgctcgaagactaccgtatcggcgaacttatcacctccggctacgcttccgacggctcttcaccgaacaactctgttcacggctcgtctaatgcgctctcccacttggcgcctatcaaagaggcgccgacaatgatgacacgtgcagtggcattggtacctagggagaaaatcccatgcaaactcgtcgaaaagacatctatctcccatgacgtgagagtttttaagttcgctcttccttccgaggatcagttattgggcctccccgttggcaagcacatctttttatgtgccaccattgatgagaagctctgtatgagagcctacactccgacgagctcggtggacgaagtgggcttcttcgagctcgtggtgaagatctacttcaagaatgttcatcctagattccccaacggtgggatgatgtctcagtatttggactcgttgagtttgggatcaatgttggacgtgaaaggcccattgggccacattgagtatttgggccgaggtcagttttcggtccatggtaaacccaaatttgctaagaagcttgctatgctggcgggtgggaccgggatcacgccgatttatcaggtggtccaggccatccttaaggacccagaagacgagactgagatgtttgtcgtttatgccaaccggactgaggatgatatactgttgaaagaggaacttgacggttgggccaggaagtgtgacaggttcaaagtgtggtatgtggtggagagtgctaaggaagggtgggaatacagcacgggcttcatcacggagggtatactgagggagcacattcctgaagggtccattgacactttggcattgacttgtggaccaccacctatgatccagtttgctgtgcagcctaatctggagaagatgaattatgagaaggattccttgttaatcttttagagtgagcgagagatatatgataaagaaaaaaagaagaggaggaagaagaagaagaatgaaactgtatatatattaataatatatatatttgggtaacaagtgcttctagacatgatatatatgttgtattctagactactgttggtaattacatattctttcttatttaagtgttcttttttttagtcgtacgtgaacaagctaatgtatatacttgtattaaagtttattatattttaatgcgaaaaagtcaacttcgttttcttaaatttggcaaaatcataccaatatagcgcattatgagtccctagcaatttcggaactgatattatatcaccttcatagtagtatacccaaaattttatttattgggaccagagtttaaaaatatatacataataaacataaagttgaagagaaattcaatttttcatacttataattggccaataatttacttaaaaaaaaaaaaaccaagttgaaaactataaaaaattacgttcattttcccttaatctcaaaaatacccctgtcatataaaaagtctcattctctctaactcaatttccctctttccttctcgttttcccatccaagagaaacccaactcccactgtcaaccttgtcgcagtcctcgccactggaggtacaattttggaagttggagaagaaacacaattttcgttacattttagttcatggtgaaaaacattaatcggtaagtgattttatttaattgttattattattagtcattttgatgatttaaaatattgcttagaaaatatttgatctgaagtttctttgtgtgttttgctttttttttttttttttttttggtaaaaatagagttttggtgaaatctatattttttgggttctctgtaattttttttgtgaatgccccgtagagtacaatgttgggtataatagtagtttaatatggaagttagaaataaaggttcaatagcgtacgacaaagtataatagtggaacaattacttaaaatttatataaattttatcatagcataaatttaaagcaactatggtactactattgtactagtatcctcctattatacatttatcaactatcataccactattgtaccctataaaatatttatctctaaccagtagattacactattatcctacacaccattgtaccctatcgagtattcacaaaaacttcagcaaattttatcatgtcaccattttatcatgacataaattttaagtaacaacttaaacattatcgtattatccacctttatcaactatcgtactgtatcgaacctttatccttaatttaaattacactattattgtacccaacaacgtaccctatctgcatattcacaaaaaaaatcacaaaaaatccaaaaaacgtagatttcaccaaaaacaaaaaatacaaagaaatgacaaatcaaacatctaaacaacattttaaatcatcaatatgatgactaataacaccaatatttaaataaattcacttacccactaatgaatcgaaatgtgacgaaaatagtgtttctcacccaactcccgaaaatatacctcaggtggcaagggggaaccaggtgggaaaggtaaatggaaagagagaaaaaaggggacttttcaaatgacaaggatgtttctggattaaggaaaaaataagcactaatttcctatggtcttcaacatgggttatttttaaactagggaactaagccgcgcttcgcgcggtgttgtttaacatttgtaaattatataaatatatgtatatattgtacttattgagtaatataatctaaaatataacatttaaatgtgtgtattataaacaaagttataatattgaaattaaaaacataattttaaaatacatagaatgataacaattttttgacaaatagtaaatgatggaattaacaaaaaaattgcattgtgtttttataataaaataaaggaaaaagataacagtttctgaatttaatactgggcttgttctgatgatatagttatttttaaaatattttttagacctttttttctttgatagaaaaaaaaaacaattgagcatactattcatgaaagttttcatattttattttgtggtattagtggaatgtttttctccacaaaagtgaatgtatgatgacaactgtaaaatggctcgtcataacattatatgtttttgaaaattgaaaaatgagggttttatataaaaatattagcgataatatctttttaggaaatgtataataaacggattaattttaataaattatatggatgttaaatttctactttgaatgaaaaggaaagtcatgatttttcatatgactaattatttccataataaaatgtgtatttgtcttactattttgtggtaattaaaatgataagtactatatgaagttggttgagcgctcacgcgatcgttataatcattgaaaaataaaattccatttatgattatttggttatttcagaaattcatatctttagtagttgttaatattgttactaaataagtgaaatattacaaatcatgtgtttgctattttctttttatttcaaaataaaaaatggaataattttttattattttatatataatgatattatatatattcaactaaaattaataatttaaaataaaaaaaaaaaatctaattttttttttatttgttaaaaacttaaaaggatttttttttgaattttcaatatttgagaaattttgaaaaatgcaaagatatgtattgctttcatttaaaaaaaataataagggtaactaagaaattatctttaattattttaaatataattaaatgaaaattacaataaaaaactcttaaaagaaatacttttacatgaaatacttgacaaagattaaaaaatgtaaaacatgtgttttgcattcaaataaaaaaaacattacaactaaatgtgcataattaagttcttcaattacctacataaaaataagtaaataataataacttcatggatgtgataatatttttttaggaaatgtataataaaatgattaattttaataaatgatatggatgtgaaatttctactttgaataaaaaggaaagtcatgattattcatatgactaattatttccataataaaatgtgtatttgtcttactactttgtggtaattaaaatgataagtaccatatgaagttggttgagcgtaggggtgttcatccgatccaatccgcactaagtgcggatttcatattttggatccaat

SEQ ID NO: 114079 - DNA, 1423 bp, Cannabis sativa
agggtcagtcatcagtccatgaagtagccagggtgatgtactgtgtataagagtcattattccgtcggtgtaacgacccaatggaggctttaagtggggacgttacagatgtgaagctcaaaaaccctaaaaaatctccaccaatctttaaagacttgtcaaagacaacttattgatgaccaagtggagaagccacatgagtaccgacccttttccatggccagtactcgcttatggagctatctctccaagggtggagccccaacaacatgcacggttcgttctctctgagatggagcctatacaagattgttacatgagtaatatgtacttccttgtgccaatgttcacctaagtaatttcttacacgagtacttagaatctctcatggtcaatactcacctatcattgtatcctgtaagggagaagcccttttagcgcatcctcaacttgtctcttgaagacaaagcttctagaaggttttcaaagcttaaatatctccaagattagagtagatacttgatttttatgtaacttattaaatgctaaaatgcggggtaaatgtaacattcccccgaattgtggggtaattagtaacaaatcctatgcctatataagcataaatctagggaagggtctatgatctgttctgattccacgatggcgtctctctatcttcttatctttctatctctctttctattttcatgttttcacatactctatttcccagaaacacttcgtcctttgctcactataaaagaattaggtatgttgacattttcttctaaaatcaatcacatagagacacttaaagagatcttattaaagatctttctcgttgtaatccactcaagcacactcttgagaatgtaactctagtgtgtttgagtcgtgatcaatataaaataacaaatagatgtagatccattaccattacgatatggggagtgaactactacaaatcgttatttcttgtttcttacagattatttttgacaaccgttgtctcagcccagtccacttttttattataatttttttaaatgtagttgataaaaaactgcgtcaacatatactatgtataattcttacctgtgttacatattttgttagtttatatacaatgtatatatataaatttaaaagttttttatgaaataaattgaaaaaagaagttagaggatatgataaaatttacgataactaattatctccttaggataaccacttactctatattattttttcataaaatggctttttctaaaaaatttcatatttttacacatttttacaagaaaacccactaaaatgaagagcccattgagctcttgtactcctatacaaaaaggggtatttacatatatttaggaacaataaaggtagtttacattaggactgtacatcagtcggtttgggc

SEQ ID NO: 114080 - DNA, 1397 bp, Cannabis sativa
  modified_base (1335)..(1347): a, c, t, g, unknown or other
acatatatatacacatttatttatatttatttcttattttttgataaaaaaaaacatactaattaagggaaagccatgtataatagaaaagaaaatataacaaaagacacgtgtataccgtgtacgtatatgtgatagtgaaagaaaacctaacagtggatattgatatgtattattattgctatcgccacagtagcttgatccaaaataagtgtataatactttctttttaatatatatataaaaatataaatatatgtatattagagagagagagagaatggtatgatgataagaccaaaataaatgagacggataaatatcttatatcttacattaatttccggacgttttcgcacgtttggggcatatgataatttgttctcatatgcatatctattaaaagaaataaaagatactatagccgtgtttagaatttttctgtgttaatattattagattactacaaaaaatatcacttttatcatcatattttcatgctggtaaaaatttaatattgtgctggtaaaataaaatttatttttgatatattagcaaattaacgttagtattagaacttttatcaacacaaaataaaaaacgttggcaaaaatagtttttcccaatgcataaatgcactagtaaaagttagattttagccactgcaaatatgcactaataaaacttagacctttatggcaacacaatttgcgaaatacgctggtaaaagttatttttaccagcataataacgaattatgttggtaaagtgacatttcttgtggtggattaatttttttttaattaaatgaattccaaattcagacttaattatttttagtacaattagctgagaatataatttagtcaaatttattatataatttattgatcaaatttggtaaggtacctatgaaatatgtacaattttaaaatactagataaatattattaaaaaagtagaatacaatttttttaaggtaccaaataattataaatatatttatttccagcaaaaaatattataaactttttctacttgttaattgatgttataaattgaattaaagtaatcgaaaattcttagaaaaaaaatatataatctattactttttttttaattatttgaaagagatttgttttgcaattattttttccccattgaaacaaatatttaataaatagtgatgtttctataatgcacaccttcctaaaatacttataattatatgagatattttgtaaaattttaaaaaattcaaaaataaaatacagagtattcaaaataatttgtttaaggcctgtataaaataaaaaagtcatatatatatatatnnnnnnnnnnnnnttaaaagtgcctatctaacggcatttattggtttaacagaatatacttaa

SEQ ID NO: 114081 - DNA, 2985 bp, Cannabis sativa
ttcaaacaaaagtactaaaatctaaacacctttcactaactcagaaataaaatcagaataaatcaaacaacataactcatatggacatctaaaaagaagggaaatttcaattcaaaatcaaaaaactcaccacgcaatcaaggattcggtccaaaccaatagaggatttgatatatccttcttattgactcacatctgaatatcaccgccatcttcattagcggcctaaaggatcaatgcaccaaagataatcaaaagctgtatctcttataattccaccctcctccccaagaataaggtgatctccaaagtttttttcacacgtactcccttgtctatctatcctagggtaaagggatttgaattttaatttagacaagagatgtgaaattaaccaattattctatttaactactatgtatatatgaaaataataattgtatattaatatatttttaaatctcaggatgggctttagccctccctcaacacccctaagtccgcctatgccaatacccctacacggctcttactattttttttttcctttttatagtgttttatttatacaaataccatttacacactctactagcatgcatgatgacatttgacaagttttacactcaatttatttttcctccctttttatcatcattttctttttattttcagtttcttttttattttttattttttatttttgttttctgtttgaaaatttctcccattatcaaaatcctcttttcatcaaaaataaaaaactaatgttatccattatcttcaatttccttcctccatcaactgccaacattgttccttctttttttcttcttgttttataaatagccattactcgatcttcatttgttcccatcactattgctgaaaaaaccttcaaaaataggtattaaatctctcaccaacaaatctaaggcaaatggcccattgttgaagatgatgattcacactttgctttgcctacgaataaacgtggttgtcgttctgttaagaagaaatcgaagagtaatgttgctgaaaacatttttctccctgaaattaagaaagggacgaatcaagctgatgagagtccgaaggtttttttctagtttctttattgttttgctctaactttgcaattttttttgggttgtgcatattcttttgattttgttctagggtttagattgtttagttgttttaatgttttgtagtgttattttatcatttgtgccaatgttgaattctcacctttctcaacttgtaatgaaagttttaaatataatgaatttgacatacaacttaaggaaaaacgttatgcaactcttaaaaaaccaatatagtaggaattttagtagcaatgtattttgaacatggcatacaattatctagaaattgttatgcaactttaaaaaaatcattccagtatgggaaattaatagaaatctatcaaagtagctttgtcatgcagtaagagttctcatagaaatttaaagaattcaaataaaagtcctctatttcagttgcagttgagtattttcttgggtttagggtgcagcctccacacgaccgcttcttgtaccaacattggtcccaattgtacggacccttcgccccacaaggaagagccttcttaggggcctaatagtcaatattcttatgtatttttaccccaatagagggtgggctttttgcaaaaaaccctaggcaggtcatgggtatgcccatacccgtactttagcctatataaactcctttatttcctcacaaaggggaccaaaaaatttacatagtctatgctttgctaatatactctctaagctttcattttcttcaagagaaacctagagaaccagagttagggttttattgtaaacaccacttgtaatacatttatatgcctataagactaatatattgactcatcaactaaggataattaatgcctgaaccacgtaaaatccttcgtctcatttacttaacagtcatttaatttctaaagccttcatttaattagtttccaaaaatatcagtgaacattcaatgatctgctttgacttctctatatatgtcgtatcagaataatggaagaacacatctcttcaacaaaaaaaaaattcttctcttcaaaacttctatcgaatttttcagagcaatttgctggggtgtaatagagcgatatcgttcgatgtagaacaattcgtacagaggctattttatcgtggggatgtcgtggttgcgagactgtcatgcacacttcaggcagagctgcaaaatgtctaaaagaaagtttggttcgcgattcagctagaatcttcactcggtaattctttccaattttattttccaattttaagacagtctattctgctatggctgctactaatgatttttctggttttgcttctaacgatattaacaagacttttcattttgagggattaaattgtaagcgatggaaatagaagatgttgctctacaaagatgaagaaaaaggttctttctttctcactgctctgaagcctgtcgtctctgaaccttttaccaataaggacaaagaggctgaacacgagaagcaacaaaaatatttggactcctaggtcgaaaataaatgtatacgtgaactttattcttaacggtttatatgactgtttgtatgattatatgtttcaaaagtttatgtcccatgatttgtcagtacactggatttacactgacataataatcatcgataaagtttacttacaccttggatacgtgttatgtcctttccagggcattggtaaagtatgttaggattggatgtatggaatatacatcggactggaccgatattgacattagataagatatcataaatttgccgttatatctatctaagtcaatatcagttagttgatcttaggtcaatagatcttaatcctgagatggttatgttcgatctcaactgtgttattgattttcttagagtttttcgttaaagct

SEQ ID NO: 114082 - DNA, 2749 bp, Cannabis sativa
aggaagagatttgtacaatttggcgccttatccaattgtgtaactaacgacataccgaactccaaaccccaaactgcctcactattcactcactcatttcaccttatttttctcagtgaccaagttcaggcttcggtctcctccgcccatggctgcaacccacatttttgaatcctcactttccatctccacatcctcctttcacccttctcccctcaaaccctctcctctgttttcactcataacccaaacccactctccctttcttaacccttcaactccaagaattcaaatccatggaaacccatcactttcgatatcaagaagagtggttcttccttcggtttcaggcatctgggacgccataactggcggcaataacaacaacaaccctcgcgaagcagtttttgcaattcgacgaggaatgcttctctttaggcaggtacaaaaaaaaaatgttttaatcccttctttttttttttttctaattctattcaaaatcaaactgttgggttttttttttatcttgaagggtgatgttcttgggtctatagcagaattcgataaggccattgaattggaccctcgtcaaaaggcatgtatgtctattttttcacttatagttggaaaatgtgtgttttttgagtattttaatgtgagcttgtattgattgaaatctccaaacagatctttggcaaagagggctatcactttactatcttgataggtactaattctgcattatttacactttgtattgaaatttccctaagtttttagaccaagattagtttagcctaaatgttataatgtttcattatcaatagggaagactagaattgaaatgtggatggagagattatttcaaatgggtaactcttattttttaggtttgaagaaggggcagagcagtttcgaatagatgttgcccagaacccgaatgatacagaggagtccatctggtgtttcctatgtgaagctcagttgtatggagttgatggggcgagacaaagatttcttgaggtcagtcatgttagattatctcctttgaaaatttttaggaagattgaaaaggtgaatgcttcatcagttcctaatgtattaaaataaagggaattaaacatcttctggcaaatggttcttacatactatgaattatctccatctttatagttatggcctgttttatgctatgttgggttcaacaattagttgagagaaacatctacttctagctcataatgtgcaaaagaatcaggtaagtattctgactttggaatgtaataactgtaggttggaagagatccaagacccgtcatgcgtgacacctataacatgtttaaagatggtggagatccagaaaaggtaagtaataagttttccattaggaaatcaatctactttatgtttgcctactgtatgatctcattgattttatgtataattaccagtttttgcatgattgttaagaatttcatatctgacttaaccatttggctctgcaaatcatgttgatatatagcttgttgctacatttgcaaacggccgagagaatgaatatttctatgcttctttgtatgccgggctgtattacgaatctcaggtttatttttaacttcacttattcctagcatgaaattttggttcagattttgtcttctgttttcttgtaccttacatttatcaggaaatggttatgtgtatgttgatgcctgattattctttggtgtggaggcatgacaagtaagaaaacaaatgttgtcttgtctaattgttacttaggtgttgtaataaacgcaaaaaccaaaacatcaaagacagaaagaactagacaaatatgtgattcaagtccatccttgatttattgtgttaatgatttattagtggagactttcaattctgaagatgacaaatgtattgcttaaacaagaaatattgctacctagttcagtagatagagtatccttcatatatgtaataatttaattatgtgaatattttggctgctttgaaattttcttataaaactacagcttgattttacatgccaatgttaagaattagctatttgatcacccatgtagaacaaagctgaggaagccaaacgtcatatactagctgcatgtcaatctccgtacggacaaaggtaataactttcaaacaaatctctctgtattatgcacttgactagttatttaaacgtccttgtatattcaggtctgatgattacatggcttctctggccaaagttcactctctttgtcgaaattgggcatccgcttgaatgatctgatgtttcgggcactttgtattgctcatcttatgaggacatgttcacagtcttaactcaatctcgagcttggtaagttgcgaaactcgaacctatactattttaaaactgaagtttgtttaccacattgacttttgatttggatgtgtactaaattggaaatgctttccttgtattccttgtaggatgatgtttcattgtttgatactaaaaatttcagtattgattagtggagtggaaggaatattcaaacctactgttgtctgattctgtggttggagctattgattttggtttgaaaacctacttgcacttattaatatgccatttgttctaaactagttgtttaatgtctgtacttgtagttgtaccaaatttaaggtggtgtttggacgtaatgaaatagaatggaatggaaaggaaactattttcattctattcctttgtttggttgcatat

SEQ ID NO: 114083 - DNA, 1747 bp, Cannabis sativa
  modified_base (28)..(54): a, c, t, g, unknown or other
atatgatatataatccaattcaatatannnnnnnnnnnnnnnnnnnnnnnnnnnacgacgttccaaacgagccattaaagaattagtatcttccatcgcaactctttggcaataagatcttgaccccataaaatgttacaccaaacaaagaagcaataaccaccaagttttgcgtctaaaagggagttgtttacaaagtaatattcttttaaaacacaattaagcatagagtgaggctgatcaataattttccaccttgttttacaagaagggtttgattgaatttagcaagatccttaaaaaccatgccacccttctgtttcggtttacaaattttatcccaactcccccaagtcacttttgctttttggtttttggtaaaagaatcctactaaaattgagctatcattgcgtggatatccttaatcgtctttttcactaattgaaaacaactcatcacataacaggagattgcttggataacaacctttagaagaattttcctaccagcttgggaaaatagactagccttccacaacctttcaatttatcctgaattttcgcttcgataaatcatttgtatagatttttgtaatattataatattctcaaaatgaaaaaaaatataatttgtcctataatacgattctctaaaaaattatactagacaaaattggtaaatacatgaataatctcattctctaaacatagaatcacaaaagaccattgttaacataatttaattacaaagttacatatttacaatatatatgcccaattatgaaattaacattaggcttggaaagccaaactacacaattctggaattacattgaaaacaatatgtacagtttcaaagatgcaacaatatattattaattaaggtccaccatgcactagttatctctcgagtatagccaagttcattataatttcctcaatactactccaataccacctcacaaattagttattgctgactaaattacaaaatgtatataacaaacatatcttagatcaagagtacatagtcaaaataggataaaaaaatctactaaagagtaaacaacaataaacaataataatatctatgttagacccgatattattattaattacatgtcattatttgtcatattataagcttgacaccaaatagcgattagcgacactctttcaaaacttgtaaaattatcataaaataataatagacgcttccatcagctctgtagaagatttaacatttgagaaattggccatgtgcttaaaagatgtaatttcatggcgcataacattgcaaaaatgggcaagggaggccggggtcacaagaattactcagtgtagtgaggtggatcatgaggtgctgaatgactataccaagtggaagaagcatgctggctaaggagtttttggaagacttgttttctatctcgatgtgctagtttcatttgtttagtttcagttattgtagttttctttcccttggttttaatgcttaggccttcactgctgtttttagtttgctctttgctatgtagacattgttttattttgatatttaatgcactggtttcgggtgtcttaacaccctcttctttatcaaaaaaaaaaaaaaaaaaaaaaaatagacgcatcattacataggagtgttcactaagtatctcaattcaatcagcacgattcaatccaatccaatctgcaaaatgcggatatctgcactttcgcagattggattgaattgaaaaat

SEQ ID NO: 114084 - DNA, 3137 bp, Cannabis sativa
atgatatggctgtgtgatttgcttgcgcaaaattttgaagttcaaatctcttagtaaggaaataccagattttgaacttcaaccagatatgcaaatttaagggacttcatatcaaagaaaaaactatttcgtattgttaaagaatactatggtacatacatcattgatactttagaaagataaaaaaaaaaaaatcaattagaaaaagagcgaataaagtatttcaatttctaaccttaatattgtttaattgctttattaacaagtcattccaaatatcagtaattcctggtaaacaccaatgcatgcaatcgacgtgtttttttcctccggctgtagatggatgggcatctgctctgaactcactcaaatgtgttatgtctagtatatgaaaatcagacctttcaagagccttgaacagatgctgattaactaagcgagcctccacatttgttccgttattattcagtgagaaaagtgtctctacctgtaaggaaataaaagaagatttaaaaatggcttgtcaaagaccgtatggatgaacttatatgcaactgtaaaagtgatgccgaattcaaaataaaaaaaaatgatttgtcaggaccaagtgaattctaattacagaacataatgacgctcacctgctctggtaacaaaggcttcagccgaggacaagcaccaccctggtcccaatcaccaccttcaaagtgtctaggtgattgcgttcgaaagaatttgattgtaccgggtcgagttctattttcaatatattttacctgacagatgcacactgttttcagtcattattacacataaaaaccggattggcacataaagcaagagttagaccacagacacattatgactaagcatgttacagaaacgcagaaaggcatttctgcaaagtactaacaataacaataacttcactcttttgttactagagacaaatgaaacaatactaaccatgtgttttaagaccatatcaagacctgcctcaggagatacaggaggaatcacaggctgagccctttcaaaaaaaagcattggagacttgacaggatcaaattttgaaggagcccaccacctgttaattgcaacactttccatgtcaaatagtgattgtaaactaccaaaatacagatccaaatatagaagcgcatagtaagaaatatgaatacatacaaagtgcatttgatactatcataactcataagtgagtaattaaagctcattggcacaggcaaaagtgaaaggctgaagaagcaatgaacaaagctatctacaaggacaattgttcagctctttggttagagaaaacaataccgcattttttgaataaatagttggtggtttcgatttcatgtgggaagctattatgtaaatagctttggatatatgatacaattgttttaaggagttcttattttcacgtttatttaaagattggggtaattattcgtaattagatgacacattatcatccactatagtctctattctacatcaataacaataataggccaataaaataccagtggcccgtgttgaagattagaatgtcatgaaaggtcagggcattttcccatgttccttctggaatatcaacatcaactctataaccttctttatacccaagagactctagagcaccaccattggcattagctgaccacctgtgacaaatgggaaaccaaagcctgtgttcaaaatgcaaatatttccctctacaaaatttcattataaagatacaaatgggcaaactacacaatagaataaatttagttcctcatctaccccaacataagaactgttcagtctgtaaaataacaaccttagcagaggaaacttacctaccatatattatattatgcaaacttagagtgcaaacagtacaatcaggcaaataatttctcagtcatccaattcttaatcccacaaaacacgaaaaaatgtagtcaaaaacgaaaacagcgaaagaaatcttacctaccatatcgagctaaaaggttagttcgatgataagcaatggtgagattatatcgaagaaatgtgaacccgcggtcggcaccggccggcctccacttcttgacatcatttgagacccttttgagagagcagaaaagggacacaaacatattcctattcaacgaatcaccgacaaaccctgtactgtacaaaattttattcaagttcagaaaaaattgaaacttccccaaaacaaaagattgactcaagctaagtaccaatggcggtgtccctgtacgcgtggagaaaggcagtgggatcgaatggcgggagttcgcaatgggcgggtttccagcgccagttgatgagatcccgaccgttggatttattgccggagatgcaattccagcccttgaaaatctccttacacgtatggtcgtacctcggggatgtcccaaccgggtcgcggatccaatttccatccgagtagtcgcacgattcaggtgaagcacccgggttggataagccgttggttttggggaaatgaattgatggatgatgagaatgtgaaggaattgaagtagtgtttcttatggaagagagaaggagaaagatggagacaaagcagataatagaaacaaaggggaatagaggaatcttcttagcttgattttgttgcagagactgagattgagactggttcaccgccatgggaagagctcactccaacttaagccccaaactttagttatctaagaagtattcttctctccttcaactccaatgttattcttgttttttgagttagtttaatgagatttttgcctcctattaaataattggggaattaacccatatagactgtttttttaattttttttttttaaatttacttttaggtttgtggttgaagcaatagaggtttcgatacaattttttgttgcaaattagattgcagctctagtagaattacgtaaaaatacaaaaaaaaaaaaaaatttgaagtgtaaaaataataaaaaaaacccttaaataataccctttttagcggttaaaaaattcttcgagattattgaatttaagaacttttatctaatttcattcaattttactaattcgataattatccatgaactaaatcatgttttccagactttgatatctaccaa

SEQ ID NO: 114085 - DNA, 8377 bp, Cannabis sativa
  modified_base (8305)..(8313): a, c, t, g, unknown or other
aattctttcgatccctttcatagtgaggctaagtcactatttatagggtcttaatgcttgagggaaggtttcccttttgcttacaatgtataaaatagtaaagaatgttcattacaaaattatgatacacaaaataggaaattgaaacaggttgccatattcctcttactcaatcccatgagtatagggattgtcatcgtggttggacttcacgagatcattctgaattagctatgttctaataagtagttcgaaaagcaaaacatgttcctgctcagatagtccaccttccaccctgctcgggtaattagaagttgtacatgcagatgtataatatgaagtctgttcaggacattcatctcggcccagatgcgaggaatgcaggacacatgtcacttgtctatttttccacgtcattgtgaaaaagatgggatagcatttgcccccaagtctacgcaagatgtttgtggtcgcacatggacttcactcggtttggatccttatctgaacgtgtggcacgtgttcgaagtgtcggttgaagacccaatgtgactctgaccaagggtatcttcagttttcagctcatcaatactgactgacatgtacctcgaaccacgccttattgtacgtttcgatggttatccttcaggtaaatgagtgcacaacatacacttttggggggaactcgtggtatttaaaatttgaaatgattactttgcctcactaatctgcttataaatagggctgagaaccttaatcaaccacttttaaccatttttgcttttgaagaattagagcaagaaatccattttctttcaaattctttgaaggatcttcaggaaacaccgatcagtgctatctgagtaaatctaaagttttgaacagtgagtaagttcttcatttctttcctctaatatgcttgaaaattttattttctgggtttctgctgcataacttgatagttcttgaacttgttcttggagaaccataaaatttttaggtttaggaatgtgaaatcttgactatgcttaaccacgttgatttattataagtacgttttaatttcaattccacgatactcactttcacttgcccattcggggcttagtgaaattcaacctgtaaattaaaattttgaaattctggattttaaacctcattatcatgcaacatttctattttctgatcatttgatcagaccttgtcagtataaccaacctgttttcgttcgttatcccggccaaatgctcatcttgtatcctaccccttgtagatgaaccctggtgagttttggggaagcaaacatcgtatcgaccaggatttgcttcaacttttatacgaggatcatcctcgcctttgtgctagtcaatcttcatctagtgataacctctctaattcaagcttcgaagattgggagataactagcgaacatacaccttttcagaatctgaagtgcaacaacatttttaccccggccagaccaaaggtgaaggctacggatgtttcatttgggagcttaggaaggggtggaggcgctatctactgtccaataggacgtacattgtccggccagatactgttgacaccttgcctgtaggccatccaaatcctgctactgcatgtacacccattgctacattcgctgtaaccatcaccagacataccaaccaggtctgtctaacaatacgatgatggcacgaactaaacaaactgtgcaaaagtcttcattatctgacccacacgtagctcacctcgcaacactgccgagtgtagaataggcccggcctgctgctgaggaggaagacattgttggggacactaaagtccaagaggtggaggatcagggcgaggccaatcctgatagtccatctgaagttgtggtggaaggtgaagctcggaggtttccctttggtggttttaatgaggatggagaacctgtgtttgaggctggggaggtccaagaggctggtgaagacaatgtcactgaggaatataccgaggttattcctcagagaagataaggcgttctaggagctcgatgggtttctcctccattcgtggtaaccagggaaaagatgaaaaatttttagaagcacggttacttaggggatgtcaaatgctttcatccctccccaaatgagctggcaacaagtccaacggagggttactgtgcttggtcgggcgctcacactaagcagggtgttatgatacccttgctttcgtatttcaacagaattgtagattactactacatctgtctgacacagtttactacaaagggcatcaagtatttgtccgccctattcatcctctacgcctcacaaggatggggtgagccatccccgcacgacaccaactggctctttgatctgaaatactctcccaagcagagcacatcgggatatttctacttttctcagatcgaagagaagtggttgacgggcaccgtagactccgaggtgagcaagatagggaactttgtggatgagtgccacttgtccaaggaatggacaccatccacactcggttctagtagataccctcgtactaccgccctcccttcacattggggcacaaggatagggcataaataattcttcaactgtcggatgttgctcggaacattactttcctggccactgaggccaattgtgtcaagtacaaactctgcccagcagattttgtgtcaaggctcgtgaagaaggcgaagaaggcaaagcctgaccaggacgaagtgaccgagcaggagaaaatgagcaaaaaggggaagaaggttccttagagtgaccaggcactagttgagcatgctatcagaatagggaacctgatagacctgtctagccatccaccccagttgagggaaaaggaaaggccatcgtaacggatcaagaacaagaagactcttcagacgatgaggctccatccttacttgtttgggagaatgctcctactcacgtgcaaggtatttgaactaatattttcttgttccgtgacatgctttacatgatacttgcctctggcattcttgttttatttatatgcagccatgtcttagaaagcactccaagctctgaagaagaggaccggtgatagttcaggccagactcccctgcccgaacaatctagaggtgatgatgttccatccaaggagaagggcccggttgagatagtgatcaacctttttgaggagttggtgcctgctgtggaccttccaaccaagaaggtatccaagtcgaagagtgccaaagggggaagctcagatggatctggtctgacaaaggtctcctccaccgccatggtattgagagcagaggctaagaaaggcaagtaaatgctctaatactaccttgatcagtcactttttgaggtgatcaatcaactgtctagggcagacaatgaactgtccttagagctgctgatgggtggggttctgaaggaggcaacacgtgtaagtattttatttccttttatttttgtcctgtctttttaccaatgcaagatttaacttttttcccgtgcaggtcaatctaaagatggcatatgcgtaatcttgagccaaatccacagtggcgaagcatcttgccaccgccaacaacctgcaaagggaggtggatgcggccaacaagaaggtgttggaagtgagaaatgagctcggagaggtgaacaggaagctccttgctgccaacaactgggccaatgagctgagaaaagagattcaagagatgccatcaactgcccagctcgaggtagacaatgatgccttatccaaggaggtcaatgcgctcaaagacaagagggagagtctctgtactcttctttcaaatttaaccaaggaaaaagccgacccagaagatgacatcaagtctaggtagacaagggaagaggagatcttgaaggaggtggaaatctgattactgccaccgtggaggtcttttatgaattttggaaggccaacccatcaagaaattttgattatctcagagattccaaagaggcatatcttaattaatgtgcaagtcaagcagacaaaaaaacaccttaaggaggccaattccatagctccaatcgaccacagcactaagactcctaccgtctagagtgtcgaccctccggccccttcagaccaagttatccgtacaaggagcccaagatccctaccatcttatgactcttggtccttgcatttcacaagtatggttttagtccattcagctctttgggtcgagcagacatttgtatgcatttaatggtatatttctaacttgctaacacaattgacacaattagaatataaataaacatccttactcatttattggtcggaacagttttgttaccgtagtaacttacatttataaaagcaattacatgatctaatctgatatttagccaaatttaaacataaaaaattgcacttaaaattttttcttttaaggtggtcatccgacttgagtacttaaatatttcatcaaaacctttgggcgggatccgtccaaaaggccatctacttaggagtaaatgttcttacttggtgtacttatagtggtcatctgaacttgtacatttactggtagtactttctcagatgttccctattctaataccttggtactagaacgagctccatgttttcatcatactttccaaacttgaatgcccccaattctagaacatgaacaacctgatacggtccatcccagtttggtcctagaacaccagccgtgctatctttggtgttcaggaataatcttttaaggactatatctcccacaaaaaatttcattgccttcacttgcttgttgaagtatcaagccactttttattgatgggctactaacttcaggtttgttgaggctcttttttcttcaatctcgtcatgtgattctactagaagagcatgattaattgcttgattgtagctcaatcttctgtgggacggaggttctaattctacgggatgcatagctttataaccataggccacagcgaatggtgtttgcccggttgccattttttcaattgtaatgtatgaccatagtacttctagtaattcctctggccagttctgtttaacttcttcaagtctttttttcatggtgcctttaagtgtcttattgactactcctgataatttagttgagggtgtgtcactacgaaaaaactttttatgattcaatgagtcatacaaaactctataaaaaattggctgtcaaactgtttgccattgtctgagatgattttgtgcgggagtccgaaccgacatattatattcttcgccgcgaagtccaatacttttttaggtgtaattatttccaaaggctcggcttttgtccacttcgtaaaataatcaactgtgaccactgcatattgtaccctgcccttacctttgggaaattttcctatcaggtctattacccaaatagcaaaaggccaagggcttttcatctgagttagctcgttaggcagtgcacagggtatttttgaaaatctcttgcatttgtcacatttctttacatacacctttaaatcatccatcatggttggcaaaaaatatccttgccttagtattctctttgataggctttgccctgatgtgtggttgccacagaatccatcacatacttttaataggagccatacaacttcttcttttgttacacatctaattaatgacatggagaatcctcttctatacattacaccttccattatgatgtaccatacaactttcctcatcatcttttgagcttcgtttctatcatttggaagttctccagtattgaggtaggttattgtaggtatcatctagtttggtgttgtgtctatcatttcgatttcttctgcacaattgatgttgggttcttctaagaattgaataaggactagattggccttatcagttactgtgttgcttgcaagtcgggctaaggcatcagcagtagtgttttcttctcttagaatttgcctgagagtgtaacccttgaattgtgcaagcaaatcctgtattttgcttagataagctatcaatttcactccccaggcgtcgtactctcctaaaacaagatttactaacaattgcaaatcactagaaacctcaatgtattcagcattcagctgctgagcaagttttaagccagcaatgagggcttcatactctgcttcgttattggaagcttggaatcaaaatttgcctgccccgtgcagatgtttcccttacgtgtgacaagggcgattctcgtacaagatagttgatctatagctgacccgtctacgtgcaatttctaggtaggtttgtctttattattgtttggtagggattcttgtactggctctaggttgtcccttatgctgctttcttctttgcccatgcactcaactacaaattctgctaaggcatatcctttgaccgttgttcagtgttcaaagattatttcatactgacccaactctaccggccatttatgtagcctttcagaagcgtcgggttttaacaatacttggcgtaatggctggtcggtgtataccaaaacaagatgagcttagaaataacgaattaacttccttgttgctaagattaggcagtaagtaagcttttctatcaacggatatcgtccttcgacttcaacgagtctttcgcttatatagtagagtagatgttggatgttcttttcttctctaatcagcacgacacttacagtgtattctgtaatagctaagtatattccgaattcttctccgtccaggggttttgagagtacgggaggctttgtaagttgtctttttaattgttaaaaggcgtttttgcattcttctgtccattaaaatttcttgttaccttagaggatgttgaagaaaggaacacacttttctgttgattttgaaactaaaccactgagtgcggctatccgaccggttaagctttggacttttttagtttttgttggcattttcatatccagaagggcttgtattttctctggattggcttcgataccccgagaattaatcataaaaccaagaaacttacctgagctgactctaaaggagcactttaagggattgagtttcatgttttattttattaggattttgaagcattcatctaggtcctctatatgcccctagccttcctagattggatgagcatgtcatccacgtatacctccacattttgtccgatctcgtctttaaacattttattcaccaacctctggtaggtagctctggcattctttagaccaaacgggatgaccttacaacagtatagacacatatctgttcagaaacttgtatgttcttggtcaggtggatgcattctgatttgattgtaccccaaataggcatccatgaagcttagcatctcgggctcagctattgcatccacaagctgatctattcttggaaggggaaaacaatccttgggacatgccttgtctagattggtaaaatcaatacatactcgcgattttttattgggcttgggtaccagtacagggttagccacctaagccgagtagaaagcttcaatgatgaacttattattacgtagcttctctacctcttcttttaacgtttgcgcccgttccttatctaatggtcttcttttttgttgaatggggcaaaaatttgggtcaatgtttaaggcgtgagatattacagaaggatcaataccgaccatatcctcgtgtagccaggaaaaaatttctaggtttgctcttagaaattttattaaagctaattttactttgagcaacaaacctttgccaattttgagtttcttggtcgggatacttgggtcaagtttttccactggccctacatttttacttggttccccaagtgggggatccaagtcctcgtcctcggcttgggcaactccctattgggcaatactttttccgttgcctgaactctggctggaggaattttcctttttgaccttagttagggctgttgggattttatgccctaaagaaaaccgatttcaatttaatctgatttattatcaattgaagatttgaactcatttatgtttacatgtagtttttatgtttatggtttaatgaataaaatttttgttaagtctagaacatatagttattcacaattacaatgatgtcaacacagtgggaggtaattatgattatatgaatcaaaagataatgtcccttgattcatcagtgcactggatttacacatgtgatagtcagcgataacgtatacttatagcttggataagtgttatgttctttccggaacattggcaaagtattctagatttagatgtatggagtatacattggannnnnnnnnatattgatcttggtaaagatattacaatcttaccgttgtctctttcgaagtcaatatcactggt

SEQ ID NO: 114086 - DNA, 5718 bp, Cannabis sativa
  modified_base (5662)..(5671): a, c, t, g, unknown or other
agagagagagagagagagggtaaattgtgaagttgatggagattttgagaaagaaataatatggtgccgtactagtgacgagccatgtgccaaaggaatctgacatagcatacttaattagtctcttaaattatatatttacattattggttttggttgaaatacaacctagaaattgcaagtgcagctgcaaacaggtaataaaacagtgtgttagaaacttctctttgtgattttccaaaatgtccttctcattatacacatacccatatatgtataaatttgtatcattacaacaagtaatatattattatctgtaattctttcctatggcattgacaatatgataaatattataagtataagttctgagattaattggtttttatttttattttcttaatgaccatttcttggtcttggtgtggttatgcctcccatgtacaaccatatctgttcacacaactaaattcttacattttttaatatatatcttctcacctactacaactaaaacaattatagccctctatgaaaaatattatataaatatttgtgtatctgtaaaaggaagacatcaattttggacggccattttgcattgaccattaagttacttattacatagtttataacacaaacaaaaaaaaaaaaaaagatttttataaagataatcatcaattttagaagaaagaatgaaagaaataatacacgatttttgatctgtttcaccctaccactttatacatatataaatacaaattgtatgaaaatagttctagtacgtccacttgcaccaaaagtataatttttaatcaactcctatttgtacatttgtgtcatatctaaaaaaaaaagattgatatgtgcaactattcactcacaagtcagaagttacctattaaagatattactttgtatcaatgagcactgtcattcatcttctatgtcaaaattattattgttattatattccattttcgatatttttgttcttttgggggaaaacgtacaataacatggactgaagcttgaagttgaagttgaacttggacttgcgcatgtatgcagttaaccacaaatataatatatagttttttgcttggaaatatagaaaagggtaaataagatcttgcattgcaggtatggagagggaggagaggaagagtgttttttctttttccttcctttgtttgcattagattagagtacatatatccctctaatccttttctctcttctgacaaggtcacatgcacatgaagacaaggctagaccccacccacatacccatctcacatggatatctgggatacaagccttgagcatttctaacccacaaaaacacatacaaacacaacccaacagcctcatacttgacacatagtgcattctcttctctctctctctctctctctatctctctagtatataattataatatctattagtttagccaaactctttagtcttgactctctcaccagattggtttacacattttaatgatatagcaacatcttcctgtctctcctgagctgtctttccacttgttcctcaaggaaaaatctcgtcttggatctgcagagattcctttttacaaaccggttttgcataggttttagtttctttttaggaaaattgaaggtaatgttaggtgttgctggttaaaaggaaaagaaaaaactctgggttctgttctgtgtttcgttgttgtaacttgtaatattagtaaaatgttaatgggtccctctctccgttttctttaggccctttgatgggagacactgttttgcctgatttgtttctatgaaaccaaacaaggttctttctttccactcattgggtttgtgatattgtcttctgggtatgttccttttccctgttgcggattgaaaagttatagttgttttggggggaaacccgtgaaatactcaaaagcttacttacttcatcagaagttttgtctttaatttgtttatttccttggcgggttttcaaggaagataaagtttattgctttgagctgtagctagcagaacaaattggattttcagagcaattgtggagtagattaacttgattttggctgtattggatttaaaagaatgaataatgcagtgtgcttaaattaagctgcttgtttattacgccattaagagcaggaactataggagggcaagtcaagattttcttggtacttaaaaaattggatattgccgtcagaggaagtcaaggttattgaggtgtgtgaaattcttgagttacccgagaataccaagcacattcaactgcaaatttctgatattactgatttttgtgtcagaactcacagagaagaggtatatttctgagttaggttaggtgtctgaaaaattcctggtatagaggttgaggtttataaatggtcttgagaattgtaaagcttcaaagactggtcccaacattgtggaataaactcaattatttgtttttttagatggagactgataacggtatcatctggttttaagaaagtttgagtaagaggggagtttggttttgtgaaaatagcaaattaagatggctgctaagcttttgcattccttagctgatgaaaatccagatttgcaaaagcaaataggatgcatgactgggatttttcagatttttgatcgtcaccctgttcttactgggaaacgcattagccccaagagacttcctccttcaggtttttttttttctttccatctgtgcttaattaaactactgtacttttcataaaccttagctttttcttaattgctttacccttttaagctagcaccagtctcaatttaatgaaattgttaatgcttctcccaccaagttctttcattttttatcttcaaactttgcacttaaattagcattcttttccataggtttatatgaatatataatttctgcctttgcttagatttttttttctttttgttttttatatgatatcccccaagattgaaaagttggggagtcttcaggcttctaaagtttgcgctttcattctttataggaaattccagtttaagcaacagtactctggaaagacagtctaataatttgcactatcagcagacttcaggagtaagctgttttatcattactttcttcttatactcttttggagttgtattatggttattttcagtccagaacagtacaaactaaaaaaaaaataaaagaaatggaatgattcaatttcatagtcataacatctattatggttacttgattctttagcatacacaaatatgtactgaaccttttctgcttgttattttaggaagtgaattcaaacaagagtgttaatgaaaagcaaagattttctacagaatcgtcaagagcctctgtctcatcctcttgttcatcagtatcatctttggaatgtaacaaaacagctcaactggaagtttcttcatttgatcgaattattttccatgaatcttcatcaaaggatccggtgaggaaccaatcaagcacctctccgcggttagggaggcagtcccttgatctccgagatgtggtgaaggactctatgtatagggaagcccgggggttatcagttagaactgcaaccaaagaggaagcagcaggaggtcatggagtagagcatagagactccccaaggccctcactgctttccaaacatgtggatgaatctaatggagtaggaattagcagaaaacgaaatacaccagttgacctgaaggagtctcttaaagttcttgctaaactgagagaagctccatggtattataatgattctagagaagatccaagatcatcaaacaagtctaaagatggttcgtggcactcagcgtcaaaggatgctcgtcgattttcatgtgatggaagagaaacaaatcgtctatcatttgaatcacgagattccttcaaatcaactgctaagctaaaagagtcgccgagactttcattggatagcagagaatgttcggtacgaggttccaactttgattcaaaactacataacctttcaaaaattgccaagagtagtagaatgttgaatgataaagaccctagtttgccggagtcatcaggatctcaaaaccgacctcatagtgttgtggcaaagttgatgggcttggatgcattgccagattctacttcagctggggatgctcagttgggtttgatcaaaacatttctaactcaagataatgatttgtccacaagatcacttgcaacaaataatcttagcaggcctattggagtttcaaactccccaagaaacttacagaaagagccagcatcaccacaatggaagaatggtgactttgtcatgaagcccatttcaagttcgaggtttccaattgaaccagctccatggaaaatgcaagatggaaataaaagttctcagaaaactagttccagacctgtaaaagtaccagcaaggacttcaaactccttcccatctgtttatagtgaaattgaaaagagactaaaagatctagaatttaaacaatctgggaaggatctcagggctcttaaacagatattggaagcaatgcaatcaaagggactgctagacaccagaaaagaagaacaagattctaattatggagctgaagggcaccatgaaaatgttagtcacaatgttaatcaaaggtctgctgaccaaagatattcacagagtacccatcttaatggctcctcacatagagggcctggttcctcaaggacctttgaatctccgatagtgatcatgaaaccagctaaacttgttgaaaaatctgttacatctacttcgtcagtagtttctgtggatggcctttctgagatcaataaatctcataatggtgaagctgtagatggtaaaaaggttccaaataacaaccgaacggctcctaaggtcaatcgtagggatgctgttgtcacttctgttgacaagagaggaagtgccaggaacacaaaatcagctcagtctaggtcccaacaacttccaatagaaaacactgcaacatcagtgaagagctcagcatctgtgagcccgagaccgcagaagaagcttgagatggagagacgaagtcgtccaccaacccctccatctaattcaaacaagcctagaaggcaaactaacaagcagtcaacagactcaggttcaccaggtggaagagccaggccaaagtatcataactcacaacaatgtgatgatcaactaagtgagataagtaatgaatcaaagtctttgagttgccaaggtgacaacatatctctgcattcagaagacaatacgcttctggactcgaaaacagacgtcgaagtcactagtgttctactatctactgacatgaattgcagtctcagtccatccatgaaggttgccaaatacttggaatctggctcaatacagaaggtataggttgccctttaccttattttccccagttagttttatcatttacctgtcaattttttttttccttgtctcagaaagcaactccaaggcttgatgaagaagattcatttgcagaacttgccacagtcgcacccgaacatcctagtcctgtttctgttcttgatacctctgcttacaaagatgataccccatctccagtaagacagataacatctgtactcaaaggtaaaatttatattagttattaacaaaaaaaaaaaaaannnnnnnnnnaacaaaaacaaaaacaaaaaatctcattttaatatggtattttattt

SEQ ID NO: 114087 - DNA, 8794 bp, Cannabis sativa
accgccgcctcatccgccgtcggtttcatgcaccgatgaccttggcggtattggctcggtcgacactacgtgtaagatactgaacgatttgaacctcaccggcgatgtgtacatacaagggaagggcaatttttatatcctacccggggtgaggtttcattgtgccactcctggctgttccataactgttaacattactggtaattttagtttaggaaactcttcgtcgattgtctctggtggattcgagctttcggctaataatgccagctttattaatggctctgtggtgaacacgacggcgttggctggagatccaccggcgcagacgagcggtagcccccaagggatagacggggcaggtgggggacatggtggacgtggtgcctgttgtttggcggataagactaagattcctgaggacgtgtggggtggggacgcttactcgtggtcgtcactgcagaagcctagtagttatggaagccgaggtgggtcaacgagcaaggagttggattatggaggacacggtggtggaagggtgaagttgctgattaccaattaccttgaggtggacggcagtatttttgccgatgggggtgacggagggaagaaaggtggaggtggctctggtggcagtatctacatcaaggctttcaaaatgtaatctttcaaccgctcatattgctttgtcgtgacatttttttttttccagattagtttgacttcatagttcacactttatttttttttttttaaatatataggatacataaaagggaatttaaaatgttgtaaaccgtatactctcgggaatgatggttattttctcatagttggattttttttttcttttttggttctgaataaaatgtcggagtggaaatctttcaatttccacttttggatctagtcggaatggtcttttgtgtagtttgagagccttaacttatattgaccaaggaaatgagtagcaaaatgtgaagcatagttgtctttcataatgaagaggatcaggattaaaattttacatggttgcaagatcccttcatacttattcttttgaatttccttatcaagatagtaagcgtcttgataaaagttattgctgcttttgaaaacttttttcgtttcaacctttcagaagggtgattgaattttatgcttgctcattgcatcgtcttcgtgttgctttctttttacaatttgtattctagcttctgaacagttaggctttgtatctaattctttagctcctatggtggaatgaaaaagaggccaggcatggatatggaatttaatgaatgcctcaaacctattatgagatttttataacgcaaacatttttttcactaatgaaatttgattgctgcatccagttgtaattgtctattttattcacatgggggattttatatttagtacagtattgtgtacttgatgcttgagcaaatatgatttagtttttctttcaaatatgtttgaattgaattggatattattttctcgtgtgatttttaggctgtggaaacttgccattggcatcagtcttacattgatattacttttttcctttaacaagtcatttaattcaagtgttttattcttaagtgcaggactggcagtggtagaataagtgcttgtggaggtaatggttatgctggtggtggagggggaagggtgtctgttgatgtattcagcaggcatgatgaacccagcatttttgtgcatggtgagatttttcccctttgaagctagcttcctatttctagttgatcttgtgaacagcctcttttttttgggttaagaactgggaagttccttggccctcaagggtcttgttttcttatatacaggtctaacatatgataatcttatatgcttggatcatgggagagctaaattcatctagtttgattttgttaaattacacccttacttttctttttcagggtaaatataatttatttctttgccttgttatgcttttatgtcatgttaaaaatgggaaatatattttttggcttgtggttgtgcattctactggcttccttgtgtaaaaaagacatgctacgtatttaagacttataatttttttttggtatgtggtttatcatcacacaaatgtgaactaaatggtgaaatttgcaggaggaagtagctatgggtgtttagaaaatgcaggtggtgctgggactttatatgatgccgttcctcgaagccttatcattagtaatcataacaagtcaacagatactgagacgcttcttttagactttcctaaccagcctctttggaccaatgtttatgttgaagacagtgcccgggctactgttccattgctttggagtcgtgttcaagttcgtgaaattttaattttaaatttagaattgcaagttcttaacttaatccaatattatgggtaggttgcttataggctgtgtgtgatcttgggaaatgtatcattatcttttcttttcttctaggaggatgattctatataggtgcatgtacgtgcacttgtatgtgtgtataagtgacacttctaaaatctaaggttggcattgttcaaaaactaagattaaactgacactaaaaataggtagttgtactctttaaatcagatctctttaactggttgcattttctgtgtgcattcacagcactgccatttgaatacgcacattttgcatctaaggaaatataagaaagtttactttcaatgcattatgtaggttcaaggacagataagtctcttacgtcaagcagtgttgagctttgggctgcaacattatgcttcttctgaatttgagcttttggcagaagagttgctgatgagtgactctgaaattaaggttggtaaatgcttaatacatttcgttttgcatgtggtcactggaccattatcttaatgggcatagtttatttcttttttttctatgcttttctaactttgtgtcaataaatatatttttgaggcttatgataaaaaaagttcataatatgtttaggtatatggagcattgcgaatgtctgtgaaaatgttcttaatgtggaattcaaaaatgctcatagatggagggggagacgtaactgttgcaacatccttacttgaggctagcaatttagttgttctgaaggtaaattacctactacttagctgtatctgacagtgctttacctgataaattctgtttgtacatgacatctttttaaatgacaggaatcatctgttatccactctaatgcaaatttgggagttcatggtcaaggtctactgaatttatcaggaccaggggatttaattgaagcacaacgactggttctatcactattttatagtattcatgtgagtgatgttaaaacctaagtggtggctcgctttttatttatttattttattttggagataatctatcttttttatgccactcagtttctaaattttaggctatgtttggtaggaaggagggagagtaggatggatggagagtttaaaaagaatggggagtaggagggatggagaagatagttgctctcttttgttttgtttggtattaggagtaaagctcaaaggatggagagtaaaataaatattgaaattaccattttatcatctttaaaacaattatatattattttttaaagggtagaaaagacgttttatttattttttgtcttttttttgggatcttcccatttttggagggattgaaatttaggtatttggaggtagagggttcctccatctctcctctcccttcctctctccatttttccaaacaaaggaattcatcaatccctctatctctgtccctccacccctctccctccatccctctccctccatccttgtctcccctctaccaaacatagtgttagtgttgcctttgctattaataagttttcacacttgttggacatgtatgctgtgtgtcaataacttatccttatatgatatgatgatgtgccattttcgttggctgtaaagttactttgtataatttaatttaataatgtcgaattgtcattaataatgttttaatcagattacatacgtattttacgcatgaacatgaaaatagctattatacttgcacaaatactatatttaatatccgtttcatttttggttctgttgtgtgtttgttgaatgagttttcttgatttgcgtgaagcttgggcgtgggtctgttttgcgtggtcccttggagaatgccacttctgattatgtgtaagtttgcctttggttaatgaactagcttactttttaaaaacaaatggtctgctaaatttattaccagctaagttcattgttctttgtatttctaggacaccgaagctatattgtggaagtcaagattgtccaatggaactactgcatccacctgaggattgcaacgttaactcatctctatcctttactctccaggtaaccgtcaagctattgggtttatggtttatttatgtagaaacagtttgagacttctttttgtttgttttgcagatatgcagagttgaggatatcactgttgaaggccttgtacagggatctgttgttcattttcacaggtcaagaactgttgttgttcagtcttctggaacaataagtgcatctggaatgggtatattctctcctctcatatatagatgattgttttgtgatccagaagagtttgaatgctgcgattgattttttttctcccttctgctgggctaattttctgtttgaacaggctgtacgggtggtgttggcaaaggaaatgttacaaatggcattgggagtggtggtggacatggcggtaaaggtgggctaggatgtttcaatggtagttgtgtcgagggtggtataacatatgggaatgcaaagttgccctgtgaacttggtagtggaagtggaaatgaaaattcaactggtactgctgggggtggaatcataggtaagctctgtttgtttgttgaccaggtatgtcattagtttttgttataattgtgggtgaggacttgactaccttcttatctatgtaacctgggcagtaatgggttcactggagcatccgctgtcaactttgtcaattgaaggcacaatacaagctgatggagaaagttctgatgtaactagcagaggggggaaatattctatggtagatggttcaagtggaggttttgggggtgggtcaggtggtactatacttatgtttttgcacactattgatgttggtgactctgcttctctatctagcattggtggatatggtagtccttatgggggcggtggaggtggtggtggaagaattcactttcattggtcagacattcctattggagatgtttaccagcctgttgcaattgtgaaagggagcatccattcagggtttgtaatatatgagtttgtttaaatgcatgctacgtatttcattgtgaacgctaaagatattttattctgttttttatatttaggttatcttccaagatatgattcatattactttaccttagcctgtcatttgaactaaattcaaaattgtttttatatcgtgatctcttaattatgttcatgtaactaatacataatttattatgctaattgatacttgttttaacttctatcaataaaggggagggctgggtagaggcgagggaggtgctggaggaaatggaacagtaactggaaaagattgccctagagggctttatggggtcttttgtgaggtacagttatttatgtgattttgatgtgttctttttccattaacctctacactgttgagttgttacattatgtccgatatgctttttgtatactgttggagttatagactatgtactttagttcttatagatagagttttgccttgattctgtttcacttttgggaaaaaattatacttgttaatggcttttcttttttgacattttaattctgtgcatgaaagaaatttcggtgtaacatgcatgtgtcaggggctgatatctgttaaatttcttatgctttgtcaaaacaaacatatgttataccatgggaggctactttaagtggtttggttggtgggtaaatatttgtagaaagcgatgtacattaccacccacgagggaggggtaggttgtgttgtctggtccatagtttgctccagatttcactatgtatgagatcttgttcctcatggcatgggggtgcacggattaaattttaaatcacattgctttttctgttaactgtggaaattttgccacccttgggtttgaactttgaacccaggaccaggacaggagagaagccttgcaataactttgagtaactgtgatctaaaaaccattttggagttaaaatttatctctgaatttcacattcaggaatgtccagttggcacttacaagaatgttagtggatctgacagaaaactttgtcatagctgccctgcggaagagcttccaagtcgtgccatttacactcctgtgcgaggtatttatgtatatttttatatatatttaaactaaacatcagttgtattaatattgaaaaaatacaagcaaaagtgggaaaggaaaatccacagagaacttgtgtgagatattgattattttttgtgagcaaggagaatataatttttcttcgaattcttttgaatattttagagtatattctcttgcttccacaaacatgcatatttttataaccttgtgattctcagcaaaaaaaagtcttcaagtatctgcaactggttgtatgatctgctgttctgcacattcttattaaacaggtggtgttgccgagactccttgtccgtacaaatgcatttcagacagataccacatgcctcactgttatacagctcttgaagagttgatttacacatttgggggcccgtggctttttggtcttcttcttattgccctactaattcttctagcccttgtgcttagtgttgcacgtatgaaatttgttggagttgatgaattaccgggcccagcacccactcagcatggttctcaaattgatcactcctttccatttcttgagtcattaaatgaggtcaaatttctatatattgatctgtttgctaattaagatacagaaagtcattggtggttatccactggagctttctcccctgtttggagacttataaggctttatctattttataggttttggaaacaaacagagtggaagagtcccagacccatgtgcataggatgtacttcatgggtcctaatactttcagtgatccttggcatcttccccacactcctccagaggaaataaatgcaattgtgtaagctgtcttctcttctggtcaattctgcctgtagttctcttgtagaatacaaggttttttattttatttttttcctattaatttttactggttggacatatagaacatcaccctaacttattagatctggcagatatgagggtgcattcaatacgtttgtggatgaaattaatgctatagcagcttaccagtggtgggagggagccgtctacagtattctttcagttttagtgtacccccttgcatggtcatggcagcaatggcgccggagattgaaattgcagcgtctgcgtgagtttgttcggtcagaatacgatcatgcttgcttaaggtcttgccgttcacgtgctctatacgaagggataaaggtttgtgttgctaaatgtcaggctaatttttttttttggtatcgtgaatctttcaaatcaaatatttccttgtattcttttgttatggattttatttcagactgttcaccccattgattttgtttagtggttaagcttgcaattgttttctatgttgcgtaggtggctgcaacttctgatttaatgctaggatatgttgacttcttccttggtggagatgagaagaggactgatcttcctccccgcttacaccaaaggtttccaatgtcattaccgtttggaggtgacggaaattacatggctccattttcacttcaaagcgataatgttgttacaagccttatgagccaggtttgttgatgattgattacttaatttcaaattttgttggtactttatagttgcatgcacagagaagaatgggagagataagagacttgcctgtagcttgggacttggcttcaccgagtcagcttgttgagtctagaatttttaccttaaccgttttgtgagattaaaactgtataggttcctcatttttttataatatttatatttaattgtcaatttcacgttgtattgtgacacattaattagttttgggtttgtcatgttatacgtttaatgacgtttattaagcgtgttaggtgtcatgtcttgtgacttgctaagtttaataacgtttattaaacgtgttaggtgtcgtgtcttgtgacgctaagaaaatcatgaatttttatttaaattttaacttttgatatgtttaatgattgtgttgtatttattttgtatcttaatcatgttatgctcatatcaacacaattatcacatgacacgagatgggatgtttatgtcgttaattgtgtcaatttcatattgtatcatgagacattaattgtatccattaaggttatgtttattaaatgtgttagtgtgttgttctttgttgtatgtttattaaatgtgttagtgtgttgtatgtttacttaaaattcatattatgtgtgaatttttgaatgttcaaatacgctatcgtgtgtttcactttactcatgccgtgtctgtttctactagggctgtacatcggtcggtttgggcggtttatcctatatattttctaactcaatctaaagttcgggttgctaaaat

SEQ ID NO: 114088 - DNA, 1993 bp, Cannabis sativa
gaattagggggccttctatttggtcatgatgagggctccaccacacccctccaataccccattgggatttgactcgatggacaccgcatgtgacactacatcaatacgagagagagagtctttgagagtgaagctcatagtttaaaagaagcatgtggatgtgggtagtgcaaattagatggtgaacttagaaaactaacgtggaacccttctcttcctatgacaatatgacatcatacatataatcagtggcaactctcgatttaagttgagggagcgacactttatttttaagtaagagagcatcttcttatcatactatatatcatgttaaaaattaatacaaatttatattttaatattaaatacagtatatatatataaaaaaaaaattaacaatttaaacactaaatataactctgggtagagatttaaaaaataaaatgcaaatattaaagtaaatatgcttttattggatcaattatataaatgaaataattttaccatataccaaagtttattttacatttataaatattacttttatttataaatatatattgtaactagttaaaatatatacgactgccctacttcgtttctatgtacgtccgcccctgcacataataatgcttctgaaatttgaaccatttgtaattagtacttgtgatttttataatagagatgctaatttttagcacttatacggtgattgcatatactatttactaattaatgtttttctttcttttctatttatcacaactaggatgaagattttttttagtgtagcataatggtattttacaatcagttaatagtttaatagcttcaaggttctatgttcgaatccataatttctcccttttttctatccctctctcaccactaaactagctttagtggcttcaactcggataaagatcatcactataaataaaggcttaaggatgatttgatggccatattattaagtatggaagttgagacttagataatattagacttctgtcgcttttaatgtgtatacaattaatgatattatttgagctttctgtgataaactttcaagtgtgaattatatgtacaagtggacatgtagaaaggtacactaaatgtgcacgtgcacatatacgtaatataaaagaaaaagaagtactagacacgtgggggttacctaagatatatatggagttatttcaaaattagagataagcatatgtggaccgatcccaacccagtcccaccatatatatcatagacaaagctgtctagtttcacactagtactgtgtgaaggacttattacaattctattacaagaaattcaaatataggtctacctatcctatgtaagtcatgcaggtctagcccatcttttagtccacttacagcatctccaacttatacatgttttatactatcactaaatttaatgtcaataattttttctatttcaaccgcaataataaaatttatatcaaaaaaatatattttattattatattaataaaatataatatatacacaaattaactataaaaaatcaataaaaaaaatgcagttgttacaatattactgtatatatgcagtgcacttaactaaaattatatatgtaataataaaataatgctacgttggcctaatagttctactgtaactttaaatttaaagtctgattggagttgcacttagaagttgggtttgggttagcttgttattgtttggaaaatgaaaattgtacacttattaagacaatattaagccattattataaattcatagaaaagaaagaaaaaaaaagggatttctcttaaccttttagcccccaattagatctgaactctttataggggcagcaaaaataataaaggatgtacaataagcaaccatggatcaaattcatgggctttatttcggctgtgggctgagcccactacttacctctattcccttggaggaaattacattctataccctttttatattatcct

SEQ ID NO: 114089 - DNA, 7712 bp, Cannabis sativa
  modified_base (7641)..(7656): a, c, t, g, unknown or other
ttgataactaatcagattgtaataggttttatttagggcacaaaacccaacataatcaacaccaaaagttgttacccacccatggagaagctaacctacactcttggcttccaaaaagctaagtccctaattctaggcacaccccataaaggtgtacaccgatcaaccgctgcgacacgttttgtagaaacctgcagcatcaggctgactactcaaattggccattgagcttggcctatttcagatcacatgctaaccaagaccagccataaagggtcacagaatttgtggctgagtgcaccaactaaacttttgagatcgctcaagacttaggagaaaagcaagagccagagaagtagcgagaacaagagcaacaataaaatcccaaagaactaacatggaaactccatgttgatggaagctgcaatgaccaatttttttgtgtaggcaatgcccttgcaacacctggggagaagcaactgcacggagcaatcaatttcgacttcaaagccttgaacaatgaggctgactacgaagccttaatagctggtctcaagctggaacatgaagtacgggctaacttcttagacatattcagcgattcccagctagttatgaatcaagtcctaggtgaatacacagttcgaggtgagaaaagggttgcctacttcaggaaaataaaagacttgctaagtcagctcaaaggctaccaaatcaggcagatccccaaagagtagaatgctacagcatatgcacttgctcatctggaaagcaactccattgatgacaaagcaaactttgtgcccatacaattcctaaaggaacccaacattattatcctagaagaagtcaacatattgaatgacactccaacatggatgacacctatcgtagcttacctccaaaatggatccttgcaagaagattaaaatgaagcaaacaaactgagaagaaaagctactaggtacttgatcctagacgggataatgtacaagcagagcttatccatggctctcttgaggtgtgtcaccaaagctgaagctaaatggctaatgatagaagtgtatgaaggtttttgcggcaatcatgtcgggggaaaagcctatccaagaagatactctgacaagtgtacttttagcaaacaatgatcgaagacttgattgacaatgtcataatgtgtgacaagtgcctgagctcacgatgatgcagtctccttggcccttctcagtgtgggggatagatctaattggtcaactcccaaagggaaaaggaggggtacagtttgctgttgtcgcagtagactacttcaccaaatagacgaaagttgaacccctggcaacaatcacctccaagaaggtccttgactttgatgttaataacatcatatgttgattcagacatccctagaatattgtgttagacaacgacaagtagtttgccagtgactggttcactgatttctacaatagacatggcatcattaaaagcttttctaccgtgccccatccgcaagcaaataggcaggtagaagttgtcaacaaaaccctcaaggacaccctaaagaagcgccttgaggaagtaaaaggcaactggcttgaattgctcccagaggtactatggtcgcataggactaccgggaagagggccatcgggaagactccattccctctaggttatggctatgaggcgacgttgaatgtagagctagtgccaccgtctcacatgggaacaacctatgaacaacatataaacaacaccctgctggcagagtcccttgacaaagtagaagaaagaagagaataaacgaacctaaagttgcaagcctaccagcaaaaggtagcaaggcacttcaacaaacaagttaacagtaataaattattcataggagacctagtgctcagaagggcgttcctgaacactaaagactctgcaacaatagtgttcggacctaactgggaaggcccctatcaagttataaaagtaaggaagcctataagctaggaatgtacaacaagaacatggagttcgttatcctaccaagataatggaatggagagcaattttgcgaatactatcagtaactagcttgcagaatactactccaaagtagcaattctacttactcaacattagagtacaaaaatgctattacccatggcctttttggcatgccctcctacagttctacaagggtgacctctgctttactaggcaagcaggggtagccacttcacatttagaagctaaatttgtgtaacgtaagcttgtagattcaatttatgtaagttgcacataaataaagaccaattaatgaataaataacaatgtttataatctatttattgtgtttaaaccacttgctcattaactaacttcttaaagttactcttttagttccacgtgcgccctatggtaccctcgcaagacagaacccaaacaaagtctgtgaaacttggtgaatagcaagtgaccaagacacttttctgcgtggtaacttcgggggcacccatactgtgcaaggcatcgaactagcacaaatagcttatgcaaagaaattttaacgcttacataagctactaaacgtgcctctaaatcctgcaggcatacatcagcttggcaaagtaaatctggactcttacttgtcaaggccataagaagatagctaggatttaaaacctcctgttttgtcacaaaatccatgataaaaatgcaatagggccaaacaatagtagtgttcaaaaacagagggcctataggccaaagatacgaacatgaaggccttggtgctgaaaataaagtagtgttctaagttagcgttataaaaaggccacgggccacatggaacatgaaagtaagtagtgttctaaagttagaagtccatcggctataaaaagccacaggctatacgaaacatgaaaatattgtctatgttatacaaacataatgttgaatgctactaatgaaaatattattgaaatgtgtgcatgggtaggaggagctaaatttgaagccatgagatcaggatcgtcaaagtctaggccgaccctagcatcaacatgctagtcgccctggtggttagcatcctggacgaccacctcctccacaggtgggttggtcatcccctcatcatgagtctctgatgatgacacctctcgataggtagtgacttggtctgcctccatcttgctctcgaaaagtgcctttccacgggtccatgttctctcaacaaaagcctcactacccatgtatgacagagtagctcgggagttgcgcaacttcaactcataagtgtgtttggggattctaattgtacatggtgggaggaattacctcctttaattatgcctattgtattataacttggttatcaataaattggcattttatctcaaaaaaaaaactatatatatatatatatatatatatatactttaaaaattattttactttgtttccctttttatattattagattacatatacataccagaaacatattcataaaataaaataaataaatttagtgaatatataaattaaaatgaacaaaatagtttatgttattaaaattataaattaacaaattcataaaataaacaaaataaaaaatatattaacaaagtagtttattttgtttgtaaaaaagaaaaaaaaaaaagactattttttccgttttaactaatttaagcaattaataaaaagaaaatattattttcaaaaaaataaataaataaataaacatgtgtatttattttttgtaattataataagtttattttgtattaattgtatgatttttgtaattattttatattgtataaatactgtaattttgtagtatttaaaatctatttatttaattattaaatcaatgaaagtagactttttgtttggcgaggcaagcttaatatgttccaaacataaatttaaatatagaaaccacaaagcggacattttgggacaatatagtatggatagattcgaggtagaaggccttttacacatttgtcattacttggaatgcattatgaaatcttggattagaaaatttggtaaagatggtaagagcaggagaaaaatatgaggtgaggaatgaaaattgaatgaagaaaaaagtgatgtgattatggatgtgaatgttaacgtgacattttaccaatggtactggaaccaccttcatttgtttaaaatatctaattatacaacagctgtcatatatatgtgtgtgtgtttatttttggggtccaataacttcaaatctttctaatacagacaattcaagcaacacccctttcgacctttgcaattggcatatgcacaatacaagtccatgtgatgatgggaatgtctttgtataaaaaatttgttggtagggcttggtcttttttcttcttgggtgaagtggggtctcaggcaaaatactagctaaaaagctatgatattttgacaaaaggcattgttttgattttaggcccagctcacaacctcatgtgcgagaagaccattttatatagtttatataggataggcctacctaaaaagcttaaacctaatgagatgggcctactctctttcttgtacagcccatttttggagaagattgtaagctttgtttgtttggaagctaggaaatgacaataccaacaatgaagagaggttagcgtagagagaaaatttatttacttcttcctcattcctaccaactataaaaagataagatattagaaccaaatgtttacatgattatttattacattgcaaccaattgattgcaattccacaaactaataatatggcaaataatttagtaacaaataaattgaaatggtaactatattgttagaatatgaaacatagaaagtgtgtgtaaatattagggtaagtcgttagtatatggctttaaatagatattttggtatttatttgttttgacatttataaaatttttttagtctctttttattagaaaggagtgacccttaatcctttcactttaatctttcagttatgattatagtactgaacctagtcctatttgtagcaaatagtaagtgtagttgttagtgtcagttaatttagttaactaactatcaactaaccaagtacaacaaacactaactatcaactaatcaagtacaagaaacactaactatcaactaaccaagtataagaaatctagtaaaggtttagaagttaactcttgtaaaagtttttgacacacattcagtacaagaaccactattatttttctctatttattttgtttattgtagaattggttttggtgaactttgatcaagctcaagctattcccaacagatttgtatcagagcatcatggacgatttcgaatagaaaggtgaagattgtgaacattagttgtttgaagaaccgattctgagaacgatggacaatgtgaagttcaatcataagaagtttacggggaagaattactttggtttgtggagggtaatgatgcaagctcttctggtacggaatggacttcaagttgcaatagaaagtgaagataatatcgagggtaaggcagggaaggagacgtccaaactgctggaaaaaacacacggtgtcatcattctacgtcatgggcataagatattaagatcctaggagaagtattcaaggagaagagtgatgcaagtttaacaaactactacaaatctaggctttaaaggtatttttaaggcctttcagtattgattttggcaaaattcactaccgacgttgatccaggagacgttgtaaagctaaaaataaccgacgctaaatgttacccattggcgtcggttctttgataataaccgacgacatatatgcattatagcatcagttatatacaaataaccgacgccatatgcacatataaccgactttaaaagcctaaaaactcacaccaaatcattaataattatttttttcaaacctattataaatatatatttattaatttataataaatattatttaatttaaatttaaattaaatacttatttttttaaaagctcaataaattattatttaaattaattttatgttagccaatatatttaaattaatttcatagtagcaattaaaaaaaatacaattatatattacacaaatattgtaaaattagtcaagtgttaacaagttaataaatctaattagaaattaacctgaaaaaaaaaataagttagggaagaaatattcttataaatttcagcatcaattgtccaagcctacgtgaatcactgccaacaatggttctatccactgtcagtgtaatggtaacaatttaattttttgattatatatctgtttttttccaaactgtaaaaagaagtaaaaaaattatattagtttatatatattattatttgttattataataaatacgataattaataattaaaacttatagctttttgatcttgtatataactgttggggtttacacgtgtgacgatgttagtcatgtatttcaaaacataaaaccacattctttagtttttaggctgtctttgacaatttgctagtgaaattccttgtcacggcccaagatacgcatttgatgcccctataatttggtatgatctgttttaaaattatgttatttgaattcattagttaattaaaaattttgttacataaagagtaattaaattcttacctttctaacattgtagtaatttatgggggaactttgtggccacgtatagggtctaaatggataatttttcctggtacaacgatctctaccatccaatgcgcactaaaaaattatattgggatgtatgtaagatagtataaaaataatttcaagttataatatagaaaacaattagcactaaaaaattaaatagtgtttacccgatattctaggaaataaagaacatttggtggttgttattcatcgatgataaccaaagggccaatcatttgacgcattctcaaaagacacattttgttcttcattgttgataccattcactacgagatgctttgggtcgcaaatcatgtatgctctctcagatgtgccttcattaaattgttaaatattagtgttttataataatctcactagaatttaatatataaggttaattagattaaagaagtgtatacatcatcaaaaagtattccttggttgtcgatgaagtcacacaatgtcacctgctgcaaatcttctccagataacgtgatatgggtacgaggtgctatgaaacctcaagctacccaaattgggattatataacatttttctttgtctcttagaaattcatcaactatctctttaagtgacatgggtattagtgccatgatttttggtgtgaataattcatcatcttgatcagcactgccttttcgagaaggcatgtgaccttttcctttcgacacatcacatcttaattgtggttgagctagtggaccctatacaaaatactatataatatatcaaatttgatcttaattctactaaattctttgcagcataacagctgtaattgaattcccccaaaaattttaaacatgcataatgacaaacaaaacagataaaacagttgtttattcatcaatccaaccgtaggacatgtattcgcaccacctacttcactatggttgaatatttaagatattcaaacnnnnnnnnnnnnnnnnaattaatttataacaaaagttacctcgggtgctacaatgaggtatttgttagaatt

SEQ ID NO: 114090 - DNA, 2642 bp, Cannabis sativa
  modified_base (2592)..(2615): a, c, t, g, unknown or other
ttatattattttataacaattatgagttttttcagaaaatcatgcttaggtggcatatgtaattgttctagccaaaaagaaataaagaaggaaagaaagaaaacgtggcatgacatgttgtttgtattaattgtaacacatgtcacatttggtaacacgtgttccgaaccatgcaacaccaattgacaacccatgtatctgttatccctattctccgtcctcataccattgctatcatgttatgttcatatcattaattttttcttttctgccataaccgaccagaagggcataaggacgataagaaagaaagcatgtcgaagagctggatacaacaaggctacaccaagttatctaatattctaggcaaaactattccaaagaagcaaacctttacctttcccgtcctagagggccaccctacggcccaacaacatgcagaagtggcagcccaggcccacgattccgtccaaagaaaaacaagtgatcttatcaaagagttcaaaatatatcgatggaatccagaccttcccaacaacaagccccaccttcactcctactttgttgacctctcaaactgtggtcctatggtaaaaaacataactatagtatatatttatgtgtgtggtacttttccaattttttagatttgcgtgtgttgtaggttttggacgccttacaaaagataaaagcagagatagattcgagcttgagttataggaggtcttgtagggaaggaatatgtgggtcgtgctcgatgaatatcgatgggaccaacactgtggcttgtctgaggcccattgatacaaacacttctaagcccactgttattactcctctccctcacatgttcgtcattaaagatttagttgttgatctcactagtttctaccaccagtacaggtaatactttatcgttattatgatattaatccgatgatttcccaattacaatttcgacacttcataaataatccttacaaattttactcacaactttaattgtgactaaagtaaaaaataaaaattgtaattaattagaaattattattgttattttatgattataataatttattgtgattaaatatatttatattttaaataaaattaaatttgtaataatttatatttaaatattatattttacgtacaagtaataattttggtgtgaataaaaattattttactaaaaaaaattatattataactaaaaatttatcattaaagtagctattttcagtgtgaatacacataaatttgttatcaatacttctaattcatccatataattaatgtaattgtaattcattcaaaccgaattaattagtgaaaaatatatatacaactataactaaaataattttttttttcttattggataacaaaatttagagttaaaaaaatgtgcaaataatttttatagttatcttttatagggtaaatacttgttataaattaaaattgatatctttatctggtttctgttaccttattacccgttttctttttaattgtagtacccactacccagtgattagcgggcggccgaagggtgtcatgccccccatattaaattttatataattttacatgtattggccccactaaattgactccgccattggtagtagccattataatacattcgttaatggcagttatgtatatatgtaggatgatagagccatggctaaagacaagaagagcaccaaagaatggtggagaatacttgcagtcaccaagggagaggaaaaaactagatgggttgtatgagtgtatactgtgcgcttgctgtaccacatcctgtccttcctactggtggaaccctgagcagttcattggaccggctgcacttcttcaagcttacagatggataagcgataggtatatataattaattaattaatgcattcatcaatatcatgtatatgaaaagctttcattattaattaattatttggcagccgagacgagttctccaatgagagacttcaggcattgacagaggaccatacaaagctatacagatgcagaagcattaagaattgcacagcagcgtgtcccaaaagcctcgacccagccggtgctattaggaagatgaagaccaagcatttgctttctcacccagtacagttaacggaacacccaaaaggacaagggctgtaaagcctatctatcctatatgtataaatataaattaatacatagtcaagcttgctatatacgttttccgttttgtattgcgtactttgactaaaatttaatgtacgcactaataagttaaatgggtttgatatatactttaatttttgttgatcaaaacatttgtagagttagcatgtttaaacataacaaaatttgcttactgtatttattttagttagagagagaacgataaattttctcagaattagacagtatcagctttataatataactgaaatcttggttcaactttttattttctctttgcaaaagttaacttgacgttaactcttaactctatagatatatataaattagtaaaaaactacgtgcctcgcacgtatattaaattttatactagtttttttttatgttatttgaaannnnnnnnnnnnnnnnnnnnnnnnaaaatattattagttattaagtgagat

SEQ ID NO: 114091 - DNA, 2347 bp, Cannabis sativa
ggagaggaagaatggacaagcacatagagctttcctattgtggttttgaagcatttaaggttcttgccaagaactacttagatgttgagtcacatgatttgttctctacaattgagcgtttgttgggtgaaactgatatgagcccagctgatgtggctgagaatttgatgccaaaatctgatgaggatgatgcagataagtgtttgaagaatttggttgatgctattgagattgctaaggaagaagctgtgaaaaagaaggctgaggaggaagaagctaagttgaaagctaaagaagaagaaaaggtaaagactgagaaagaaaagttagaaaaagagagtgaaacaaaaactgatgaagtaaaagtgaaatgtaaatgtggtaatggaacattagataaggaagtaaaagaggaaaatggatcatagagtgagtttttcttttggtaagaaataagttacattagtgttttgattaagttttgatatgtattgtatggtctgattcatccatgtttattgcttttctattttagctataaagattgttttgggactctggtttgtcctgttgtacttgtagtatcatgcttttgcttttttttttttgtaaaattcagataaattggccttttcaatcagtaatggccatcttatgaccttttttgaattggtttgaccgttttgtcattttgtgttaaaataaaatggccagcaagaaacccaacgtacttttctttttattaatatgcgatcacattcacactcacacattcacaccacattacataatacacccaataatttattagtttaaaatatattagtccctttctaagtctaacctaaataaatcattatagtaagtaaagcttttatttgaagataggccaattgcattgtccatgccacttggatataacaaaacaactaatttaaatgtgtgatctgaatcgaaaccattgggcattggttgtttggaggaaaaacaattacattgataagttcaaatggagataaacaaaacaccgaaggaggtgtgaaaagacaattttgaaatgatttatttatggtttttaaataattatgttaattgtattaatatatgtgtgctactcatataagaggtgtacacataattaatttattgacatttaatgtagataaataaataatattttaaattcggaaagttttgcccttaaaatttgagtgtagaatgttaaatgtaagtaaaattatagttaaaatggtttgaccggtaaaaattcgataatttatgatagatcttggatgtggatgttttccttttagatcatcttcaataaagtgctatgatccatgtttattaaattatattttaatagtggtatataatatagtttaaatttgatacataaaaaatgatgttaaattttttacaaaaatatgatatgagctaaaatttacataacaatacatattacttttttattaactttttttatattagtacctttaatgatttttttatattttatttatatatttaactagatttttatacttttaattaaaatttaatgtatttgttgattcttttacacattttcattggaaataatattaatttatcactaattgaagtaaaattgtaaatttaggctaaatataatattaactcaatttttgagctatatttaaccgagaatttacatactcaattgaagatggtataagactatctttaatttaagatataaaatttgtgctaaatttgacacaaaaattaaatttatattacatttagcccactatttataattgtgctctaatgtaaagatataaaaaaatataattattattgatcatcgtttaatattttattaaaaatatactaacatcattatttatttatttattttattgtttaaataagggtaatatagtaaataaagaagataaaataatataaaaatcaataaatcataaaaattagtgacactatagtaaataaaaaaaatgtataatttattgtggattaaatttgacacaatatattaaattttacacgatgttatatattgtgtcaaatttgatataatttttaatatatgctgaatttaacacattttttaaaacattattagagtaatgttttttttaatcgtgttaaaatataataatatactactttttttttagtactttaaaatctctataactagcacgtaatgcccaccttaaaattaccataaaataaaaaaagtgaggatgagatgtgcacatccatatctctattgttgaaaaaaaaaagaaaaaaaaaaaattaatgcccatacactgttttttttttttttttttttttt

SEQ ID NO: 114092 - DNA, 3393 bp, Cannabis sativa
gcgggttacaattaaatatttgcaccccgatatttatattgagttaataaaaatatgctataacccggccaaaccgaccgatgtacacccctagtttaaacccttgaacacatctttcaaagtaatgtgttggatgatcttccccataccgcattaaaagcatatacaatgactttaaccttgtgcagcgtgctacgctctgcctgtctttctacacattctctcggccgaactcacttacgaagaagaagagacaaaaagtaccactcatcctccaggtagaccctcctgaactaccatgtattttgggaaaaattttaggcaaaatatcccatgacccctacccctaaacacacacacacgcccaatacgctttatatagccacttgagctagccttcaagtgattaattgaatatgagttttaaatatacatatatatatttttaattttttttgttgtttttaaataaatttaatttttaatgaaattttaaattattttattaatgtgaactaattagcgattgccacgtatgtattatatggccgttaatgtcaagatagctatggttgctaataaattattgtagcgaaatgtatttagcccaaaaaaagacttaggtatatttaagtgctataaatacaaaatttatagtatttttctcataaattactctaaataaattatatattatcatataaaaaattgaaattaaaattaaaaaataataataatcaccaatgaagttaaaatgaaaaaaaagaaacttttagagtagttaatcatttttctagctctctaacatgcattaattcttaaaaattaaatttagagtgtcaaccttctattataatttttttgtcaacttttgtgttcgaaaatacatgtcggaatattttgtttcaatttttttcatggcaatgttcattataattataagatcatccatgtaaacttttgaaaaattacaaataatttacagtgcagaaagtatattaaaagtttttgaacctgcatggtagaataaaattttaaagactttattttcagtactgtaaattattcgatttttcttaaaaaatttacaaaaataatattgtaactatatagaatattcttatataaataaattcaaaaagaaattctagtatgtaatttcaaacatacgcgtaaaatgactaaaaaattataatagaagattataattaacactcttcaaacataatacatttgcaatgacttctattcttcctctcttccaaaatagctagcaaatttgccgacactacactctctcaacatatcaatccaaattattaagtaaccaactataactttatacatttattacaatattatatacaacatattatattagaaaatataaataaaataattagttcaacatggccaaattttttatcacatcaagaaaaagttgtgctacatatcttgtactttatttttaaacttttttacacatgttttagcaatcttatcatatatcaccaaaaaaaagttatataatattttcaatattgaatttggatttgattacaattattactaaagctttcacttgcgtgcacaactcaatattggatctcagtgcaataaaaattagagcaaaattcttgagaatattataaagaaaaaagttattatgaaaaatgtcatgtattcacaatatcataaactataattattagtgtacataattctatccacactacaaaaaaaaaaaaaaaattattcttagtcataaaaaaacttgttactaataaaagtaaaaaacattatgactaattataaattattatttccatattgtaactaaaatgtctgttactaaaagtattagtcaccaaaattaaaatttgttatgactaaatgtatttttaatcacaatacttgttgtaattaaaactaaattagagacttgtctctaaatgttatattttagtcacaagtaacttcttattgtcactaaatatagttattttttgtagtgtcaatataattacaactaaccgatccaatcacaatcgaccgccaaatattggatacccaattgtaattggatcaaatgttagacgggttattaattcaaaaatcaatacatctaattatgatcgaactaattaatatttttatttaatttagataaataattaaattttagattgttatactttaaatatatacatttatatatgtatatatatatatatgaaaattaaaattaaatttttactttttttattggattggatggatccaattcaatctaataaatattagatttaaagtattgtatgaattcgatccgatccaaaaaattctagtctaaaatattggataaattcaaactaattcagttaatatacataaaatacatctaataattagaaccgatctaatccaacatccaatgaatgttggatcgattggatgactaatattaagtggatcaaacccgcgtgataataaaatttaacatctaatatatataattaaatcatctagatagaactaaaaaaaaataaaaaatattcaataaacaaccttaactatctataatataagaagttttcacattaaacaatcatgcatgaatcatcattcaccattgaatatcctctttaacattatcaaaatttgttattatgagtttttttgaattatgtacatgacccaacaaaaagaagagcctagtaaagcttccctaccactatatgtataataagtacaaacatcatcaaatgtaatctccattttaaaagaatgatttatatttaatatgtcgggataataaacagaagtgactctaatgaaatatatataaaacaagtgatctttatgatgactactattaattacctaaacattggcatgcacagaatgctaagtgaactttacggtacacaattattggactctttattttaaaaagaaaatttattgtattttgaaagtaaaaaagcatctgtatatttttaaataaagaaaaatatattttggtacatgggcaatacgagttggactttttaatacgacccaacacgaaaaaatatagatttggacacgacataatacgatttgaacatgacacggcacgctgcgaaaaaataggcttaagcacaacaagaaaaataggattaaacacgacacgacatgacatgacaaacccgaaggcatgacacataagcacgaataaactacccaaaagcacaacacattaaaaattcttataatttattaataattgtaatagtcagtagtccagtgatctgtaaggagaaataccgagtaagttgtgcaatcccacatcgtctggaaaaggtcaagtttgacaactctaagactgtgtaggtatgggactacacagtt

SEQ ID NO: 114093 - DNA, 4324 bp, Cannabis sativa
  modified_base (2818)..(2818): a, c, t, g, unknown or other
agagagagagagagagagtgtgaactaagtgaattttctaagttatcctcctatatcagccatccaacactaaccccttttctataataaacttaatatagatagtaaaatatgataaataaagtcatataagacaaggtaggtgtttctagggtattgactaatttgctttcaacaaagacaaaagcttacccacaaagaaaagggtaacttggcaatttctaaattctgacatttccgaagcctaactatgacaccctgctaaaatattctaaaacatacaaaatgagactctctagaggcccaacgttgctttccaccgcttccgaacacaatcacataatacaaggaatttacatatagcataataaacatatactaacttaaataaatttccacaatatgtattttataaataataattaaatctcatgcataaaccctaattatttaataatccaaagtgttaatcttaggcggtctttacattgggccatttgcaaacattttttcaaagaattctttctgggcatattctctattttcatcaacaattaagatacgagtgtttccaagaattaaacggaagcctctggtcggtaaaattaggacccaaaacctagcttgacctggtgcctgggcccagcgcctaggttgacattttgtcaacctatgccagttcaaatcattttctcaaaaaagtgttcaaggcatcttttttgttttcaaaaataaataaggtacaagtgatatcggggaaaaaacaatatcatttggtagccaaaatagggccacaatgcccaagttgacatgggtgctgggccctacgcccatgatgacgtataacctagctcacatgtttccgctcctcaaatagaaattctgttctgggtattttctcacatttttttggtaaaaaaaaaaaaaaatagggtaggagacctcgtttgcaatctaaaatgcattaatattaaagcgagccccaagaagtccttgaggagcacccatcgcccatgttaacatatagcttggtgcactgggtcctgcttatatgattctgcttccgtctcgaacatctaactattttttttgtagtaaacaagagctacaacctgtgacaagtcaaattcataatttgatatttcaactttttgacaaagtaaaaaaattagctgcaaattgggaagtttcgagtctatccgatttcgcagaaaaagtgacacctccaagaatcggtgaacgacttcaaaactaaaaaatcgactacgtgatgtcaaaatatcacttaggcattaaaaaataaaagtttgggacattttttccctcacacaacatccaggttgacattagtatgttaacctgggcactgggaactaaacaaccttcagtaaaacgactataactctctcattattatcgatctaattgacgcgatttaacttgcattttaaagctccttcaaagctcttccaagtcatgtcttacacccatatcatagttctgaagatttcaagttcaaatttcatccccaaggcaagtgagattttttttcacaaattatcataacacaatccaacagacgagatctgagcttcaaaaattgatgatcatcatctagagtcatttcccattagatcatcatcaatgacaaagattaacctaaaaatatattttttttcatattttattattattttaataggacatcattcactataaaaggagagctccactagcttatttttaacattccgagaaaagttcataagattaaagcatttctctccctagaaatatagatattttgccttagtcaatttttttgtattctcacgagcaatataaactcaaagtagacatacctttattaccgtcacgacacaaaaaataaactactataaatcttgtgtgtttctttcatttattctacttaatttctattcctctcactaatctaacaaaccagtgttaattagtttcctgcgtcaacttattatttttatatatagtattatatactatactatacatatttaaaggggatgaacctcatactaataatttccatgcggtgcaattaatttcaataaatagaaaaactagtgattaataatttcctggtttgaagttgaaacatttgaagtcaacccaaagtttccttgaattgggtggaaaaagaaagttatggacgttagtgactcaatgatgatcaatcccattatattaagggtgtgtttgttatgtagggagaagtgttgagaagggtgggaatttgaattgcaccccacgtttggtgtaacttgttaggtgagaatgtggtgggtatcacaaaattatatgaggttatttgtgagttggacttagagggagtagaattagagggtgcttattagattaaggaaaataaaattaaatattagaggggattaatattaccatcaattaaacttaaaaaaatagaacccacttggaaacacaccctttatggaaattaaaatttcatttgataatcctcttaagtttgacactaaactttaatttattaaataagggttaagttttgacattatcattcccactaagtctagtcacatataccaaacaccatatgaactaccttttatactcttgaatttcacattaccccatcctaactcttatcacaagttcctagaacactcagatagttaaaacaaacatgacactcctattaagaaaatgctaattaggatttttgtctcctgaactttgacatgtaccaaatcatatcccctgaacttttaaggtcgttaaaaatacccctgaactattgagattnttggatttaaggacttttatctaattatttcaattttactatttcagtgactgtttatgtactaaaccatattcctcagactttaatatctaccaaatcatgcccctcggactttaacatgtactaaatcatgtcccttgaactttcatccatgttaaacttttttactaaaattggaaaaaagtccttaaatccaacaatctcaatagttcaaggagcatttttaacgaccttaaaagttcatgaggcataatttggtatatgtcaaagttcaggagataaaaattctaattagcctaaaaaaaaatacccctaaaagtgtgttaatataaaatgggaatagtgtaaagaaagatatacatatgacaccggtatattaccactttcatcaatgaagataaaatacttttttagctaaaattataaaaaaaaaaatagctctataggtaaatatacaagggcaatttttatttatatacaagtaaatgtacaatattacaaaaaatgtgcaaaaaaaaaaagatataattacataattctatataattttataaatatttacaaataaacatatatgtttacaattttaacttgtttattactttcaattgattttctaaaaaaattattatcataacaatataaagtaaatatcagtattctacctaaaattattaccaaatatcaacatgtcgtcaaaaaaatatataaaatatatataaaataataaaatttttacaccaaaaatacaacatgctaattttattacatatataccaccacacggttagttcaacatttgtacacttttccttaagtttattacatttttaccacatgcacacacaattcaacctttttgacacgtcagtgattgatgtattacatcagtcactctataaatcattttcctcccttttctcttctttttcctttaattttctatttcttttcagtttttttttttaaaaaaaatagtaacctccatagctgaacacttccctctccacgatcccaactccattttctctcttctttttgttcttcaaatttttttcaactcccattaaccgaatcccataatagttttccctctttttatttttctcttaatccatatataaatatggttgtaactcattcttcatcaactcctttcccctattcaaaaaaaaagttctaaaatggggttgaaatctttagctaatagaaacaagggtaaatgacctgttgttgaggagaatgactctgattttgctcctccactgtcgaaacgtgggcaagttcctccaaagaagaaattaaaggtggctacccatgaaaaaattccccaagatgatgctaaaaaaaatgatcaagatggagttggtcttcggtatcaggtttgattccagtttctttttcgtttcgcccctatttgaaatttatttgtatttgctatttgtgtgtcttctgtttttcgattttactattctaggtttttcattttagcatttcgtttggttt

SEQ ID NO: 114094 - DNA, 2795 bp, Cannabis sativa
tgtatagagtaatgatattcgactccggagattttccaatatgttttaatcaatggctaggccaacgaagcttgtgttcattttttccataatttagtccatttcagatgttttaatcgttgacgatctgaacactttctaaacctttttatctattaggatcaaagtataatttggtgtgtgcactgttatagatatcttttgagccatttcttcaaagtggaactggaaaacaaaataatcatataaataacaatctgcctttcaagcttctagaaacttgttcacctattgcggagctccattttgtttagcagcatttttatctaaataattttcccaaactcaattaacagcaaagtcaaatacaaatagagacccaacatttcgaccaaaaaaaaagtattagatgatgtgtatatggattttgggatgacagggacaaatgtcacatgtccatgagagctcttacatagggcgggcggcagaggagatcgagagctattaatggttaagttggtggactcaatgaagcaaaataattttcccaaaaagaacaaagatgtattgtatattcaccctgttttaaaacatcactatggcttagatcttggaaattgagaattttacagcactacaaatgatcaagaattcactgtgcactaggagacaactgctttaatttagcttgcaaaattgcccctgcttcatctccaatgcttttctttttagaagcaacctgcattccaaatttcaatcaatgttaataacacattacagtaaagaaaaggctgatataatagagagatattcaatacaagtagccagaactaaaacatttctccttaccaatctgatcaacaactctttctttcaatctcttaattatcaggcaaatatgtatatgaaatattcatcatagtacacataaaaaatgggtaacaaaaatttccaaccagaagtagagctgagctgcttagatccctaattaatttttatgagttttgcaagaacatctgatctcaacattcagtatactacagaattttagttcaataaactcctaataatctgacaatttctataagaacacgaaattaacatcacatcaaagcaattcgtgaaataaagggatgtagttgtaatcggccaaatatgataatcaatttatcataatgaaaaactccagctataagttctaaggattccactctctacatatattttttatttttttcatactaggatcctgtctaaccctacaatatttggggaccaacaaactaaagccgttgttatgtatgacccaagagggacttgaacctaacactttgtgagagcaacccacatgcctgaccatttaagctacccctcttggatagaattccactctatatacattttgtatgttcttaaagaacggtatttctgtccataaaacttatgtgttatatatagacaatgaaaacatatagaagagagaggaagaatggtagaaaaattctgggatgaaaaccaagattaatgctatgcatctgcccaaacaaaatcacgtccattgaaatttaagtcggttcacttaaagcaattataatagcttaaggattaaaactctactgaacctttgtgtttgccaaacactaataaataaagagaccaaaccaagaaaacattagaaatagtttaagaggatgaaaaacaataaaatcgacttatcactgcaaaatctaatgtgtctgataaaacaataaaaacattgaacttaatgtagtatataaaaagaagaaagaactatttatctaacacaataacaaaacaaaacaaaaatgtacctcaagaagttgatcgaaatttgatttcagcaagttgatcttccgctcacaataatcttttccctcagccattgttttctgttacagagacaccaatcaacactatcaaaactctcaacgagagaaagcactatactagaatactaaactcagttggttaaattttccgtatccattcatatcgatcgttccatatacatataattgtaagaaactgcatttcttcaacaccaattgagaaactactaaaagcctagcgatattataagcaagaacagtgattagttaacttatatgatattagtcagaatccctagctattaccggattacataaacctaaaatttaataacataaaacagattttaagttctagaaagatcgaccatgaaaatgaacaagagaaaaagaagaaggaacagacctcgatgaagtaaccggtgccgacatcgaccaagacgttatcggcgtcgtctagggttccagcgacgtagagagaggcggtgagagggacgagcatcttcttgccttggggacggagagaaaggtcgttgagagcgatggaggcgaggtcaagacgagtggtggcggttcggatgttgttgagactgtcttgcagcagattcacctccatatcggtctgctctttcaccgccttcagctgctcgacgctcaacttctcaattcctaatcctcctcctccgccgctactactaccgatcccccctttcaacgatgccattttcttcttcttcttcttcttcttcttcttcttcttactcttcgtctgttgctcccttcaattcaagtttacacctttactattttcatccttccaaacatgtctttcttttctcttagtcaggaaaaaagaaaaggataattttatttacaccaaaaattcttattttaataatttttattttatataaaatttatatatatatttttttaagatgaaat

SEQ ID NO: 114095 - DNA, 6275 bp, Cannabis sativa
acaaacaaacaaacaaaccattctcccaaaataatggctcaattagatcatcttggtgatgtaaaaattgaattatattttatacaaaagtaattttgtgatatttttatatcaacttttactattattgtccaatgcataattgtaaatattgatgtagaatttaatatgttatttaatactcactaaataatttattaaaaaaaatatataaaataataataataatgcaaagttaaatgtaaaatttaataataaaataataataatgcaagtcatttaatgcaaaagagtatgttagctaaaatttaatataaaatattaaaaatagtataatggtaaatataaaagcatagcatttattgtgatgtaaattttgcatcatgatatattgtgatgcaaatttagatcacttttaattatgtaagattttcgcattataatttaacacactattgaaatagacttttaataaaatgaactatattttgtatttgcatttccactggagatgttcttatgtatcaaacactaatgataaccattatcacacctgaccaaaattgtacctaaacaaacaagttaggcccgtgcttagggtctatattttttggggggctaaaataaaaaatagaatatcatttaagaaaattaagtgtattttaaacaattattcataacttagttgattagagtgtatcacatattacacaattgtgtgggttcaagtcccgtaacactcttttttatatatttttgaaagtgagggctctaaaatttaaatagtcttagactcatatattttcagggattgaccttgcaaggcagtggtggtatcaccatcatgctaaaaattgtcttggaaaatcattctcactttacaattggcaatttgtcttgagttaaatggggggtcgatatattcccatttcccacctgtggtgttccccacaataagattttactccgaaccagacatgtgggaggggattcctatctgggacattttctcaaacacatggaggtatcacaccaaatataatggaaagcaaaaaacatcactatatgtggacactaagtgccttaattttagaaaattgccatttttgaattctggttacatcatcttgtggggtagcaaggatagcaatacttgctaagttatagatgaggacaagctattacaactctggagttacttttcactgtcatttttctaattgtacagtttgttgttgtgatcaatttggtatgaacaagaaaaactatgtaaaaaaaaaaaaaaaatctaacagtagtggagattgattgatatgttaaaactaaaccaaatgggaatgtttagtgaattttttgagaaaaaatcttgtgtcgtctaaaatatactaaaataaacaatatagctcaccaatcttaggtttgttgtgcaaaaaaattcagctatttcaaagagtcctcacggataactatgtccacaaaccagctttctacaactagatgtctgatcattggaagggtcgatttcctgctgtgatatctgactatggtgatgatatgtttaaagtttcctttggctgtgtaggagataaatttaaggtcttaaacgagaaatcttgacactttcaaaaccatctcactatgttgtacacacaagatgttttacagtttgtctcaatgaaggaactgatttttactcccttttgggtctaaatatatcatttgccttcctgagtaaatccaaaccactagcacaagcattgggtgatatcattggagaatttgtagatgtccacgagattcactcgatgaatgatggggccctttttgagaatttgggtgaaactctcggtggttaaacctctccctcatagttgaatgataagtctgcagaaaattaaggatgaattttagattgaattcagatatgagaacctccctgagttttgttttgaatgtggccttcttggacacccatttgaaaaatgtgttgcttttatggagcgcatgtacaatggaaaatgatgatgatgatttgttgtatggggcatggatgaaaggtgctaaactctaacaactggacatgacaagtatagaatagacttctctaaagggaatgcctggtcattcttaactcgccttgcacgcaacaccctcagttcctccattccacaactaagtactaggaatcaacctcaaccaaaagccttgttcagaggagagtcctcaaactagtagatctcctcttctccatatgctgctactggatctgatataattgttactaactctcttattttgccaattgaaaaccagtatatcactaataaccaacccaaactcctattctaatctcctttggcatgcataccactactaaaccaaatccaggcataactacatccgtttcccacaaccccttaccaattacatatgtcactggtacctatgtacctgatataagggctaccactcgaccccatatcccaattgccacctatcccccaactttgacacctcttttcatgccaagtcatctttcttctggatcatctctcaatgcctctactcccttaatgaccagttcatcaccaatcatttcctctgggtttagcaccaccattgccagtaaagaaaatgcgttccctaacaaattgtccaagcgacaatgtgagccactttctatgagacaaatgctcaagtgttgtcgtaatcaaagttttggtcttttgctccttttttgtcacaaggagaagcctcaaacttgaatgttggatgaaaaaggttgagatgcatctgatgtagaaggtgttggttgcagtttttggttgagcaatgagataagtgtttggataccttcatgtttggttagtttagccagaaactgatcagcagaagcagaagcattgtgagcagctggatggttatttaaagatcttttgctcctatatcttagaggaaaaccaatcaagaaataacacttgttgtctttcaagtgacctggtttgtgacagttagaataatagggtctcatttttttattgcgtccagagttagtattggatgctaatgccgagggattttgggcaagagtagcagaggaataagtgtttggatcttgagcagaggtaataaggagaatatgagagttcttgagtttcctctgtctttcttcatgtataatcatggagaaaactttggacggagaaggacaaggttctagttgaagaatttgagctcgaacaggaaagaaagattcactcaagcttgtgagaaattgtaaaacttcttcttcgtttacaaaagccaagttatcagcggaagcaataaaagtacatggaattcttggtctgagttcttgaatctcatcccacatacatttgagtttaataaaataggaacttaaggaatcttccccttagcgtaaggtgatcaaggtttcatgaagctcaaagatccaaggtccattgtcttgatcaaatctcgaattgagctcgatccacattttagtagctgtgtcaagaaacatgatgttgctctttatctcggatgtcacatagtgaagaattcatgagatgactatctgattgcaacgaagctagtgattgtgaagaggatcaattgccgagggtgaaggaagagtgccttttaggaagacggacttgttcctagcaccaatagagagttcgaaatcacaacattatagttggaagttgtgatcagacaacggaggagtgaccaagatcggactaggatgatcactggagctgagaaaatatggactagaactatcttcatgcacaggacgagaaatgggaagaagattctggtgttgatgttctccagagatattggaaactggaggaatgatcggggtttctatcaaaggagcgtctggaacggaggaagaagtgtacggtggaggaattttgtcggagttcctaaaaccagtagctcgtgttctaaccatggtgaagcaattgtagaaatcttttcaagagagaaagaaagagtttaaacttctgataccatattaaaaatcaagagaatgattttatttaatgaaaatagagtatttatacaaaaggtctatgaactaactcaagcaaaaaggagtgttaataactaacacaaccaaatacaattagtcataacaatccaactgacagacctataactaactttaacaactaagttacataacaattctaatagcaaaataaaaatattcattccaataattctgaagctccaataacacttatttttctttgcaatgaattttattattatatttaatattaaagatttgtaccacttatatgtgatatactagtaaactgcctgttcaaactatattttaatcaaattttctcaacaaagaagaaacaaactatattaatcaaataaatttacaagtaaataatcagaagtagtatagatcggttaaaaatattatgatagaagtattatctcactctccttcaaaataccacaagttgagtttgttactataaattctagagtttgggttggtttggaaacaactgtataattattatggtagtaattacactgtatagtaattatattgtattttaaaatacaaagtgtattttaatgttaagtattaattacaagtgaatttttattgttatatttggcgagacagatagtaattacacaataaattaatattgtgtaatatttaatattataattgttatcattttataaaaaaaaatttaaaataaattttatctattagtaatattataataaataaaaatctccttataaaataaattcaaatttcataaaaattttgtaacaaatatttaaaataatttttaatttttatctattaagactatttaattgttcttgtgttctatacatcttgagctatttcatttggtgtacagtttgccaaccttaaaagtttaagtatgcgtcattccaatgtgtattatttacaaacaatacaaaaaaaaaaaaaacactaaaatattataaaatagcactatacatagaataaaaaataaaattatgtatatgagaaaagaaaatatataaaagtgaatgactaaattcatattaagtacttattatattaattaaataattaaagttagttttggtatgtaattacacaaaataattacactcaattttcatggagtatgagaattgagagagtgaagcttttcaattatctctaattacacaattactctgtaattacgtgattaaataaatacattacagtgtatagttaacctctaattacatctcatttaaatttcaggtctttttctaaacgtgtccttaatttattccattattgtatcacatttacaaggttatctcacgatttatgcattagtaatagtaaagtctaactaaaagagcaggaagtagtcctattttgtacatatacattaagtggaacaatatatacattaaatgtgggataaccttgtagaagtaactttaatttgctttgagttggtaaaaacagcataggaatcctcaattcgagttagagcatcttgaatagagatgcaaataagtaatacatatgtaaaatatagttcattttattaataatttactctaattgtgtatcaaattgtaatgcaaatatgttacatattaaaaaaataaaaagtgatccaatttagatgacaatataatatgatacagaatttccatcacaataaatactatatttttatatttactataataatatttttaatattttattattaaattttagttaacatcctcttttgcattaaatgagttgtattattattattattattttaataaattactaagtgagtattaaataatatattaaattttgtatcataatttataataatgtattggagtacaataacaaaaattgatgtaaaaatattataaaactacattttatatcaaatatagctccatttttacatagaccctgaatggttgataactagagcttgtatggaatgaggtccaactcctctcttgaatctagtccgtatgtttttagtggcccagtacaatatagggcttccgccgttgatacaacatgggcctttctcacccagtttatagtggaagtgtccatagatacccattttcatatatcagtcttttttttagggaaacttaaaaaaatattaaaatttaggttaattcttacaaaaatactgtcgcacggaaatttttctaaaaatattatatttttataaaataacagtgaaacacaaaac

SEQ ID NO: 114096 - DNA, 3180 bp, Cannabis sativa
tggcaaatctcaagtgttgagaatgctatatgggcgtgtagatgagagagagatatcagacttagagatttaggcttagaatgaggctaggcacttaatgacttaggtcttctagggttgagttaaggccctttatatatgagagcctagaccctaatttaacataaaataaatagatgtttgtatattaaattgattaattaaaaaagactaaaatgcccttaaacatagatatttttaactactttattaggatgttaaggcccaattcacagcccaactcgtagtccacgtgtaaaattgtgcaaaaagactaaaatgcccttacttccccgctaagttatcttgtaaccctaggagtaaaatggtccaatttcattattttgttaaaccctaatattttaagatatctaataatattgccccgtaaaatacttgatacaaatttgtatccatgtgacaaaaattgccatccgacccatttctactattattaggcataaaaatgtgaaaatatgaaaatttacatatagcatgcatatcacacctataattcaataaaatctctgaaattgagaaataataatcataacacatattttcataaaaataggatctataaagcataaaatgcataaataatcacatagttagattaattagtgctaagtgttctactaatctcatgtctatgtataacagtcattacattgagcgtataaacttggttggtatgataaaaatatggaactagttctagtaccaatgtactggaatggtgaacacctaagaaaatactaccaataagtgcaaaaggtctagggaccacacaagttacacaatgctcaaactcttaagtggtggccttctgagcggacctcgatcaaaggttcagaaaaacgactggcactaaggtcatgtgaccactttcaaagtatagttagttcaaaatcattactcctgagcgatgtctttaggcagaatataccattcaaatgtctatgttttaattagctaaaaatcagacaaatcataaaataacttttgataattcaataaatgtacgttaccacgaaaacaacacatatcgaccaataaatgaataaagatataaattattattcaaattgtgtcaattttatacttttttgcaaaattatagcaagttatttgattacctaaaatatgtacaaagggtttgcctaaacttaaaagctggacagacaaaataaaatttgtgaaatgcaagtaaccaagagtaaaaagtctgctcggtcacttaagggcaactatacccgtacacgcattggtagaaaacaagctcaagcaaaaaacaaaattcagacttaaaggaaaatattcatattaagatattaaaacaagataagtatgggattaaaagttgtgtggctagtcattgtcttaaaaaaaataaaaatgttttccaagtttaaaagtcgtttggtcagccatattgtatcaaagaaaagtcatgtaggccgaacagacaaaaaaagtttaaagagtttactccaaaagagtcccaggctcttggtattgattggacgaatcttgagcagcaacagttgagtcttgggcggcagggttctcttgctcctggataatagaagaatcttcaacaacttttcttgcttcttcatcgactttctgtttctcgtaaaagccaagaaagatagtacagagatcccctttgaaatattcataattgccttttagattttccttctagaactcataaaaaacacctagggcaatattttgaactcttcaacttccttttgaagtttttctcgtttagtgtcaaaagttacccgctcgacattaaaagttctctacaaggcagctttctctcagccagctccataactttagctttccggctttgaagctgggtacgaagactttccctctcattctttagactattcacctccttagacaacacctcaaggtcctcctcgagcttggttgtagacgacatgtccttaatctcttgctttagatcttctatgagcttatttgcaacaacaatttgcttgtttactttgcctaactgaaaacttttttgctcatcctcttttttatcatcttccagtgccttcttcaattcactggtagttgttatggcctttatagtagcaaactttgctcgagaataagtatatgccaacttcagattaacttacacggtgaaacaaagttaaaacttgtacgtaacaaaacatgtataaaaacaatcccaaggcaaagcacttactcgggtggcctccttcaagactccactaaccaatagctctgctaacatctcctctgccctagtttgctgctcattcacatcaggcatcatatgatcttggtagaagttaagcctctccttgcccttcttggtttctggctagaatacgggcagagtagccaatggacttggtattctaggccccttaatgttgggccccttagaatttttggccgaggtggtggaagcctgagactttgtcttcttcttggctgaagggacaacattaggagcgtcgtagagtcgacaaccaaactcttctcagtgttaacctgaggagtcttagagttcagtgcaatgctcttcagtagagcatcatccacctttggacgtttgaccgaagacttctgaccgaaagcatcgctcgacctcttactcaaagcacgtaacattctctctgacatggctgcataaaaagaaaaacacttgttaaaaatataaacaaacaaggacaaataatgctaaatgaaaaataactacattgtacgtcagcgggagcaccctcccgaacaagtaatgagggggcatcctcatcagaagaatcatcatcttcttccttgaccaccacaaccttccctttccctaccacctggtcggaaggactagggctgagcatcggacagtttggtcggttttttctctatataaaaatccaaaatttggtcttcggtttggattggtgcaatccgaaaatcgatcgactaatccagaacctatcttaaaaccgaccgtttagaacctcggtttggtcggtttaaaccgcttaaagtgaaccttttttttaaaaaaataatccaatttattctataaatacattattctacattttacaactacaaatatacaaattaattgttcaaaaa

SEQ ID NO: 114097 - DNA, 1060 bp, Cannabis sativa
actatatactatggttaagatgacctgtgaaagaatattaatgaggataacatgctggtgtacttgagttttgcatatggattcatttactagccgacaaactacgaaaaaataatgttaacataaatattgacaagaaaaatatatgtacataaatttactctatacagaaagttaattgaataagaagaaatgtgaaaatatgaattgacttttattttaaaaaattgtgtaatgtagtttattaattattattattatttgaatgaaattatcttcattaatcaagagcaatagctaaaatagacaacatttcgtaagaatagaccatatttcagagggtatccaagcctcctccaaaacacgaccagctaagaacagagccggcttttgaaatataataaatcataagaaaaaataattttttgcgctcttatttaaaaaaaatatagaaattttttcaaaattgataaaaaatatataaatttaaaagaagaatttttttagaaccccttcggccctggctaaaaatcaagaattttttaaaaaggaaatgtgtacgtagctgaatttgcataccggttaacaaaatgtaagaaaacagaattgaaagaaccaaataaagttttgcaatcctcgaagaaaaatataatggaaagagctcccattggcatcaatatataaccaccaaactattagattttacttcagctcgttcaaaatggtgagtcttcagttgactcttgagccaactaattaaaacttcttaatttcatgcccatgtcaggatcaactctgcccaccaaatttcgtgccaaaacggtcaccaaaaacattccctcatatctcgaacacccacactactaaagccaaatcggttctccgtctgtctcgaaaatatatacaatatctatattgagcttaatgcctatatatatcaggtttactccaaagctctggcgaccattactaacctgtaatggggacaaagaaggaatattctcactgttatataaattaacaattaacccaagatctatttgtatataacatagaacac

SEQ ID NO: 114098 - DNA, 2960 bp, Cannabis sativa
  modified_base (2873)..(2873): a, c, t, g, unknown or other
ctcacggtcattacatagaatgttcttaggaatggcagaagtagaaagcagaccaaaccggttgtgagtaaatgcccacttagccacattatgggccataaaattacaattcctggaaatattacaaaacaagcaaccagcaaaagaggacctaactctagtacaaaaataggagtagttttcaatttttcacctaggttccaccctagatatggaattgactactgccttggagtcactctcaacattaataaacttaaaatcatgttccatagcctcctctaaggccaagcaaatagccgccgcctcaccacaaagagcgtcagagtaatccaagtttgttgaggtcacgccaatcacctcacctaggtgatttctagcaacgactgcaatgcacatgtgttctgatcctactttgacatcgctgttcagtatgagccagtcttgtggcggtgggcaccagataggagtttggcttggaggaggagtctggataaaagaagatctataatctgtaaaaaagtgagagacaaaatcaatacattgtttgatattattcattctatgattatgtaccttatcattctgcactctccaaatcgtgtccacaacagtagaagcaaataggaaaacctcatctgagttcacatcatgatgctgaagattccagataaatttaacccaatcccagactctagtccctgtgttagccataggataaattccccacggggacaagcgccacaggtggtaaacaaagttgcagtgcaagaacaagtactcagtcgattctccattcatttcacaaattgggcaatgggtgttctcaataaggaactgtttgttgagggcagatctagtcgagagcgcatcagagagaatgctccaccacaaaaccttatgacgctcaagaatcttgctgttccaaagcttattccattgaactggagctacctcacagtgggggctcctcttgagggcttggataagataggctattttagaagagaatctgccattaccttccttcgtccaaatccaatgatatctcccatgacccgtaggactaccaccttttaaaatggctctagttgtttcgttgtcaaaatggttatatagtttctagagatcccaatttcctctattagtcaacagattcgccactcttctaagtaaaggaactatcccccctttggcctttggacaaaagttcttaccgtgagtgatccaagggtcatcccatatattcgtatcctttccatcagtgatgactttgcaggcgccctgtggtaggatgtcattagcttttaccatattttccagaaccaggaatcataagatttggccttgcacttaagcatatctgttcctctcagatatttagctctcaaaatttggcagcaaagcaattgggatcttatgagcattttctagccccatttagcgaaaaaaggtaaattcatttctttggtttttcgaaagccaaagcccccacgggatttaggaagacacatcttatcccaagatttcaatcccatggttacccttttcaaaaccccactagaagtcccagacgataccatcaattttgttagcgagccgactagacagcttagtagtttgcatagtgtatatcgaaatagccagcctcacagatttaatgagtgtagcacaaccctccttggacaaagttttagctttccatccctgtaatttgaaagtcaaattttccagaataaagttgaaattcgcatccttatgtcttgatgagaagatagggagcccaaggtatttaatgttgcctttcggactgccaataccaagggcatttctgatctctgacctcattctctcaggagtattgttgctgaagaagatggatgttttgagtttattgacacattgccccgaccaatcataaaacttatcaagacaattccgcatgcccgtagcctcccccatattagccttcccaaccaagataagatcatccacaaagaaaatatgggaaatactagggccagtccgattaattttaatacccctgatcttaccttttttcacagtctcctctaaaagtcgagaaaaaatttctacagcccagatgaaggggtacggggaaagtgggtccccttgtcttagaccacaggaaggtctgattcttccaacctgacccccatttagacaaacattgagagtagtggtagacatacattgatcaatccattgacagaatatatctggaaccccaaagcaccttaagacatgatcaataaactaccaactaagtttgtcataggctttcataagatcaattttgattgcgaagaagccttctctgccctttttcctattaaaagagttgatgatttcttggaaaataacattgttgtcttgtatatctctaccagggacaaaaacagcttgagtggagcaaatgatcttaggcaggataggctttattctatttgcaatgatcttggaaataactttgtaagaaacattgcaaggagatataggcctaaaatggtgagtgctttttgggttttgaatttttgggatgagaacaaggttagtagcattgatccccaagtgcattgagttggtttgaaaaaaatcttcaatgattacacagaaattactgcccactacaactgattatgaagccctaatcccataaatccgagattgcaagaaggataagcgcagaaaatttaaactttatttgaaacataataaaaattaaacttgtaataactttaaactttacaaaccaaaagatacatatttcgagatcccgtaaattttttacaaaatattacaagttcatatcacaagcccaccaaagcagcaaaaccagagttacaaaatanatcagtggtagaccccaacccgcttggtctagtgtggcctgaatatgtacaagcaccaccaagctctcgcactcatggctgatcaca

SEQ ID NO: 114099 - DNA, 1820 bp, Cannabis sativa
ttttttttttttttctgaaaggagaaaaataatagtggtttagacggccattgataatatgtaataaaatgacatttattaaataaacatgacaagaagttcaattgacatggtcagaacataattatgtattgcatactcgtgagaaaataaattaactagtatttcctattatcattgacatgttcaatgacatgggtgattgctttcttctgaattggtccttcaacaaccatagcaaatttctcacaacttgacctttgatgacactatttatgccaaatatatatttttgagaacaagctctgcatccaatgaaactttgacaaggtattcggtagttagaaatgtcttgagacaattacacatgtgattaccttaagaacactcaatcaatgaccaaaagttttaaccactcagaaactaacaagcaaattctagggagtaaaatacttctagtacatgcgtataatcaaatgcagacgtatacaatatgagaataagctaggactattgattttttatttttatgaatatgaatatctatggtgaaacttcattttcttattatttagcctttgaatattgtaaaacccttgagccgttacacaagcattttcacaattattttaattaatttaagggaatttcaattgttttgaatgattgccaaggagccaaaagcaatagttgaatacaagaaggccaaagtttaagaaatcccatttgggaattctaaagggacagatggatcacagaataaatgaattaaaaaagagaagcgatggagaagtgttatatcaaagtagagctgcatttactataatagagtttgagttgtatttcaataatgtaaacttggaaagcctcaacacaaaatattctaaagttgagtaaaatatgattcaagagtacaaccatccataaccatattgcattataagcttgtgttacttaatctgtatatattttatccagtagaacgactgcttgcatctcaagcttattgtgttcaaatcatatccttctacccgtacaatggacagagaagagtaccgatttagtgaagatcaaattaagggaactaattatgaagttcaaatcaaacgtcgattctgcaattgtttgatgaatttgacccaaaataagaaaagaaaaatcataactacaatacacaatataaagcaagagtagttacctgtctaaagcagctgaacttatgggaataacaccagatggggatacaagagcatcaactggaatatcattctcggtcattggtataactccttcgttcataatctgtgaggaataggacaatgcaactgcaataacaaaacacatgttttcttcagtaaaatactaaagcatgtttctaacttggccaagggagcatgatggcacataccaaggaggggttgcttccaattctttgtctttgcaagctcttggtagttcctgatgaaagtatcatagtaactgcgcaaggttttaccaaacattagagttagtaatgcacatagtctttgacaactcttaaggtcaaactacttgtacttgaaaaatactgagaaaaaaaaaaaaaacttaaaagtggataaaattctataaccttacccgccaccacgtcctaagcgtcttccagttctgtcaaatgctagtcctgaagtaaaaagacaaccaaatgcaattaatgagatatgtatatataatttaagaattattgtaatgccagtgagtaggggtgggcatcatccaatccaatccaattgaaccgaaccgatccaatccaatccaattacaaaaagttagatatccaa

SEQ ID NO: 114100 - DNA, 6818 bp, Cannabis sativa
tggaggcttgaagcggggacgttacagtggtgctagtgcaatttaaaataagaagtgtcctcacctgaacaacaaatttttaagttcaacaagagcaacaaaactaatgtttgagcctcaaaaagtggttgggtgtatctcaatatcttaagggtcatgcgaataaatgaacattaagtcacttcgaaacatcctgtcacttcaaaactcagttagttctaattgcaaattgatatgtaaaaatatgtatccacgtaaaagaaccgactaatggagtggttgggtcagtgacctaagggttaccaagagaaataagcattaaaactctaggaaacacccaaccattgctaatttttgacttggagacaaatgaacctaaatatgcgagtatgcaaaagggttctactataaagatgcgaatattcaaagttcatcatgaaatatgcgagtattcaagtttcaagcaagaatttttaaagaaaactctatacttttgccttgctttgtcctaaattttgattctcttagtaagtctattgatctcatgtaatttctatccctaaatacccaggaggtatgcaaacaatcaaagagaatatatttataaaagagttgagaaagaaaaaccaaccttttgtacgaagatttgttctcctggattccagtaacactctagaaattcttaagccttcgaaaaatcatttttggaaagtgacagtccaaaattttgaaaggtttttgaagtttgaaatttttagagaagtactctgaaaatgagaaaatgggaatgagatggaaatgaagtgggatcaatttgtatatgagggggttcaatacaaaaaatccctatctgttgggatacagacacatggcagaaaaaatagcaagggtcaccgaatccaacggtcaccaacgagcatgcctacacacaccctgatgggtttcgatgacgtggcatcttgggaaaatgaaaataattaatacagctgtctttttgaaaccctcgacaagacaactaaaggtcaccatcttgtgacaataactcgtctgcctctctttaataattttcctatatgatgcagttgtcattcgcgaaattaggggcatatgctatagtgcaaattttttgcctaaaaatacgagagtagtctcctataaatttgacatgtggatccaattcccgaggaaatgatgacctgttaattgatgactctcaaagtgttagcctcgaatgacctgaactcgcgagatgatgctacctggacagggtctagtagcgtactatgccttgcatagtcaaagacaagcaggatcaagagggtttaatacaagtcgcgtatatatcatattatttgcgacaactaggtagacctcccctgcgactagtaaatatcgtttctttgcataaagattggtctgaataactgatcgtgttcgacgacttgtcaaggactcatatgtcccacgttgtcaacatgcgagatttccgtttatgcgatgttaagtgaacgcaaacatccaaacgatgggcccatgagccacttagtgaatacaaaatgcaccaaaaacctgcgagttcgtgcgagaatacgaacaagcaactcgtgctaagcaagtcgcatacgttgccacacttcaagcaaagacggattaaactgttcttcatttattctttaaacatttattttaatttaatgctgtcatttattgtaaaacagttctaaaatcgatgagttatgtaaaaccaaaaggacatttgctttctatataaaggagtgatctgaattaaataaactaagctgaaatctttgtaacaatagactaagcagatcaagctctaactgaaccaatatactttctttgtgttcttgttatttttttgctttatgttctctttgttagtagccaattctttgagtactcactactttaaataagtacttgcaagttttatcttgatgtgttctcaatagaattaaatactcgaacaaatttttgtattgttcaaattcctttgacaacaaagacatatttatacagttaaacttagaaatataattgttactaaggttaaagataaggtcatctccgtcattgtcataattagaagcataaagtgttgtcaatattactatggtaatgtcgtttttatgtcccataatttacatttccttatagaatttatcaaatttaataatttataaaacattggaatagtaattttctgtttcttttaagtgtgctaaaactataacaatacatcagcactctattgaagatgctttaaatttagccaaattaatatggcaagtaaatattttcatgcttttttagaattttatgatttatcattattatccatacatacatgcatacattttatacatgtaaatgaagagagacaaatagaatgaaagaaaagaagagaataaaataatatcagtttgaccttggcatacaaacttgtgtcgtttccggttgatataatatccacatacgaagaccattaacaaagttatttatgtgttcctgcttagctcataataaaaagaagcccacttaagcaacacaaaactcccattttcccttaatctctaacagacccgccttataaatatatttgtatatacattaacatttccatagaatgactaacaaatacactgttgaaaaattgaagatattgactaatgcatcaaaacccactaaacccccttttaaatgagatatattattgtaaacgatccagtgtgttaagctccatatttggacatgtagggtccatttttaagcttttcttgcaaaaaccctaccatttcatatcccattatcgatctaatatttttaatgcgatctgttacaatattgcagttgcttaaatgctagctgacactatgactatattcaagttaacacatgctatcgtccttattaatagaaagaacggaaaaaaaagagctcaatcaaactatggataattaattcaacatcctaaaaaatgaggaaaataaatagatatatacccatttgttttatttatttagtggccaagttaactaagagggaattttcttaaaaacattatgcatcagcttaattaataaaaaaaaaatggaaaccaaaatgcaaaatgctatatttggacattattatgatactgtggcatccaatgcatgatggcccgaaataggcatgatgatcaagcagtttggtgtctaattcatttgctttctgggatataatttaattttattttttcttttgaactttttaagaaaagggattaaactaaactaattaatcccacttcaatgtatatacaaaaaaaaaaatggtgctttggtaagattacagttggtaggtctttaatatggatgtctttttcaatttgtttagtcacattgggtaacaacattataccccaaatatcattgtacattgagtggttaggatacaatgcttaattgaattaatggcacaagaaaatgacagttgaactaccactttgtagttaaaaagaatattaatcataataataaactagcaacttgttacattttcaggtgaaattattaatattaatcaacggctcagattttctagagtcaaatttgtggccacaatattccccccacacgcagattgacctctatgattatatttatttgtctttttttccgtttaaaaaaaaaatcaaacactaattttgtggcgaatgcataatctggaatattatttattcatctaataatttatatttgtgttaattcgtgtcttataaaaagttccatcaagtattagataagttagtattagttgtggttggctactcacttttaagttttcatgttatcatgatatatatagatatagatatatatgtaagaaaccaggttgtatgaatttgctaaattaatactaccatatagtaacatgacagttggaaaatactaccatggctcatttaggatgatatcctactatatactatcagcgcatacacctttttagtttgaaaaattcgtataaccatttcgtatatttccattgatgtccttttttttttttgttgcatgaaatactctagtatataaaacaacaggttctattaaagtttacatacctctttattcttttcttgtcttttacagttagtgtgggttaatttataaaataaaataaattatttacagaaagtgaccaatatctcatatattatcaaattcgattttttattttttatttttttgggttagcttaattgatttatttacttatgaacattgggaagacccaagattaagacttgggcgtgttgaaaaagaaattgaaagatcagttccttccatgcaacacggcatggattgctcatgaatccctaaggaaacatactcacactcgttcggtgcaagaatacgtgaaagaatacaattcgttattactggatataaagaacatgtccgaggaggacaagatgttcaacttcctgtcgggattgcagccttgggcacaggttgagttaagaaggcaggcagtaattgatttaccctcagcgattgtggtttccgagaagctggtggactacaagtataattcaaatctgtcacaaggtcataattaaaagaaatcaacaaggaaaaagaagaacaaccacaagccgccttcctcgtccaaaggtgggcaaaatatggaaggcaagaagaatgatggcactggtggcaataaccagaaaggatcacagataaacactaagaaaagtgtagtggtggattacaagtataattcaaatccgtcacaaggtcataattcgaagaaatcaacagttagaaagaagaacaaccacaagcagccttccttgcccaaaggtgggcaaaatcaggaacacaagaagaaggatggcactggtggcaataaccaaaaaggatcacagacaaacactaagaaaggtgttggttgtttcatctgtaatggtcctcacatggcgagggaatgtcctaattgagaaaagttgaatgccctgattgcacaagacggacgaagcgacaatgagcaagaaccaacttctagaatgaatcctttacaacttctcaatgccatcactacggaaaaatcaagtctgttcaaaggcttgatgtatgtgaaggtgtttgtcaatgggagggaagtgatgccatggtgaacttgggggcaacgaataacttcgtggctcaaaaagaggggactagacttggtttggaagtggtttaaatttcaacccagtcgaaagtagtaaattcagaggcaaaaccaatccaaggatctgctacagtcattttaaaagttggatcgtgggaagctcagtccaatcttatggtagtcccattggtcgatttcgacatgattctcaagtagaattcttgagtgcaaccaaggcaatggttgcacctcatttgaaaggggtaatgatttatgaggaggagtgctcgtgctttgttgaagcaatcccctcaatttagaaaaaagggaaagatcttgtgttaaaatcaataatgcattttgaaaattctataaagaagaaaggtttgccttgaaagaaattaaaccagatcagtgggtagaagtactcgatgaagtggctgagttgttggaagagtttgccgacacaatgtcagatgagttgccaaaagaactccctcctaggagggcaattgatcacaagattgagttagtaccaggtgcggttccacccgccaaggcaccgaacaagatgggtccttccgaactagaagaactcaagaaacaactaaacggggtggtggaatctggatatatggtgccctctaaggctccttatggtgccccgatattattccaaaagaaatcagatgggtaattacagatgtgcgtgcactgtcgtgctttgaataaagtcatggtaaagaacatgtacccagtgccaaatgcagtagatttgtttgatagactaaaaaaccatcatatttcagcaagttagacctccaggcaggatactggaaggttcaaattgcggtgggagatgaagccaagactacctgtgtgacgaagtacaagtcttttgagtttctagtgatgcattttgggttgactaacgcccccgcgacattttgcaatctgatgaatgatgtgctatatgaattcttggatcagttcgttgtggtatatttggacgacattgtgatctacaacaactcgttggaggagcacctgcaacagctaaggaaggtgttgacaaagttgagggaagaaaagttgtacatcaagaaagaaaaatgtgagttctgcagaaagtaaaattcttgggtcaacccaaaataaaatttaattataattcgatctaaaagtgctatgataaaaaattttacattttttgtatctgttcgtattaagaattatcttcaagttggttatattaaaaataaaaattgttaaaaattaagctcatggtcctatttttaccattttggaaaatagaggatctattttgtcatttaacaaaacacagcgtccaatcgataacttttgcaaaacacaatgtccaaaatagtatttaccccaatatttcatgtctataattgaatacacatcagcaatataatttaacacttaacattggctccctaacaatagtgtatcaaaacaaaagttaagtttagaagattttaccaaaaattcaatttatggggtagtgttgtaaacaaggctctaactcgaacaaaaagctatttccaaaatgtataggttttttgagaaagttttgagaccaaaaattaaataacgttaattacaaaaaaaaaaaaaaa

SEQ ID NO: 114101 - DNA, 1331 bp, Cannabis sativa
  modified_base (1303)..(1305): a, c, t, g, unknown or other
tataatgtaaccattgaaacctccttcatatatatataaatatactttatcatatatattcatctcaaatttagtaggttgtacctagttgttgtatcaataaaattttaagagggttcattgctatttttacttaatgtatatatagttctaacaaattatataaatatgtatttttataaaagattctatcatataattataatattttctgaatttattttttgtaatagtaagtttatagaaagtttgaaattaagtgattcttagattgaacatgtataaaattcttatgttttttgtttgcaaatcaaatatatatgtgcatgcaacttttgtgttttcaatattgggtttcaaatttaaaattattgattttcattaattttatagcaaattatttacattgagtattaaagttatacaaacattagaaaaataaaacaagaaaattatatattaaaaggaaatatagaaaaattataaaaagataaaatattaatatactataggatttttaaatatttatttttagttaatcttatattaatttatatgctacaagattttttaatccacgattgtttttaacatattttgaattcaaaaacaaaatatctatctataaattcatcttctaacaacttttaaaattatatacattattattataaagaaagatatttattgaaaattttagtttttaataacatatgatattagctaaaataaaataaaaaatctattttttaattataatttgtctaattcaattttgataaattagaaaaatctataatttatattgtattaaatgattgttttttaatattaaattgtatgatgaaaatatatatttaaatagtttaataagaaaagtaaattataatgtttgatgaaatctatatatctatatatttatttatttatataaagaagaggtatgagacgttggaatgtcgctctctttaattaacattatttattcttttcttaattgtcttattttgtttgaaatttttaatgagatttataaatattagttgattaattaattatgaaaaatatttatatataattaaaagaatgctacaactatcaatctatatatattcttattttaaaaaaattatatatattcttattttaaaaaaatcatgtacacttatgatttttttatttttttattattaaaatttaataaattataccaaaattacatttttaaaaatatataatgttataataaagaatttaaatattgtagcgaatatatacaagtgagtgttgggttttatgcccnnnataaaactctttacaatctgattagt

SEQ ID NO: 114102 - DNA, 3018 bp, Cannabis sativa
  modified_base (2982)..(2987): a, c, t, g, unknown or other
tttagatctgtgatttatatatttcttgagtgttttataaatcctaacagataatactttggtgatggttctatgcttctacattccaggatggtctgcaaaatcagagccatatgcacaggggtggagccacatgtaccccaataggggttgtgaccccccacaattttgaaaatttatgtaaagttctctatatataattatattaaataccatatataaaaccatatattattttactatatattagtgaaattaaaaaaattacactattcttaatttttttaaaaaaattacaagtataaattgaactcttaatatacaattacaagatttatgaatttctaatatcttttttggtaaaataattaataattatataaaaaaaataatttttagtacttaatatttaaaataaaagattttaaaaattacaccgtataattacactcaattatcataagggtatgagaattagatagtgtaatggaaacctctccattacccttctattacataattatagtataattgcatggttagacaaacacacaaaattttataatatattccctttaattaccaattacaattttctcttggccttcctaacctaccctaaaactcacatttatttttttcaatttaattatttgattcataatttttaaaatattgtataaaacatttataaaaataaaacaatataatatttttctcaattgaaatttatacttttggtatgcattgttgatattggccccccaaactatctaatcttagctccgcccctcatatatgttgtggtgaataactgtcacaccagtggcagtagtcaagaacagaaatcaaatcaataccaataaaaaataaagacaaaacagaattaaaagcaaagggagaataaaacttaactcgtgaaagaattgagtatgatcaacaccacttcaatcggggattgcagcacacacttttgaagactatggtggaaaacacaaattacaacacaaactcacactgaagcaccttgatcaaacacaaaagggccctatttacaactctcgatcactcaaaatcttggacataattatgctagggagagatgtatcttggttaggcttggattagtctatcatacttgtttaggttagtagaatattttctatgtatacaaaataattaaatttattttatatgtatgaagataatatcaatttcaaaatgattatatttgatcaaaaattaaaaatgtgataaagataaatattatatactgtatatggttatattttggttcactaaataatttattttttaaattaattgtaaaaatattctgataattaatgtggcgcaaatattgatggagtatctcacctataaatataggatttcggtccccaatctcactactcattttgtgcaaacagtaaaattcttatagaagagagtagagagagttcggaaccctgaatacccatactaactagttttattttcttttgtagatccgaagctcgtataggattgaagctcaaaaagattggctgaaggtattcgatctctttcatctatacgtatatgtttgatttactttatttttctgtattgcgaatcgatcatatatgcttcatcttttcatataataatttcttatggttagcatgagagagaattatatatttctgtcttgattcatttgacttttcggtgtatacatatatatttttctctgtatttctttattcatggatgatcgaaagaagttttttgtttcgatctttttgatacatattgtattagaattagctggcccactttattttcggcccatttatttcatgggcttacttctcttttgccctatatatacttctctttgtaataacctaatttacttttggcatttctgccgtgtgaacatagcagtaaaataaaagacctttcatctctatcatggtatcaaagctcacaacaaaccctagcccactattcatcatcctccatggctccaagaacaaggaactcttccattgtcgccacctccgttagtgagccatcacctcctccgactgtcgtctccagtcaagacatctcctccattgactccaccacctccgatgtcgtagctctgtcccattctcctttgattgtaccatttctgttggaaacgatcggtgctcatccttccatgtttaatccttccagttctggtgtgtttagcttcggttacgtcgcctatctccccccttgtggaacgattggacaaacctctacagccctcatcgtttccagctccgctccaacatcgttattcatggcttcttaaacacacattccccttctgccatcttccactccaatcttgaccctgacgctcccacaactgacttcgcttccttctggcaccaccacgactccagccaccaccttcgctccaccatctgtccagaactcttcattttttaatggtaacattccttatcttgaacattaagtccaaatgcattttattgataattccttgtttactgctaatcacggcttacctcatgccgttcttgatcgaccttcccatgatgaacgtactcggtatcatctaagaactagagatcacccaaatcacctcatcgcttcatttctcttgactggtcaagaaaatttccagtcatggaagcgtgcagcttccatcaacatcactgccaaatacaaaactccttttattgaacgtaccatacctcatccacctccaaatgacccttcttgctccgcgtgggatatttgcaacaatatggttatgtcatggattattcagtgtgtatctcgcgagatcgctgctagtatcacgttcaaaaccactgctcttgaaatgtggacaaacctccatgatcgctttaatcaaagcaatggcccccatattttacaactcaaaacctctgtcaataacgttaaacatggtgataactgttgggttttatgccnnnnnnaaaactctatttcaatgtaatccagattatt

SEQ ID NO: 114103 - DNA, 1915 bp, Cannabis sativa
gtaaaataatttccaacaatcatctcttggattagggatagggcgggaagagtatttctttaatatttcattatcagtctcgatagagtgaaacttacttgaaggatgattcctctcaacacgaggagaagctgaccttggcttcctttccattcttgcctcctttggatgaagagagtgtggacaagctgcttctggttgattggccactggattgttcagaggtttatcaacaactttcaaataatttcccaaattgccttctgtattccttccttgcattctgattactttcgtctgcagttgacttcttacaacggtctcttcttacctcttttcttgtgaaacatcgataggtcactttcctttgtcctggttcatcggagggcttctgcggttccccatcggtgttctccccgtagtcggaatttgattgtgtgaggcctctctgagcagagtcaattgattccttgtgttgaagcaactaattaccgccgactccgctttaatctgcggactaaaagccggaaccgtcgcaccttcaagagggtatgcataggctgtttcccttatgcatgtctttttctcatgtccaagatagccacaattgtagcatagttttggaagtttgaagaattggaactgaatccactcctttcgacctctgtatatatccagaaaaaaaccagggacaatctggtgtttggtggaaatttccacttgaaattttaaaaatcctcttctagctagtgctttctggttcactatgtcgcagcccttgtattctccagctttagctgcaatggtggcgatattattagataaggggtaggtaaccccattgccttggcccagaaaatggctttgctcatatccacattgttccaatctccctgttctggccattcctgtattatgagcaaacgaccattgataatccacggtctattatccagaatcgagacacaatcttcttccttatcaaagaatataccccacagactgtattttagtgtcttgaatctccaatgtcctgtaagcttccacctctgttccagtatcatttttagacgagaccctggaactcattttccttcaaagaaaaaagctagcacacctgttctagttaactcgtcattgatttcaaaatcaggttctaaatctagggtcatagactccaagaactccttgcgtagctcatcaacttctcctccattagcactagtttccacaagccccttattattctccgttttatcagtatatgtttgcaaacttccttcacttgtctgcatattttcttcattaatacccctctgaatctcctctgcaacttcatttaatgcactaccttgtccttccagttgttccattggttcccccataggcaaaaggaactacgcacctaccgctttcagttcacactagaaagaaagagagaaaagaaaaatagagcaccaaccgtcttcaagctgcaataaatgagaccactaatgagaaactagtcaataaaaactagcatccatacagagataccgtatattggaactctccaatcctcccattcagagtttaaaagatagtaataattgggtcaaatgacgttctcttctacttttcaactccaagttaaatcctaaaattcgtagaacatgccacgaatcaatacaaatgaaaaaaagggcaaaagaaagatattgatatatatatatatatacttaggttgaagttacgtgcaatggacgtacacttagttatataaaatttgaaaagaatatataatagtaatttattaattgtgggtcccattattaaagataggcattagagttataatttctcaattctggagattttatcaaactttacatgtattatttgtattatatttgaattatgctatttttataatttt

SEQ ID NO: 114104 - DNA, 5620 bp, Cannabis sativa
tgaatcaaagacttttctacatttagtttctcctaactataaaattgtaaaagataataataaaaaattacaaaaagtactcttaaatttattgagttgtcattaaaaatttgtgatgggacctcttctgagcaatacagccgcccatttacttagtatctcatttttttttctttttaaacgatagcttaaaagaaaatagaaaaaaaaagtgaaattataattacggaaacagaagaaaagtatagaaacagaactattagaatatgctttaaagtttcacgtgagttttaaaaaaattaaacaggtgtcatttgctcattattgggacagaggggagacggaattttggtgacaaaatatttttattcgagctatcccctcttcaacatattactcggtggagtagaatccgtgcctaggtcacaatgtcaacttgagcccatgatttgggaagtactccttcagatatcattgatgcaactcatgtctaggtgttgttccttgttggattttaggaattagggtccaaagaagttctcgaaaacataaaccctagtcatgtgttgcccaagctgactgaatgtcaaccaaggtgcctagtgtgcacctggtgtgtaaagaccgcttagttttaatttagaattagcagataattaaggcttaattatgaaactagattattaattatggtttatgattatatggagatttatttgaattcaaggtgtattatttatgctatatatgaaattttacatttttcatattttgtgcccaataatattggaacgcgatgtttggccaatagaatcatatttatattttttgtagtagcggggcaacttagataggcattaggaatatcggaaatagtcagggttttgagaatgaccaagttacccctaggtgacttagacactttttggcataagtgagggtaaaatggtctttttgaccatttgattctttgtctttttgtgagactaacctaagtttgaaatctgttattatgctacattttattagataatgtttagatttttaatattttacaaattagaaaagaaaaaaaatcaagaaaacattctttctctctccactctctctctttctctcgagctccctagaaccagctagggtttgggaatttttcagcacaactcaaggattattagcaagttcttagtgttccaatccaagatataccttctcctctttgtttattttatgtttttagttgaattcttgtatgatttctagaattagagttctgtggtatggttgaggttatagtttacttttgaaattaatttgagttgatttaggttagattgaattgatttggtggctgcttgtgaggtttgttcaaagtttgagcttaagagctcaaactttgctctcacatggtggatttcattttttgttgttatggctggttttattgcatgaattctctttgttataatgtaattaggtattctggaagttattgtaaggtttgggtttgaatttaggtgtgtagagggttttgagtgtttcatgcactgaaccagaattctagttcagatggacctgtaggaaccagaattccggttggtccccaggaaacccctcagaactagaattctggttagggaaccagtctaccgattgtgacattttagggaaccctagtttttcccctttttgcaatatttaggttattgccatgttatccatcgatagggaaacttttattttcaagtttaagtccccaaaaagtgatttagcgggtcactcatcagttttacaaaatgtgatttaggggcctgtaaatcatcgagcaactgttccactcaggttggccagcacacttgagaaacgaggtaagattagtataatgatatgcatatgtgcttacatgtttagcgtacatgtttgttaagcttgttagattacattagaatagcgatatcaatatatttagtattatattaaatatcgatgaatgtatgttggcttaagtactatttgacagtatcacattggtatgactagagtatgactagcgtactgagtataagttgatattatggtcaatagcactgtactactttacaatatcacatcggtatgacttgagtatgactagtgtaccgtgtataggctgatattatggtctatagtactgccgtttgaacgttgttgactcaatatcgtgtcggacacatagatatggttatagttgggtgtatgggcacatgattataatccaagttatatctattttatgattatgcttttcgtactgagtctgttggctcactgttatttcttgcatgtgtaggtaagagcaagggtagggttgagcaaccgtgagagcaagcaaatgaagattgtacatgtcggggcagttaggcctggagcgtacggtctttgggacagctaagcatattttgtatagtcgctaggcgataacttttgcactatgcactatgaaacttttgtaaatattttgtaaacgggattccatttttgtatatatgttattattttgatatttataagtaattaaattaagttttaaatattcacaattttcaataaactcgttgattagcaacgagctgcacaattaagttaaaaacacgataacacacctaaactagtagggtgttaaatggtgtctccaggtggggttttgtcacgacttatctcaaacgtttgaaacttagatggggcatgtctctcatgtattctagtgcaatggctaagcatattgaacataggacttttttgggagtccaaactaatgcgagccagagcacgaatttccatcttcttgagctccgggatgtccaggtgacatcctcaacttcatggttaatctctttaggatcattgtgacctacttgttgaaggatatcacttagaaatgactttatcgtgatatcctgggatgccgggtcttgggattatttccatcgtgccacatgtcaaaaatagcttcgatatcatcaagctaactttttgggtaaacaaagaaaaatttaaaactttttaaaaattgaaagagctcaaagaaatagcagagggagaagtcaacaagaaatcaaatgcctttggacaaacaaaattagcgagaccttagatggatttttgagtacttacgagaattcttcataagctatcaatttacatgtgaaaatacgccacaatagaatagagtggtcgatagaaagaattgacacattgtagatatacgttgtagcatgctacacataaagagctgtctttagagattttggactgaaggtatgaagataataactcatgtgatcaatagacttccccaaacaaagttatgatttgtttcaccctttgagaaactatgggggaagtaaaagtgtttgattgtgcgtgctctgtatgtgccaagccatctacatagaaaatttagacaaaaaagcgatataatgtatcttgtgggatacaacaactagtagaaagcgtagaaatattatgaccctacaatagaaaactgttatacgtcaaaaaatgtgatatttgatgaagcttcttcatggtacacaagaagaagaatttctagattcgtaagaaatagaagacaatttgcagaagaagatgggggagcaaattgttaagttgcatttaactccaataacagataaagaagaacaaagtgaagacgacaacaaaattccagaaaatctggagtacatcatataggaaaagacaatgaaaatgatgaccaaccaagaatagtaagttcaaaatattagagatcaactagagaacataagccaaatatgctaatattgttatagctgaagaagagaagttcagagagcctgagtcatatgaagatgtgtactagaactcaaagtggcttgaagatatgaaataagagataatttctctaaagaagaatcagacttgggagctggtgtcgaatccgaaggaagtaaaacccatttcatgaaaataggtgtacaaggtaaatgttcatcccaacatttcaattgagagatataaagccaatctttctctttctctcttgcaacttttttattttaaacccacatcgaatcaccttgaacgatagttgaccttggccaccttcattcccttcgccattttatcatttttgggtgcttagagagaagcttttatggacatataactttctctaacatttattgattaatgttcgttttcacatgtttaatggtgtttaataacatatatatgcctttttttttttaatcttttgcattgattttttttgcaaaacatttggatatattttttttcctgtgtctttctatttttttgtgctttctacttgtacaaactcgataggtttgatggttactcaatagatacttgatataagcatgttcttgaggttagagatgaattttcaatcaatgctcgatggtgctctatagtacttgatggttttagatagtttcaattgaaaataaaaaatacaacataattattgagtactcgagggtaagagatgcattgacaaaattagggaagtttgaaatgagaggggtgtttttgaaaaaagaagaaagattagcataatattataatggggtctaatagtgggtaaattttgttatttgaccctctttgaagcataaaattttaaattctctttatttatatatctaaggacgaccaaactttattaagagtcaatacatgtataaattatataaaaaattagaatttattcaagggtgcgatgtggtttgaactacatttatgaaatttaaatcacaaatcacatcgcaccacacagtttggaaaaaagttaattcgtaattgcaccttaaaggttctagtccacacattttagtgtaatgtagtacaatgcggtatgagcaatttatacactatggggtatttgatgcaccccaagtttctaatatatctttatagaaatatgtaagagcattcaatacaaactaatcgtttaaagccaatttccgtgccaacacttgtcgtgacatttctttttattaattagtcttactaaaatttagaacattgtatactaggtaactaatccgcgcttcgcactgttgtaatctttttaggttgctatatttttaaatcaatgagtgataagatctaaattatagcatacaattcttaattaacaacactgtttaatggttggatcgttttaaacatagtttttatttattctattaaaattgtatacagtatgatgtgttttatcgaaatttaattttggtactttgtactttttaataatcaatacttgtcttgtatttggaaaccatacaaaatatttcaaacccttaaatatatatatatgattaattattgaacacattaattgttattattatttattgttttagttatatttttataaagaatgccaaacattacaaaattaatgtaaatattaatgttaataggcattaataataagtaaaataattgaaaatagttaataaaaatttgacacgaaaacgagaaatttagttttttgaaaaaaaaaagttagagcgatccatcatatggtttaatgtcaggatctatatatatatataaagaagaagtatgaggc

SEQ ID NO: 114105 - DNA, 4082 bp, Cannabis sativa
  modified_base (888)..(896): a, c, t, g, unknown or other
tgaagtgaagattctgcataatgtgaggcatgttccagaattgaggaggaatctgatatcacttggaaccttagaagatgaagattatggctataagtccttaaatgggaacttaaggatcacaaaaagttcaatgcttgtgatgaaaggaaagagagtacatggattgtaagtactagagggtgaaactgtacttgtgaccgaggcaaatatatatatggcatcaaaagctcggaaatataaatgaacaaggcatgatggaattgcacaagaatggagtcattgaaaaacttcagacatgtgcattaccattctaaaaagggtcgagagcatttcattaaaaaaagtttatatttttgtatctctaattaaaacttaattgttattttactttattttctttttttttttaaaaaaaaaaaactaaaacgaaaccaaaagaattatcattaattattgattgtcattaattttttttttaattatgtactttactttatttatttctctttaaattaagtagtaataatagaagaaccattcaaactgtattaattaattaattatcaaacgtcttcatcaaaaattaataaataaataaatatcataaagtacagttcaaataaaaagtcggtttgggctttaaaaaagttgatcacttgattaatcatgcatatataagatggggtatatgtgtttctttatacaaaagaattttttaatcaattttttttaataatggtatatgttataattatttagaattatttgtaattttttaattaaataatttataatatcaaaaataaaatttacatatattattgcatgcacgattctttttttatacacgtataagtcactaaaaaaaatcttacttttagtcannnnnnnnnttgtgactaaaagtagaaaaattgtaactaattataaattattattcttatgttgtgattaaaaagtctgtggctcaaggtattagtcataaaaattaccattttgtgtgactaaatgtatttttagtcacaatacttgatgtggctaaaattaaattagtaacaacttgtaaataaatactatattttagtcacaagtaatattttattgtaactaaaaatcacatttagtcacaaaaaaattacattgtaactaaaaaattatcgctaaaagtaataattttttgaagtgagtaattgtttaaatttaattttcaacaccattaaactatttaatttttttttttaaatttacaagtaatctaaataattttttttttgaataagtacagaaatttattcatataagatatatatatatatatacaacaaataaataattaaataaaaaaaataactaataataaagaagattttaaatacgtacagtgctactatatattacgtttgtatattttgaggtaggtttttttggtgtcgcgagcatatattttaaataattttataactctctcattagtgtttttgtaaattctaaataatttaatatatactaaaaatatgtttcaaaatagtacattatactaatttaaaaatctggtttcaaaacaatttgactttgtgattaatatgttataaaaccaaaaaaattatgcaacgagctatattgtagttattcaaattaatttttataaaacacagagtctaaaatagtatttactctaaaataatctgaaataatttttcaaatatttttattagtaaaatgaccttgtatggtcgcgctgtgcgatcataaacgactattatggtcgcaaaacgatcataaatttatattgtggaaccttcatggtcacatagagtaaatttaataaagttatttacaattttattatttcatattattaatttgaaaaatttcaccgaaataaattgttaccggtgaaataaattgttttgagtttagtttttgacaatgtaaattaatcagaatttctcaaaaataagtgatgttttaaatactcctatccacagaacaaaaagaatgcctttatcataaaatttagatgattttgattttttgaattagtgtcaaaacataaattaaaaaaaatgctcctaccataaaatatgtatacacaaaatatatataatacgttgttatatattaggtagtaggtactcataatttggtaatgttcctatgtattgttgttgtaattataagaaaagtctctacttattattccttttgaaaaaaagtctctaatcaaattaattcaaccctattaactcatcattttattcaaacatagttttatggtaattaatgaaattaagaaaaattaaaaaaaaaaaattgatgataagtcctacatgattgtgttagagaaatgtgcatacccacatagaggtgagaggagcagtcatcccctaaaaaaattagaaaaatatgtgtatttttgattagttacaaactaaaaataaaaaatataaaataagaataatttatggcataaatatataaatttaactctcgattgcagataaatatctaactttaatttttggcagtaataatacttgagttatatttctagaactccgtaagtacctaactattattgacgtggaccaatcagggattaccacgtgggaatttacttaacacttaataatcaggtacctacagaagtttcagaaatataacaggtattattatcgccaaaaattaaacttaggtatttatttacaactaaacgttaaacttaagtatttttaccgtaaattactctaaacataatattaattttgacattatagttaagttatcttagaaaaacatttttatttttaatatttaataattttagtttactttttgctttctcacaaaagaaaaaagtatgccctcaactttagactaaaaaaaaaatttacacaatatgcttaaaaataaattgtaataacaaatgataagaagatttctctgcaaataatcctaaattgttctaagaaatttttatttttaaagttttgattagaaaagttacataaatattacttttttttttttttttggtttcaaaaaagttaaaaactatcgggaaaatgtgtgaggtagctagttactttaagctaaactgtttcgcccatatttttttaatattttttcataaaataattttctgaaaaataccatatttttacacacattatattatataaatactcataaaagatataatttaactatttatttattaagttgattacaagttgggcagaataatattatggcatttattgttgagttgtttaattcaattatggaaaagttgggaagaagtgaagtataatagaagatgcatgcaaacaatgaaactaataaatgcttcctcaaaatttggttcacaacccaattcataactctctctatttgccatattaggcactgctgccatatatttaattatactaatagtgatatgatactgatgatgatactaggcactagtaaggtcttttagtatttatttcaaattatttgttcataagaaatgttagagggcacctataatgcaattagtacagtttaatatcgagtctttatatattttactttaataaagattataaagaattaacaactaattataaaacgtcaactcataataatatattagacaccttggtatccataagaatactctatgtccatgcaaacaatattcaaatttttttatggagcttttcctaacccattaaaatcatttttttcattttttttttatttgtttgctataacgttctcttttttgttaagaataataaaaaatatatatttattaaaagaaaaagtagaggggttgttttcattattgttcaatggtacaaaggtatattaaatgagcttttaaaggctaaggaaagcaaaaacatgatttcccaaaccagtattttgttttgactttgatcaactttacaaatacattttgacacgtaaacaacaacatatataatgtatcaaactttatttatatgtatatatatttttgtggatatatatatatatatactaggtgattgttacgtgtcaagccacgtagtgttagttttatttaa

SEQ ID NO: 114106 - DNA, 2005 bp, Cannabis sativa
  modified_base (1829)..(1829): a, c, t, g, unknown or other
  modified_base (1952)..(1980): a, c, t, g, unknown or other
aataaataaattttcttactttatgataaaatgataaaaaaaataagaaagagaagatgtaaaggattcgtttggttttgatgttgtggcacacaatcaatgaaactattcctaccaagtcgaagttgtcttttttgaatgataaagagtattttttttctgtgatgctggagtggaatcttgtatgcacttattcaaagagtgccctctggctcaggccctttggttctccagttcttttccgtgccatttgaatcattttccaggtacaaatatgcttaatttcatggaaaatctaattgaaggattttctgccaaggagaaagttgattttttaaagtttgctgcttgtgttttcactgagatttggttacaaagaaatcaatatagattaacaggaaaaactgaggctattaaaagtcttatcaacagaattcaatcgaagttcaaggagttttcgcatagtcaggatgaggttcattggggttgtcatattttaggctcgagttcacctgcaataaatttcgatcttgtcaaaacttatttaatgacagatgcatcgtggtgtagaaacgttgttggtctcgctgtactcttaattgatagaatcaatattaaatgggaagtcaagatgcttaagagagatccgatctcggccatggaagcgaaaactcaagctatctttcaagctcttctttgggcaaaaagtaaaagattagaagaagttactattttatcgaatgctcaaattgtggttaaagcacttaatgattcaagttgtccccttgattggagattttagaatttatctttaaaagttttagaattgattaagtcgtttaaaagttgccgtttaatttacattagttgtagtattattgcttatgttgatggtttagctaagagtgctaagatgtttagccaagatgctaagtgttatcaaggggagagagcacctcttgttgctctcatttttcctttttagttagaatgaatttaattttcaaaaaaaaaaaaaaaattggtgggaaaatagtcataccttacaataaatgatccaattgtggatctaaaaagaaagtgcaggctgaatagaaatatctaaagagaataatatatattagatttttgttcatcaccaagtaatatagttgaccttatcaataaaattattttttaaaagatgataaactattaatatatgagcaatatgatgtatattttggaagtgctaaataattataatttttatttttcataagatatttatgtaattttactaaaattatgtatatgataattaataattaaataattaagaagcataaaaagaaaaaaaaaatgaggtatacctacaatctcctcctttccaaaattggaataaagaattaagattaccactaaagagaaaacatttaattaataaatctttaaaaatatagatagaagctagcttatggaaactaagatcaattatacaagttttagggaaattatatggaattctttcaaagtgaacaatgaaataaagtggtgaatatatattgagagaataatatataatactagattttgtccatcacctcttttaaaaaaagaaaagtcaacctttattaaaaaaaaaaaaacttggttgctcattagttggaaacttaacatactttatacttgttggacgcttgatacttggtagatattagaattttaattgaagttgttgttagggtttttgtaaacaacttagtatacttatatcacatgattttgctatatgagtgtcatcttcatataatcactacaaaaaattttatttttagtcacaacaaaanttgtgactaaaagtaaaaaatttgtgactaattataaatcatgcatgtatatgagtgttatcttcatataattatatgattcctatgctatgactaaaaggtccgtgactaaaagtattagtnnnnnnnnnnnnnnnnnnnnnnnnnnnnntgtatttttagtcacaatacttatt

SEQ ID NO: 114107 - DNA, 3160 bp, Cannabis sativa
taaaaacacacaataaaattcaaagccagaacttaacacacacatcaaaataaaaattaaactataaataaggatttatgttactattttttgaattttggtatttattagtagtaaatttaatattttaaatatttatgtcacaaattttttaatagtaaaattaaaattttaatataattttatgaaaatttatttttttaaaatataatttataatattttgtatatccgctgcgcgaaagtttactagttatataattaaaagcaaaacaaaaagattagtagagctgaattatatatttttgatgacactcttccaaagacaatttcgagaaacagaatgccttatccactccatcttccttgtacatccccacttactctccgagtccgacgaggaacctcacgtcctttgctcacacttcccattactaatgcatcgtttcatctctgtcgaccccaaacaaaacccacttccttcttcacacatttcaaatccaactccttcaattggctcctctcaggggctctcacactcggtttttctcttgcattaccaggcaagtagtgtttccatatcaatgcttaatacaaattgagtttcaaacctctgttgtttacttttctttagacttgaaagagaaaaagaaaacgaaaaagtttatacatttatgtcgtttgtaggatgtgttgaggctaaagttggagtaaacaagccagaattgcttcctaaagagtttactactgtgattgatgtagctggcttcctctctgatggccaggtaatctctctctttctttctgatttagagataacaaaactgaattatggtgctttcgttctgtgcaggagaagaggcttgcccaagagatttcaaatattgaaaaagaaactggattcaagttgagagttttggcccagaattaccctgataccccaggtttagaatttgtgtttccttgtgtgaattctattggaaccaattacatttttataatttcgattacctattggaagttgaagctaattagattgaattctaatgtaaccctcttgaaagttggaaccaattagatcaattctgatgatgtcccttttggaagttggaaaaaatttgatcttttttacctttgaattccgattacgcttttggaagttagaaccaattatattttctttgcaggtttggctatcagagatttttggcaagtggatgatagaactattgtctttgtggctgaccctacctttggtaaagggtttaattttctatattataatatgacttttgatttctaatgagctctgccatagttgatgtacttcatggccatgggaatctattttaaccaggaaatatactgaatttcaatgtgggggcctcggtcgatttagatgtaccgcaaagtttttggagtcgtttggctggcaagtatgggaatatcttctactggaaagagaaggtagggaagagtagagtagtattccttttgtgtgttgatacgaaattttagttctttgtaatgttttggaatatgaagcttccaaatgtgttgaaacagggtgaggatgcatcaattgaagcagcagttatggcaatatctagttgcttgaaagagcctgtaggcccaagcaactgctctgatgtcaaataataccaagcagtggagccggcctaccaagaattttctcccattttcaggtcttggccaattttctaacatgtttttatgaagctatgataaattcttttgagtctgtcttgagaaaatgggttatgttgatccccacaattctgagtcagatagatacttgatgtaaatacacaaacatgtaatgaagtttctgtatgtaactacaaattgggacaaacgagtatcatgggttatgataatgaataaaattacatcgattattcaaacacacagcctcactcatgattccttgtaacattttctttcttgtccagttgaaattgtgaaaactaagaataatgagtagatatacaaacttgaataagctaaatgtgttcagttgcctagttttcctgtttgatggtaagattactagaaggtgtagtcttctttagagaagctgctctcatccctggtatgtcttctcaaaattttctgaagttcgtcaggtctgcaaggaactgcaagagctccactttgttcaaagccatattcttcttcagcttgctcaagtaacctttgaaactccgggattgttaagtagtctagcttaacaacaaacctctttttctcatcaccttttactgccaaaaccgcgaaatgtccttccttgacgtcctcaggcacggttgttgccacttccaattcttcatcgagagcactctcatcgctatctcttgctgctgctgctaaaagagaaagtctcctttggagttttcccacgaagaggcgaagcataagcaaccctttggtcccttcttctccgtagtactttctggtacacattggtgagtgagtgagtgagacaaagtgcttgcttattatgatttttctaaaagaaaaaaaaccaactaaagttgttatcttccggggttgaggtaagacagagattagtttatattggtcagtatgggagagatatcagaagcaatgaggaaatttcctgaaggggccattgaagagctaactgcatgtggttgccacaacatgtcatttaatgatgtgttatttgtctttgttgattctaattctaacgcggaatctgatcacaaaagttgcgatttggtggtaaaaagtaaaaaataaatatcgtggtcatattaactttgttcatagaacattcttattcaagctataaaacagattagttgaactagtttagttttttgaatggcgaataattgatggaataataggagaaggcataaattctgtgtatatatctgaagtattattcttcattaatttaccattttactttaatttaatatttccgacattgaatttcatatttatatcacaagtttcatatacagatttattatgctttgaactttggtatttcggcatataatattgcacactgagggctcgtttgaaacgtcgtattgtattatattatattaaattggattatatatcatatttttatataatactatgttaaattttaatttatacta

SEQ ID NO: 114108 - DNA, 3419 bp, Cannabis sativa
  modified_base (3363)..(3367): a, c, t, g, unknown or other
tgttaacttgaagtaccattgttgcgcggcttctgagagtgtggcaggaaaaactctgcaacgcacatctcctcgtaccccttgcaaatttatttgcttcgttagttgcgatatgagtttctatgttgaattccgtaaaatacaaaaaaaaaaaaaaaattactttaaagtgtaaaaatgaaaaaactctaaataattaaatactaactataatagagagtatgcttggaacaataataataaaagtaactctttattttaacattttatctatttcagctaaaaaaattgagaatatcatagaaaaacaaaatgtgttaaattcaattaattagttagacactattataagacaccaattttacaacaattcgggtcctaaaaaaaatatgcctgcaaatgtttgaatcctaattttagtaataattaattatttttattttttagaaaacaaatgaaataattactataactacacttgataattgatataagaaaatttaaattataagttccggtactaaaaattaaaatgttagtagcatagaaatggtattagtttcataaaattttcctatatataatagaaaaaaacgaaagaaaccttaaattaatgttgcatagaaaacaactaccggggtggtacacatacatacactactaccaataccaaagaaaagagagaacccaccataaatattctattttccttccatttaatagctttgtctacaacttggtggtacctattcttctaattccgatccagatctgaataataacaataataagagaaaagaaaaagaaagagttgtgatcataatcagcatccacagcagaataatcggaatggtgaaacaggaggaaaggttcttctccagactgttatccaaggatacaacacagccaaactcgtcttgcagagtctactacggagaagcagctggcgcaatcccattcgtctgggagtcacagccaggtactcctaaacacaccttcgaatccaacactctccctcccctaacaccacctccttcatattccaccaccaccaccactaccacctctaattcttcttccaaatcaaaactatctaagccaaaatcgcttcttctccttctcatcaacactaccacaacttcaatcttctccaagaataagactgccgccaccgcttcagctgccggcggcggtggcggaggtggacataacaagctgtggcaaccttcttcgtcttccttctcctcgtcctactctgcttcttcttcttcttattcttcttggtcgatttcttcgtcaagctataactctacttcttctaccactaataataagcagaaagcgttgcttcatcaaaaccgacgtcgtttctttggttcgaaatgtccaacgtcgtcgtcgtttgattacgtggcggcggattataaggacgatgctgcgtcgagatctcctaattcggctttgtgttttcctaatatgacgatgagaaagaaaaaccattggaactgtgtttctgttggctatgttaattaattgtttagaaccatgagattttaatttttaagtactatagatcaaggtttaattaataattactactatatatggttagtgtttttgttcatgggtacttattcatatatttaattttctatgattttgctattataaagtatcacggatacttataattagtagcttaattattgatattggtatattattgtaagtattaatgtgttcacatattactcgtttttgtaatattattgtcatgcatatatatatcttattattatgatgataataatgtgaaccatttaatccttcgaatgatgatcttttgtacatttatttattttcaagtgaaatttatataatgaatttggtcggaataataaattcatgatttcaaggatcgatttttccaatttactacatcatctttattcattatcatatatattaattactctacatcatatatttcatacacgtcacatgtgatttgtttagaccaaaagagttcatatatatttggtcagataatatgtgcagaagggcatgtatgcttatatggatagattgatttatataataataataattgaaaatataaacttatataattattgtaagaatatggttacattgcaaacgaaaaaaggccaaataataaataatgcccttgtaatagatcatcatctgccgtatagaaacagtgaactttaatgttagtactactacttactttcatactggcaaatgcaatggcatcatccttcttccacaaatgttcacgtggatatctcctacttattaatattttttcttttctctttctcttaatttgtgtgcctattaattacttgttatttaaattaacttttcctacaattgcttaattaatttttggtaggtcaattgcctttattaatggtacaataagctgtaaatgcatgtgctagtactcacaaattatacgctacttaggatataagatagtaaagatacaagttttgaaaaaaaaaacctgtttctattgctaactataggattcaatgtaagaatctctctaattatttgttaagttatagtttttcatttgtctcaagattatgtaattttacagaacataatctagttaaatgagtttttaattttactataatatttcgggtatagtagaattttcttctaccaaacgatatgatatataattgtgaggtctaactctattaaattttaatttataaaaacaccttttattcagaaaaaaaaaaaaagttttgaagcttgggttacaaattatttatatcaaatttcttctttgtgttgttttttttaactaaattgataggttgatttttgttttgtttttttaagttcaaaccctaccaaaaaaaattcttacttttgtacaaaaaatttgtgaataaaattacattattagcttacgctatcactaaaaaattcctccacaaagtaaaaaagtagagtcttaatttattgtgacaaaatgcgttattaatcataaatactacttgttgaaaacaaaattgactttgatcttaatgacaagttactctttatagtttattgttagttttctttttttaataaataatttgaaagtaacatttcatcacaataaataatctacatgatcaccaaaagtgcttttttttagtatcatagttaaaatatatttaaattaaaccaatcaatgtacttaaaagtacattattttggcttagaacaattttataattgtttaaattttttaaatatatataatgtcatacttttctagctagttaagtagtatttgagaacattgtcccacatggattaaatgtaaannnnntgagccatatataagaacatgagctactccactcatagccaattggttttga

SEQ ID NO: 114109 - DNA, 1436 bp, Cannabis sativa
aattaaaattttgtgtcttttttttaatattactagaaaattaatatatattatatatgagaatttttcaaaaatatatatataattaattacagattggattggatcgattactaatttttgaggtcaaacaacatccaatccccacaaaagcagattttagatttttcaatccaatccaatctacgcaagtgcggatatccgcattttgcggattggattggattggatcgtgcggattggtttgaatcaaattcttagtgaacacccctaaattatattattcaaaaataataacaatctctcattaaattaaatattatcttttagtaacaaatttttaattttataatatttatttaattaatcaaaatataacacatgtaaatagaaatataatgtgtggctattaataaaagaaagtaaacgtataagagattatgtacataatagagtttgttagctttagtagattgctttctataaatgtgttctatttgctcaaggaacatatattgctctctcccctttaaattgatgttactataccatctaaagtatgggccaatattcaatgtacatctccttccaaagcaaaaaatcactataataacagaataaaattccatacagggcacactattacaaaatgggggagaaatcttatacattccagaaaacttactactaacacgagaaaaaatatgaattcaatttaataatgcttatttggtatcctgtattttaaagtcatacatatttagtaccctaaatttaattttttttttatataaaattttatcaatacaatcatattgtctaaaattttatgaattcaaaattcaaatttaattatttgattacatataactaagatctgtttagttaaattgataaaattgtatcgattaaattttatatatgtacaatttaaaaatatgaagtaccaattaagtattattaaaaatacaggataccgaatatatttttttataaaaattaatacaaagtactaaatgaggatattctcaatttgtactaagaaaattaaaatagaaatatttttggaattaaagttatttaatcaaacctacagttagctagctagacccaatagttctgtctaaaataagaatattaacaactaagaaacaaaaatgagctttgcgcaattttaaagcataggaacatatatatttaatgttatatttatttaattaattataattttttaaaagatatatggaaaatttctcaataaatattacccatgaattttaaaaatatttaataattaaattttgatatgataatgaattaataaatgagaaatttgaatttttatacttagtttaactactgttgactgaggttttcggcaaccaataaaataataatagtttagagagctataagaaattaagaaagagattttt

SEQ ID NO: 114110 - DNA, 2509 bp, Cannabis sativa
  modified_base (2465)..(2467): a, c, t, g, unknown or other
ttttgaattaaaccacacttttcctaaactaatagattattgataataagattataaaaccacacacgtggcgttcctgaggttcagggcgttacatgttctctttctaggggagtgatattgaggctgctgcttcaatctttacttctttgggacctgtgcttagggaacatgatataaaggcttttgcccagaactgttgaagaggtgagaaaagctgtctttcagctttcaggggacaaggttgtaggtttagatggtctgaatgcgttcttttattagaaaaattggtttattttgggtagggattttacaaatgtaatcctagattgtcttaataagggtgtggattttactgatgttaattctaccctcattgttttaatccccaaaaagtagcatgttatgttaaaagactttagacacgttagtctttgtaccactctctataaagtaatctctaaaacccttcccaacaggctcaagttgattctcgataaaattatctctccctatcaaagtgcttttgtctcgagtcgtgtcatttatttaatattatcattgctaatgagcttgtacatgctatccctaatagaagagttggtaagcgtgggtgagctgccttaaagcttgacatgtttaaagcttttgattgagttgagtgggattttcttcggaatcttatgtttcattttaatttccctgtccactttgtctttctcatctttaagtgcctatctacaacatccatttctttctatgttaatggtcatgtttgaaggactgtcaaacccactagagatcttaggcagagtgatcatttatccccctatttgttcattctctattcagaaggcctgtccacaattcttaggaattatcagagtaaggggcttctccgtggcattgctatttctagaaacgcccctcccatatctcatcttctttttgctgatgataacatcttattctgttcagcagatcaacattcatgagatgctttaaatcatgcagttactatctactctaaagcctctagacatgttatcaattttactaagtcctgtattttattctcacctaacactcacactgatattatggaccttttcttttgtactttttagttagagaataggccttttatcactaaatatctcggtatgcttcaatgtctttctcgtgtaagatattctgcttttacctttctcaaagataaaatatccacaattgttcactcctggcatcacaaatagttctctagagcgggcaaggaaactcttattaaggctgttcttcaagctatcccctcatatgctatggcctgttttcgtatacccacaaagatttgtaagaaaattgaatcccttgtctccaaattttggtgggggtcttcagtttaaactcaaaaagtccattagaaaaattggaagattgtttgccagtccaagtgtgtgggaggtctaggctttagatctttaactcatttcaatcaggccatgattgctaagcaagcttagagaatccttaagcgtcctgattctttattgagtttaaccctcaaagctcaatattttcctaattcttcaattcttgaggctgctcctggccatagtccctctttctcatggagaagtattctttggggtcgtgacttattgaagtaggggttgatttggaaggtggatgatggtaaaggtattaaaagtatagaggaccattggttccctgactttcgttttaaatcgtattcctctctctcccctcctgactccaatttatctttttttataaactcctctggtgcttgggatctcgctagactccatcaatattttgatgatccaatcatagaggatatccttagtgttcttatttcaggcaatagttgtaatgataatttgatttggggccaagatctttcaagtatttttaatgttgaaactgcttaccacttggctcccaattccatagatatgccttcttcttccttaattgaaggatgcaaacatttctactcaacacaagggaaagaaatgggcgaacaggtacctcgacttgcttctggtcaattgagagttaatacaaatgctgccattgataatgtatcggattttgttgttccaattgtaggagtggctcttcctgaagtggctgaagctaaagcgattcttgttgttatttcctagatccaagtagtcaagctgtcggtttctattatagcttcagattgtaagagtgttgtggataaaattaatagttcttattgtaataattctgttcttagtgatgttatcaattgtattaagggctcattgttgttcagcccaagcctgcttatagttcatgtttcgagagacaacaacaaattagctcattgtcatgctagagcaggtttagggttaaacagtgagtgtgtgtgtaatatcccagaaaataaataatatttaaatggacatattttnnnaaatatgtaattacttggaaaatgaagtaggattatgatctt

SEQ ID NO: 114111 - DNA, 8788 bp, Cannabis sativa
ctagatcaaccccagccctcagatgaaataactctcccatctaacggctgtcgtacatcacagaatatacattccgtaaaagtacactaataggacaaaatcgtatacctatatatatatagctatctcatgaatttagtactgtacgtacagtagtgtgtggtactgttttgtaatttttgggatggggtaactaattatgtttgtatcccaaaaaaaaaaaaacgtgaaaagaagaaaaaaggaaaatgagttgttgatttgggaagaaggaaaaatagagagtgcagtgaaaaatattgatcggtagagcccactgcatcttttcttctctaaattagaccaaaactaaaataaaaaaaaatgctgaggaaaaatttcatacaatcaaataaaattaaaaataaattgataatgaaaacggtaacaccctaatatctaaatggtcaggctgaggtgatgagaacctctgtgatcatggagttaatataatgttattccctaacaagtacacgggatatgagtgcaagagaaattggagctctgcactcttcaggttgccaaaaataaacttataaagcacgttgaagatttgacattgagattacaactagaaaaactggtaagggtaattttaagattgcttggggttgtgtatgggtatgaccaattttaatccttgctcatgactttcaatgtgctctattgtctcttgattagagcttgtttatagttttgacaatttattagtaagctgaaaatttcagttaatactaaactttatgaattcagagatattttagtcaaaaaaaaaagtacgttatgtatgttttttaatcactgtgtaaacttttggtaatcaaatttttttataataaagtgtgatttacataaaaaaattgtaataattaaaattttcttaacacagattgcatacaacacggatctcttttttttttattttattaaaaacatatacatattgtgttgtgttaaaagaatcgtttaacaaaaaagtactatatgtgccaactgatctctcataaatctcaactctctagatctagtcggccatatatgtgcaatttttattggagtcctcaaaccaccactaattagatatgctttctcataacttatacatagtgaagcaattgtgagtcgatagactgagtaagaaaactatgcataatacaatcataaattagttgacttgtaactgagcgtccatacactcaattaccataagtctactaattgcatccaatgcgtatactgagaattgaacattcgtacctatagcatgattaaccgtaataccaacctaagcccagtactctaatcatacttgtattgatagcattaatccatactacttaacattgccctacatactagatattagtatcttagtgcaactctatgtacactcatacggctatcaccaatatgctagcactatggcaatataatatatgtgtgttaatgcagattttcgttaactaaaaatattagtttttttgtaataaattatcaacagaattgattatatagcaatctgtttattaaacagtaaataacaggaaagttttaacgtagttttgaagttaaatcttcatatttcacgaatccatcttattaaggatgaagatctctgaatacaaaatacgatgatataattagcaataatatctcttttctctctagatcggtcgtctcttttaccctgggttatgtccctatttatagatgtatggggcgacagttattcccttgggatctgctcattcataattgtttatgaaacgtgaatattttccatggtttatctttacgcacatgggataatattaaataaccgttcaactgctctttgtctttatccatagacagttatgttgattgtgttgaatgattattgccaattgcatgttatcttccttaaccatctttgtaggaaaaaatattaagtgttaagattcaatgcatctcgcggttctcctttgccgtttgaaagatattagcgaggtagttacttctatacgtcaaaagcgaggtgaataaacgttgaagttgtttctattcccaaagcatactatcacgagtatgtggatcaatgagttacaagctcttactcatgagtatgtagattaatgagctataagccctttgaatttatttgttcagaacatctttcattgtatattctatttatcctgagatagacttattgtctcgccagtctcactagtcaatagttattactcacatcatgctattgcctatatgtcggcgagttcgaatatttctattaactgtaatttctaagacgatttatttaatgtgtatttaaataatgcatgatttgtgttggttcatattccagccctgctacatgtgtcaacttcttattgctagccgaaatttaggtataacaatgtgtattaaacatgtgcatatgtacatctgaataattttttttatctagtatccataatcatgtgtgccggtaaacttaagtggaattttgttcagcgatcggagaccctaaatcatgacaacggtaaactgtaaagtgtctcactaaaacactttctactactaaagtacataatctaaagtttctctgtcaataaatagggtagaaatatcctaaatatcctaataaacatgaaaattgaggtacccccaagattgcccaacagggtacccagaactacaaccgagtaaccggtattacaaacctattagaacaaccgagtactagttgctacaaccgggtgcccggttctgcctagaatctacaactgaaaaaatttcgagttcccatcttctctaacatactcaattcttaatcaatccttcccaaactccttaaaatagttcaataacaccaatataatataacccacaactcaaaacataatttaattccatagctcacaaactaccattagaaaactaagctttagctttatctttaaaacatatttcagctagctacaactctttaaaacttgatactcttaacttaaaaacaaaaaagagcctattcctattcattaacaccaatctcatacaactagaaattcacttacaacttaaacttaactatagagttttctcttaaaataaaagctcttacctttgataaagaacttgacaagcttccacaatcacttctcttcccaacaagaactaaattcccaagctggatctttaagaatgtaggaaaaaatttggagaaaagaaagttgttgaagcttctaggtgggttttgccatggggtttcctagagcaaaggctttgatttctctatatttaaaaacatctacttaatgctagatgataattaaaaggattatttacatgaaaaatacaaaaacttaaaaatattacccccatatccttacaaggctactcttacatttttatctttgattttattttatttatactaatacctcttacacatgcatgatttcattattaccccatcaaaggacctagttgatactcttaaatcctaccgagtttgggtatgctcatacctggttcttccctataaatagaacattacttcttcatgtgaatggagagatattgagttatgggaagaagaactaagaattaggattcttcaactacggcgtaaatatttgtaagaaatactttagagcttttctagcttaataaccttgactcttggactagagttcattaacactcaaaccacgtaaaaatctagttctctgtatctttaatttatttatttcttaagcgcttatttactttcataattagttttcaaaaatctcggtaaacaatatatatttttaattaatccaataaaataaaaataaatatttattcatttaaatatgaattgaaataaataactaaataattgaattcaatatgaaattttttgatatttattaattatattatataattaacatattcatttataatatactctagtatattatctattaaatacttacttttagggcataaactttaacaattggctgctagggttaattatttgttttgtatttcattcttatattgtgaaaaaaaaaaatctttgatatagagtatagttcgttctgctatatctctgctatttttatgtctttataattggattgagtttgcaaaaaaattaaataaaagagaagattactaagtgaaaagccttcaggagaaagttcttcaagcctttgggagaaggtggtttaagtcttaccttggaaggaagcaggcacttttcaagcagattgaatggagttcaagttcgtgaaggttcagataggttcattcatgaatgtggaatacatcaagctcatggcatacaattagaggcagtatatttatgcataagtcaaaaactttatatttttgagatcttactaatgaatcttatctctcgacgtgaccatgtggactagtagcaatctacaaagatttttgataccacgtataaaaactttgtgtgatttaatttaatagaacttcaatttttttctggtttgttggtctgtagttactgaatagttatagaatatttgctacagtactattgacgctaaaaactgatcaactctatactttttgataagcgatagcagccaatgaatgtatgaacaaaaagtaaaaaaaagaacaccacaattatagtagttcactccccctgacatgaaggtcatagagctacgtctacttagagcttttattatcacaaaaagttaattcccttacaagagaactaaagaaaaaatgactaaatctagcttcatttcacaatttttttagagagaaagtgtgaagagagagaagatcttaccttgtagagagaatgagaaatgtgtaaaatgagctaagagaattctccttttataaagaaggagatccaattaaattacaataaattaatagaatatttgaaattcgtcaaaaattttgtacaaaatcacaaatcaattttgagacccaaaacttcataattgcggtggaggtgtgagacatacttaaattattcttgaaaagagctttcatatgccacttaaaccgtgtcatttggataaaaattgagacagacatgaccattttactaagcagtgtgaactggtaaaaaattggcaaactgacttgcaagtgaccaggttgtcgcaaatgtcaacctgggcgcctagaacttggatttttgggtttccagaattttgagatgttaaatgatgtggaaactatacttagttttattctttgcattgatgaagttctcatggtaattttacttgatatgctcgggtgatgcccaatgaatcgttagtgacgactaagtgacaaccaaatgattaataatacacatgtgtgtcggtggacttacacgtgacaaatgtgcatgagatatttacttgcagaagcatcaaaatcttattttgggggcaaaataagactgttacccgtagtagaacttctatttgaaggacagaacactaagccccaagccaatgtcaacttgggcacctagtgtgcttgcatatccgcgactgatgatgcctgagggctaaatcaccactcgaatgatattttcttgtgattccaagtctcatattttgttttgggatcaaaataagaataatgctcaagacaaaatcacaatcggattgacagaaccaccagttgggtggctatgtcaacgtgggcacccagtgacaggggagttgtcaccctaggcgcccatcttttcatctgagcccccaatagctttgtttgcttcctgaaagcacttgcatcttcctcgtggatgaaaataagaaaaatgaaaacttctctcaaaagaaggctcggagtgccctatgttgagatacgtcaatttgggcgtccaaggtggcttgggagcctgcactaggcgcccaaggtggcatgggagcctgcactaggtgcccaggtgggggtaaatatccctggaattagtcttattaatgttcaatattctttttggtgaaaagtactccacaaattttaattttgtcaaatttgcacaggcatcacccagttaaacgaaatcagtgtccatgtttgaatgtcaacctgagcgcccatagctccttcaggatgtcgttgatgaaatatcattggggtctaagaattttcctagaaacctaaaccctagtcatggtgtgcccagatcgactacatgtcaaccatggcacccattagggtttcatggtgctcaagtaccgtttgttgtagacttatctccaaagtctgaaacttggctgaggcatgtctctcatgtatctttttttcggtaagcaagcaatgagttttattgcaaaactttaatcaagtacaattaccaaccaagttggctatacacaagtttatatggcagtattctccttatgcaaaatattgctgagccatattctatctttacaacttaacttcttcgtatctattctatacaattttgtaatcaaagagcttttaataaactgtacaatatgatgaattgtatacacaattcggttccataaaacctcattcctagctttccaaatgtaataaacaatagtatcaagagctactatataaatttgttttcttcttcgagattgactgcttcttatgatcctttctaaaacaccagcaagaaggaaatgttttgaaccaaatcccagccaatccagaacctaataaatcaccttcctactatacaagcaacaaaaaaagagatggctatgactttctgtagcaccagtacaaatcaaacaaacatcttctgctatgactccaaatctcttaagtatgtcctgtgtttgaggtctcccccaagaagcatgccaagtctctcatgtattttaagataatgactgagcaaattgcccataagaagcgagtaggaaccaaagttgatgcgagacgatgcacctgatgttaacctgggcgcccaacaccgatatgttggacccatgttgagccctaggacgtccaggtgacattctcatcttcatggttcatcattttagggttatgaggacatgttcgcttgaattttgtcgaaggatgacacttagaaacaccttcgctagatctcagtgtctacctgggcacccactactatcaactagggtactgacgtggtttccaatgcccaaatggaccgtggttggatccaaggttattttctttttgccacgtgtctaaagtatgttaatgtgattaagtcaaatttctagataaataaatattgctctgtatttaattaattgattaattaaataataaagtggtaattataaaaaagtaatttgcgacataaatacttaagtttatctataattagttacagtttaatacctaagttaaaattttaatggtaaaaatacattctgctacactttcggaagctccgtaggtaccttgccgttttctaacatgttgggtgacagatggcaagacacgtcatttaaaataatgtcacatcatcaatattaaatagccacatccattaaatctaaaataaaaaaaaaagttaacacatattctttttctaataagatttaataaataaattaaaattgaaagaataaaactaaattatttataaaataaacccctaaatctaaattagggagggcaatagagccagggagagagaaagtaacacaaccttcttctctgactacaggaacccatcaatcgacaatgaacgccaatacaagttccatctttgtcgaccacgggtatcgtttgaggtttcatcttctcaaaccatggccattgagcaagttgagatttaacagttgtgactgaggaacgaatgggacgacgggtatgcgattacaaaccaccacaaagtcgtgattcgcacctcaaaaacggtgaagaacccaggtcgaaggttcaaatgctgccgtagattcaaggtttgaatttttgcattatttggtctttcttttcttcgtctgaacttttctaagtttggattttgtatctttgttaataatacctctttcttattaatatgcaattttattctgggtaaaaaaaattgctttcctagctcttaatttaatttttgggtttgggttttaattttgtaatcttttgaacaaggttgtgcaaaataacctcatccgctcaaactcctttcaatttcaaacaacaaatccaaaacaagaaaaatccccaaaaccagcaaaccccccaaaaaatatcaaaacctaaaaaatttcacccgaaatctaagcttgctcctcacttgaagacgtcgaagaagatgcaatcaatcgatgccgaggtcggagatagagaacctcgaacgatggtattcttggtcttctccccaaagagtttgtccctctccagtgtgtttctgagttttttttttttttcaattctgtttttaagtttttattttgaaaagaaatgatatatttatttaattttcttttacattattattagatttaatataaaacactactgagtttatctttttgtttatgattttttgttttcaggttttacaatttaaattttagatttaatttaattttagtttttgttttagttagtgtatagatttcacaatttagattttagggtataaatttatattaattttattaatttttcatcttcaaatatatttgttaatttaacttaaatttgttctggacttaaataggccacacatggatagttaataaaagggtaaatagtggcataagtatccaaagttttggttatttttaaatttgattatatc

SEQ ID NO: 114112 - DNA, 2674 bp, Cannabis sativa
tagaaacccctattacaactagcgatacaaccactttagaaactcaaacagtaaatttgaaaaaaaaaaaaaaattaacaaaatagtataactcacctaaaaaatatatataaactaattttatgattaacggtttatattttaaaattaaattaattaaaaaattaaaatattttgaataatggtttcaaaaacttttctcacatttataagacaactaaatgaattaatttattattataaaaataacaaaaaaatatgaattaaattttaataaggatgacgtagtgagtataataacacgtgacacgagattattcaagactaaattgatgaggaatatgtaaagttattatcctcatgaggtatgttctatgtatgggaatgagattgaataattaccctctacgggtatgtttaagcaatcacccctaaggtgagtaactactcccggggtatgtttaagtaatcccccgtaggatgaataactaacctccagatgtatgtttaagcgatcacctcttagagtgagtaactacctccaaagatacgtttaagcgaccacccctagagtgagtaactattcctcatgtgtatgtttaagtgatcaccccctagggtgagtaattactccaggggtatggttcagcaaccactccctagactggcaagccaaccgtggtttaaatgaaagtacgccctgcccattatatgaaacatgcagtatatataagtgtatgaaactgaaaatataaactatataggtcggaaatatctcttaatatttttatgtagtactttattgataatgataaagtttaagctagcgacttagtgtaaattaaataaaaatatgatagctatgatgataatatattatgcaacctaaaataataatatgacggccatgatgataaaatattagagtgtttatagagagagaggctaattggctaattatatgagtaaaaattaaatgtacaaaattattcaattccatgatgcacgcaacattattattataaaaaagaaaaaaatgatttgaataaattaaataaaaagtaaaattcattatagattgtattagcagctaaaaaaaagtattaaaatgtgggtacaacccaaattggtggtctgttgttcattgtcttgagtagagttgaatctatattcaaatgcaatttaaatgtgttagtttgaagatcatagatacccatatctgaaataatattatggaatgataaagcaacgacggcatcaagatcatgagtgaaatatatagaatttggtcgaatcccattagatttagaagccaaaatagatatggaagaattatcacccagaaataatgtcatatcgcctagactttttagttcattccacttgtcaaactcaaaaacatacctccaaattctaacaaaactttgttcgacctttaaggttgacttcatcgtaatgaagatacctttcaaccattatgatatgtccgcataactctatcaaatatctcttaataaatgaaaattcaattaataattctgctctatataaacttggaatttcatgagcaagttgtcttattgttgagttgatgcaagagcctctgagattgaatgatctcaattcacaatttggtgttagggcataaaacaaatcgttatgaaacaaaatatctgaggaattaaaatattttggaggctctaattttgtccatgtttggtcattatgatgtcccagcctaataaaagccagctcgttcatatcattaagtattaccacaagtatgcactcgtcgtttggattttctagtggatcattagtgagtagagctttgaaaacgttgaatcagtggacattttctggctcaataactatacggaagggatcatcttcaccaccattatcaacacgttcttcaaactcattgggaaataagactggaaatcattgagaatggtttgtaaagtgttactgtccaatccttatttaccgttatcacccaaccttttgaagacccggtttatcgaatggtactacaatctttgactctaaatatttatccttggtaacactaaaaatgttccatgtagtgttttcatgatcaggagtcaaaagcattggaacttggtgatatcggtattgggtgtgtaatgcttttctaagtttgggttgattggatttcgctacacaaagccagccattgagtacaaacagcaccaaattgcaaataatcaattaatgactcaatcttctccagaattaactccagaacatcattgggtatcccagcccaatctatagattgcctagatcgatgatttttggcaaacacatccatactcgataattggatatatgggatatataggagagactacctagtttgctttacgttactttaagtttaagagagagaatgaaaaaaataataacaaatggctctatttataaataatgggagcaatatatagcatcttctaatctacttgaattctgaaatttattaaaggagaagtactaggggtgacgtggcggtacaaaatctctctaaatttattttttttttctttaatactcctaattttttaatattttattaaatcataaatttataaattaatattttactattattttaataaattttctataaaaaatatcgatcttaaattaa

SEQ ID NO: 114113 - DNA, 5349 bp, Cannabis sativa
  modified_base (27)..(28): a, c, t, g, unknown or other
  modified_base (5296)..(5303): a, c, t, g, unknown or other
atacttgtaagtagatctaagatcctnntaaaataatttccaacaaccaagactagagggctaggtggaataagaacttggagagaattgcactaagtttagagggcattgttatttttatcttgctcaagatgtatctctttatcatgtagagcccctgagtagagttgtttggatcagaaaaccaagtcttaaccaagaaaaacgtccaagggttgacaggcgtatcgattggaatgccttatcttgacagagaggggctttcaaaggctagaggtgtctcaaccaaaagaccatgtcttgactgggagaggcatttgaaggctggaggggtctcgactaggagtccaagggttggaattgtctcgaccggaagaccatgttttaaccgggagaagtatccgagggctggaggtgtctcgactggaaggccatgtcttggttgggaaaggcatccaagggctggaagtgtcttgatcggaagaccatgccttaattgggagaggcttctacaagttggggacatcttgatcgaaagatcatgtcatgtattgactgggagaggcatctaagggctggaagcatcccaactgaaaagtctaaacaatttaatagtatatttcacactaatttgatgctaattttttacaatttaaaagtctaaacaacaaatacatacataaatggtgatgtaacaacaaattatgaaaattttagtctctattctttttttttttttttgaaagattagtctctattcttaagggttaatattttgtatttttagtgtcaataagctatatttaagctagcttaaattagctaagacctacatgttgtaattatacataatacatgtgatttacagtagcataaaattatttgaaaatgtaaagataatgtaactgaaatttaagtttttcttcaaaactaaattattacaaggagtgtctgcccactaaagtgctatgtggcagttttagttctgtactgattttttatcagtttcttctcttgtttttacaataccacctcctcatccatggattttttggatcatttctaatcatcgttgcccttcatccttttccttcctcctcccatcatttttctttcaattggtaaagttttggtttctttgtttacaacatatgtaagttgctttcagttgcaacaatggaaactttacctcattttctatctacacaatgcttatacgatttacattcttcaaaccaatatataaaaacagcttctttgttagccaaatggtggaatgattttcgatctcctatccttgtgattatctatttgtatcacaggaaaattttgactgctgccacttgttctttatgctacaatgcttgggaatcaattggtaaagttttgttacatggcaaggcaattaaaaaagtttggaaatccactctatttcttttagacatatgtgctcttgctgctacgtttggtggggattttctttatcacttgtcaaagacaaagtttcaacttttcatttgcaccatgtgtagtatctggtctatatagaaatcaagagttcatggccgcataacaaagtctctgctgtaatgggctctccaacataatttgcaaattaaacatgttgaaataatgttccttactagtttcttcaatcattaatgggtacacatatctcaattgtcttgttttcaagattttattgttgatgtttatggtctttaatccttttttctagaaatgagtttttttcaaaatttactcttggttggataagattgtatttattggaggttgttctacttccaatttaaactgttgttataatcagtgacggatccagaatttttattttgtgggggcttatttattattaaaaaatatatatacctatattataattactcttactagatttatttaattttgtaaaggctttttctactattttaatctataattataaaattaaaaaaattacatttaattttttaaaatgcaatatttttgttatagccccacatcaataaaagtgggtctgtccctgattgtaatggtttgtattcattaataacaacagtttgtttttcttaaaaaaaaaaaataataatgtaattgaatggagaaatttgcaatgattataagtttgggaatttttttctaataataataataataaattaaataaagaggcaaatatgataatttaggagacatcttcttctattttttgttttttttcgaataaatctttttagtttaggctaattagaatttttgtctcttaaattttggcatccctttaaaaactaatttaataattgtgtaagtactaaatcatacttccaaactttaatatttaacaaattataccttttgaattttgacacgtgtgaaattatgttttttgaattttcatctatattaattatttttttattaaaattagataaaaatctttaaattcaacaattttaagagttcatgattaattacatcccaaaattaaaaagaaaaaaaatcctaattaaaatttattttattaaacaaataaacatcaaaccaatgtattttgtttttgtttttgttttttgttttttttttttgttttgaaagcagcaacgcactcatcttgggtttggcagcgtatagacgtaaaacgttggtaatcgtttggttggttggttgatgccgacatctaacaagactcactactaaagactacgaccacatcgcattacctatttatttatcttcattcttctccacctttcaaacccaatctcactcctttggctttcacttctccctctcccctctactctactcataccccaatcgccatggctgaaggtatactctgcttcatctcttcatcattacttgttttccatttccctctttcaatccaaaattttcaatttttaacttgattaactatctatttcaatatgaagattctaaagcaactgcataccaagaagccatggatgccttgtcttctttgattacgaaacgcagtcgtgcagataagagcaataacggcgatagattcgacctgatatttgattatataaaggtaagttttgtttattttttttattttttcttgactaagtatgaattattaatggaagttgaagaaattcaaatatttttctttagtttttggatttaatagttgaattatgtatttgagctcaaatttgctgatgtttacgttgtttggattgaaataatagatgctagacttggaggagtctatatccaaaatgaaggttattcatgtggctggtacaaagggaaaggtatcaaattcttatcttctactcgttttaatttcatctgaattgtgtcttctataaagaactttataatatcctgcatgtttttgttgatgaaaattttgttaaaacagttaatgtgcactctgtcagaacttgctcgtacgatactgtgatgctaattcttttttatttctatttggggtttaaaagggctccacctgcaccttcacagaatctatattacgtaattgtggatttcacactggacttttcacttctcctcatctcattgatgtcagagaaaggtttcgtttaaacgggtgagtgttggaaacccatacatggggccatggactattacattcagttatcatttttcatgtgtgggggtgggttataatatcgacttgacagtgtccgaatttatttgactactgctgtctttttcttttcttaaaacttaggattgtgtttgatagaatatctttcaaaattattattgtcctgagtttttttggtaaatccttgactgtttttgtctttccaaaaacttacatcagctgttaacttcagggtggaaatatgtgaagaaaaatatatttcatatttctggtggtgctttgacagattaaaggtaacttcatcaacaacaagaaatggggcatccactccctcctttctctccctgcgcctgtttttctataaacattatttttcatagataacttgatttatttacttattatttttgtattcaggaaaagactaatgaggatataccaatgccttcttattttcgctttcttgcattgctagccttcaagatattttcagcagaacaggtttgatgtgtgtcacgtcatatttgaggacaagctgcttcaattcaatatcctttcccattttaatttacaagaaatgtataaaatggaatcaggaaaaaaaaaaaaatcaaatttccgtgtgtgttttcatgcaggtagatgttgctattttggaggttgggctaggaggaaaatatgatgcaacaaatgcagtatgtgaaattattgtcttggaaatagatcaatcaagccttcttcacagtacctgttttaagtgtagatgatcataatatttcaggttgaggcacccgttgtatgtggtatatcttcccttgggtatgaccacatggaaattcttggttagttttctgttctgtggcagaggtgctaacaaatacttaggcatgatattgcagatatgtgtgtacaatattttcaaaggcatgatatttcaaatatgagggtactatattatcaatgtatcattgcttacctagttgcattcactcatcacaagtaatataaatcctaaagtgtgtcatatcgaaaaggattttagacaaaccatgctcaataagttgttcgtcatagaggtatagtttcttgcctgtggtataatatttcatgtttaaatagtttcttccagtgaggatttattttatgtttgataaaaccatgagcctgatgattattaattattctcttttgtccatactgataacaggtaatacccttggagaaattgctggggagaaggctggtatcttcaaggtgcactttctttttttcttttcttttgatactcaaccaggccaaccacttgctgaagatgctcgttgaagcatatgaaaactcgaatttcttgtaatgtctaacaaaacttacagggaagtattactcgttagtaacattcttctttcttgggatacagcatggtgttcctgcttttactgtgcctcaacctgatgaagcaatgaatgtactcaaggagaaagcttcccagctggatgtaagttccactcttttattatttgttatccgtttttcattttcttcacacagaacatgtgaatcaaattaattaggtgtggacttaaaaaaattgacagtgtgaggtactgtaaaattgacaaagctttactgtcatcacttaacacttagattttaggctaattagtaattttnnnnnnnnaactttgacatgtactaaatcgtaccccctgaacttttttggccgt

SEQ ID NO: 114114 - DNA, 2081 bp, Cannabis sativa
  modified_base (2040)..(2054): a, c, t, g, unknown or other
acaaaaataagagaaaatcagataagaataacaaactaccttacactaacaagagggtaataaattactataaaagggtaattaagtattttatattatttatttctaaaattaaaaaatcatatttttacaattaacaattaacaaatgtaggtgggctaattggggtttccacgtgggattcgattcacgtgttgggccagtaatatcactagcttcaatctacgacatagagaagcacaagtatcgaagagtattgtacagaggatatgtatcagaaatgtttgtgccttatatggatccaactgaggaagtttacttcagaacctattttgattgtggagaagatggttttggccaatccgcagtgtcgttggagccactggctgattgcccacacaatgctgttttcatggatgcctattatgctgatgaaaatggcaaccctgttcagatttctaatgctttttgcatatttgaacagcatgctgggcacatcatgtggcgtcacaccgaatctggcctccatgagggagaggtatacaaatattactataataataatgcaatattaaatatacatgagtaataatattcacacacatgattcatacaaaaatttaacacacttatgtgttatattaatttaaccaatctctttatttaagataagatatattatcataagtgtgtgtcatgtgaacatatatatcacaaatattctaatatattaataccaattatatataaataatgtttacgtatcacattcacatcacattgcttcaattctcaccaatcggattattttattgttaaaactcaaattaattaacaatttttgtatatgcgccgagtgatcatgactcgtgattattattagtcttaggtactctcttaaacaaaaaataataaatgttagttatgttattttccataaataatcttaaacaaaattttagctttttctctttcataagtagtgaaattaaaatattttttaattatgtatctaatgtttcgaaaaatttataatttatacaaaacaatacacatatttagcctattattaacaagttgtaaataaatatactctatatgacattattttgcaatgaattgagagtgaatcatagtcaataagtatattaatgtgttttatatatatgtaaatacatatatatcttaaatctgaatgttataatcaatttgttcttttgttctattagtaattaattattatgtggtacataattattggagttaacctaatacagtgtggaaaaaatactataaaataaatataagttattcaactaattaattttgagataaaatattatggactttattattatatagatttttaaattctaacatattgagatttttgatatgtttcaaaaaatcaacaaataacccacaaattttctatttttattcaaatatgacgttcggccttatgtatcttaaatatcattcattacacattcatttaggtccaaacatgaggaagatgtattagaaataataattctacatcactaatatttagaaaaataataccatatctaagatatgaatgagctactcttctaattgtcaattaattttgatgtagaaccctatgcatcttataattttaacatggtatcagagcaattaaaaactttcattgttgccacctttaacctttattttgaatttttcagctaaagtgtaccaatttttagtgttgaggtccttaacctgtttcaaaaatctaaaaatttcctaatttggccttgtagaattttttcaaatgtcacgctcgatcatttggtcttttaaaagtcggtcgtctgttatacccatattttttaagtccaaatatgaggatgatgtagaattaattccgcactgttaatgtgtaaaaataaaataccaagttgtaaataaattatttttttattaccaattaattttaagataaaattgcatctactaaatcatacaattttaacattctaacaatgtatacagtagaacctctatttaagnnnnnnnnnnnnnnnaataacctctaatttgttataaaataa

SEQ ID NO: 114115 - DNA, 3025 bp, Cannabis sativa
  modified_base (27)..(32): a, c, t, g, unknown or other
taatataattaaaaatataaattttannnnnnataaaaattattaaaataaaatatctttaaaaaaaaattatttacactctaaaaatttataaaaatatcccattttaatttttattctttatagagtcaaatcacaaggagggaaaaagcatacaacaccaaagacaacttaaaatatatttaataaaattttattttttattctttttatcaaaaatatagatatatatatatatttaacaaaaaaaaattatttatttttaaaattaaacatagaaaaaagaatattatgtccttaaaataaatattgtgtagcaagtcatgtagccgccccgagttgactaacaatgaactttttctttttctacctcaatgcaattaaatttctcttaaaataccttacaaaagaattacttaaatgttattgttaattttgttatttttccttaaaataaattaaattgattacttttttttacttgacctacaattcatttcatttagatggcatttgattaggaggaattaaaatatagaaataagaataagaatgggaataaaaataaggatggaatggaataaaatttaaaatacataaaaaaaaaattgataaaaaatcattaaattttttctcttgttacattgaaataattttttcttcctttttcaaatggaatagtcatcccaccaaaataatagaaaagcattccattggaatgtcattccaatactttaaaatgcaaccaaacaaagaattgaatgaaaattgtttcctttccattctattttatttcattaccttagggtcgaccctaagaatccttaggattgtgtaatgtatcatgtaccctaatcaatcaaattatgaatatttattatttataatacatttaattttacttaaataaaaacttaataggtcattttatcttttattttagattcccgaaaagtgttggtcctaagtacgagtctagtctacctatgcctagaatcagtcatgattggagataattacacagtttagcatatttgtctggccacataattacacagacacaataactatgtaatttgagataattgggaggtctcaattactctcttcaattctcctaccccatcagaattaggtgtaattatattatataattacataccaaaaaataattttaattatttaattaacataacaattatttaatatgatttagtcttttttttttcatatacataattttattttttatcctttgtatgatgctattttataatttttttagtatggtttttcttatattgtttgtaaataaataaagaaaaaactaatataagaatatatgaaatttgatttttagtttttaacattatattttgagttctttattgaattagatatctaaaatatttattcatgatttagtataatttttaattaatgaaatgctaaatttattttataattaatttttaatcaacataggaatgataaatactcaagtttctggaaatcatacaccaaattagataaaacttattttaaatatttattacaaaattattacgaaatttaagtttatttatgaagaaatttttatttattattttttttaattgaaatggaaactttattagaaagtagcttcaaccattacaatagatgataatttagttggagcattactctcagtaaaaatgcaaactaaataaaaacaaaagttacgagggacactatgcgcaactttgattacaaaatgtttaacaaaatgaatctcaagagactttaaagaagttaagataaacttacaatcatgaaccaaaagaccaaagaatgagagcatatagattgagctatgcaaagcttggacagcaaccacacaatcagtttcaagttgtacttcaatccaaccctttctcttgatccaacttagagtctccttgatgtcgacgatcttagcgatggcagcatcaatacagccagacttactcattgaaaaagcctcaataagttgaccatggtaatcacggcccacacctccagccccataccagccttctgaaacaaaaatagctccatcgacatttacattaatcttgtttaaaccagtttagtccaatgctcaagtcatgtgtccaatcccgaaggaaaaaataacaaaccatgttttttagattgagcaaccttccattgattaagagttgatcttgctgaaagcactactttagaagttgtggcacactttcctctttaaactacatcattgcgcgcattccaaatcgcccaaccaatcatggctgctaactgctaaattacagtagaaacacactgcagcaaaccaccaaaacaactttgaaaatatgctcccaataagcttccatcgctgatagaagaacaagcaagcttttgcaaaagaataaggaactaattgaaatatagtttcctccccatggttacacattgaacaaaccacatgaactggaacatttttaatacgtgatgagtgcacatttgtacaatccttcatagtcaattattagttaaattagtatttatttcttaagttttatataaatttaatgtgttttttatagtgtagtattaagcataaagtaatgaaattatgataaataagaagtgaatcgtatatatttgagtgaagtgcttaaatcaaggagcaaccgagtcaagaaataagcttaagtatgaaaaatagtgcttggcgctttagcacagggtgtgtggcgctatagctcaagtctggaaaataaagataattttagcacgcggttatttcataaaatatcgcatggcgctaaagcgccgtacttatctttttttataaaaaatactaattctaaggggattcatctatcatttttggcctatataaagatgaaggtaaatcgaatttaaggacgactgaagaaacaagcaactttgaaattagaaaatacattgaagagtgagagagaagagattctaagcaatcatcatcaactttcatcattagagttcttttctt

SEQ ID NO: 114116 - DNA, 2568 bp, Cannabis sativa
tactttataactaaataccactttctagagtttcagcttctatactaagaagatttagcaaagccctcatcttgaaatagcttttaatatacttaaaacaaaacgaaactaaaatgagtacaattcaagtacatagcagatataatcaacaaccagccatttcaaattcaatttcaaaagttccaaacacattcaacacgggaaagaattggccataccttgccaagctttgcaaggtctgtagagacagtatccaaagcaacactaccatcggtccattttcgttcatgaacggtaataggcaaagctgcattgtttgtcatatcctgaacaagacaatcttcaggtgagctagattttgttttctcctgggttgctgtatcatcattacatgatttacggctactcgcatcgcttaaacgtcttgatatggcagcctgaaatatccataactaaacttttagaagagggaaaaccgaacaatcttagactattattgtgtatatcaaagaatttacctgagtccgccaaattgcttgaagatccggtttgttttttaaaaatcctctctcttttggctccatcggagttaccacggctggtggctcatcccagcctttcctgccagtctttgcagatccaactaaggcctccgaaaccttagaaatcccggcagcaatagtcgccattcttttctttccagaagaatctgcagcacccgccaccatcggtgagaccttaacgccggacaaccttctgcctggcgaaagcgaagcccttcttgccgctggcgaggatggtctacgcccattaggtgacggctgtctatacctcgatgggactatgatagccggctccttggaaaccttcctattctcctcacgcgccatcatcaagctaggaacaacgcatttcgacggagccggagacgatgaccgcttcaactttccggctggagatggctctctctcaaacacaggagtactcttcttcccaaccgataccgatctcttagccgtggccggagacgaaaacctggaagacctttcagaaaccttagaatcctctgaattcccaactggtatattgtctcgaggcgcaagaggctgcctggatctagccttttctggtttcgcctcaatcttaaattccttactctcgctccgtgtttccaagggcttctttcctgacaagaacaaagaaattgggtcaaccgattggtcagaatcggagaccggctgaatcacaaaatcacgcttggaagccgagattctagcgattagtgtttcaggagttccaacaaacttatggcggccggcgattgggcgtatcccacttactcgaggaacaggtgtgtcgaactcgaatcggtcgacatagacgaactggccgagctgtaacctgttgttgaggataagatcgacgtcgcggtcggagagagagacgtaggtggagttgagggagtcggaaagctgaacaaagaagccttggttgggagagagatcggagccagcgagggcagggacgatcccgacgacttggagaagagcggagcggtggtctccggtgactcggttggtagagttcatggactgaagaagccttagaagaatgccctgagttagggtagccatggctgaaccgaggggattgagagagagagaggattatggaggtgaagatatgggggaagaagaagaagtgaaaataaggggtttgagttttggccgttatgggatttcaaattcaaaatggcggaagaactagaagagattcttttgccttgaatacagcctccacgttaccgttacgttatcaggattaacggtaagaagcaagattggagtaaatgtacttcattgcacggtaagatttttaaatgtccacttatatctcaacatctggcacacttttttttaaaacaaaaaataacagaagaaagctatgtagggatgaatagagaagatgaaaacttctctaatatacttgatgtgtccattcattctacttagaagtttttgagaaaggtttaatccgagcctttcttgtgaagttcaattctttaggctctcgaacatgtcttggataagagtccaattctttaggctctggaacatgtcttgaataagagtattaggaatgcctttactaggatgactcaattcataatcatacaatttcgacatatttattataataattatcattcggaattgtttgaaccatgaaagttgcaattttatccgactaatatggcattgttaacaaaaaaaaaaaaaaaaaagaaaagtttcagccatctacctcaaatggttgggtgtgtaccaatttgatacttagaaagaactagaatatataagtatttcgttaatatcaaagaaaaaattataaagttttaaacttttcaagacactttgaaatttaactcatgtcccaaataaaagcaataacaaaattttatccaactaacaccaccctaataataatccgatttagagatgttatagcaaaactagttacattttttgtattttttcatattataaattatcttcaacttggttatat

SEQ ID NO: 114117 - DNA, 2679 bp, Cannabis sativa
  modified_base (30)..(44): a, c, t, g, unknown or other
  modified_base (2640)..(2653): a, c, t, g, unknown or other
gttccatctcaaaaccaattggtgatgagnnnnnnnnnnnnnnntcttatatatgactcaatacttttacatttaatccatgtgggacaatgttctccactaatatatgttaaaagctagttagctttctgttaaagtgtaaattagaacaactcacacttaactaattatatttaattatattgtaactaattcagctatatatatcttgtaaactaactaattataattaatgataattatcattttctctctcaattcatttcttagcatggtatcaaagcattttgttttctttatttgttctagatttttctctcaagaatcttcatcattattctctttgattctttgaagcttttttctctagatttcatggatgatcttcttctagttccagggaatttctctcacaaactttctatgaaactcgatcataacaattttcttctttgtcgttctcaggtgcttgctacagttcgaggtcatgatctctccaatttcatctcatccacctttcaaacgtcaaggcaatttctcacagaactggatgagattgcagtttctattaattttacttattctcacaagatcaattgttgtgtgtgtggttattgtcttcgatgactgatacgattcttactcggattattgatggatgatatgattcttaaccggatttttggttgcgagtgttgtgttgttgtttgataagttcttgaacaattctttgcttctcaaaccaatgccaagatcgatcagtatgagactcaattcaggaatttcaataaaggcttatgtaacaatataaagctaacatgtgtaacaaagctagaatatgaaccagcttaaattatgcatctataaatgcattcagatgactcgcctcgagaaatacagttagtagaaatacttaaactcgttgtcatatagacaatggtgagacatgagtaataactactaattgatgagaccaacgaggtgaacaagtccatctcaagataaacataatcataatggtattgtttggaacgtattgataatgagtttacagctcattgacccacatactcatgagtatgttacaagaataaagacaacaacttcaacattcgctcttgtcgcgttgaagtaagcgttttgcatatacttcactcaacttttaaggaatggtgcgaaatatactataactatacacttagatattattccacggagatgtttaagaaaactgttaattgaatgacgaggacaacaaaacacagtcagcataaccgtctatagataaagacaaagagcagttatgcagttatttataattatctcatgtgcataaatataaaatgtagagaatatccacatttcatgagcagttataaatgatcagattccaatggaataatttctaccctagagacttctataaataaggacagagcccaggatatttatttgaataatacactaaaatttcgaaatacacttagagaaaaggaaaattatttttctctcaagaatagttcttactcatgtgttgagaattcaataaagacaaattataaattttatcttagtagctcacactactccttgtgtgtggtggattgatttagaagactacagtgtgagatttattagatccaacttacaagaagtttcaaggacaccctgatagtcatcaagaggtatttatttccttcatgtaatttacattttagatttaatatatatacatgtcacatgtagtgatcattggggctatggtacaatgataatcaaataattattatttcactgcatgcctgatttagtaccataaaactaagagtaacaacaatgtcaatccctccacgcatggaggctcttcttccaattacactcgttgtttgacttggaacccctatgccactagacctcgtggatctgctccttgtcaaagtatgtttcatggattcaatggatctactccatctttttctactagttacaatagctttaatggttctcgcccttaatgtaaacaatgtgaaacggctggccatgtcgattccaagtgctatcaacgatttaatatggaattcataggtattggttctagtaatcttgacaagtctcagtccaatcctcaagctatgatagctatttcactaaatgatcatgcttggtatccagactctggggctaccaatcattgtacttctaatgagactaatttgatgcagagacaagattactattttgcacttgaacaacttcatgttggtgatgatgctggttttccaatccagcatgttggtaattcattctttcaatcactttttttcctctgaagtctttgttcttcataatcttctccatgttccacaaattactcaaaaattactcagtgtatcatagttttcttgtgataataatgtcatttttgagttccatcctcatgtttattttgtcaaggatcaggtctccaagaaaaatccaatagaaggcactctcaataatggtctctatgtctttcattctagttaggttcctcttctaagtagcctggttccaagcttagccttatccatgtctgtccattctattcctaataacagtagtaacatgccaaactcatcttgtgacagtcagtagtcccgnnnnnnnnnnnnnnaaataccgggtaagctgtgcaatccc

SEQ ID NO: 114118 - DNA, 4185 bp, Cannabis sativa
ttctatctcgctcaaaagaaattaggcatatataataatgcaaaaatatggattaattatgttatattatagattacgtcacacatttttagttctttattaattttgaacggttacatatattaagttttcccatatttagtttattgttaattaatataaaaataacgaaaacatgcttctattttttttatttctttttcagatgatgtgaaaacatgctattaacaaaataattactatgtttcatgtaattaaatctaaatttatcctacattattcatttacttaatatatatataggtaacaagtcttaatctcataataagtttttagtaatttaataaatgttataatttatgtgtgtttttccacattacttgctcatatgtaagtatgataaaactatgataatctatcgaaaaaaagtataatttgtaaatgtaaaattgctacaataataacacatgacagcaatagtaacatattacatgttaaagagttccaacttatacatatatagtccaatcaaattaataataacacaaccatatatttctaattatacagtaccactctctctctattctattttttttttatcatacatttccacatattacattcgattaaatatatattacacacattttccttcaaaaaaaaaaaaaaatatatatattacacacataatacataatgagtaattaaacctcaatacatatatatgggtacccatatttatacactcaattaattatatcattattcgtaaatattgttactacttggatctgtttcgaaccgaaacccttaggccaccagccatgtgtgcagtcaaaagaggaacaaaaaccggttggtccaaacaaacgggtcgaatctcaaaccgtttaagcacagaagcaaccacatatttcatctgagtaaaagccatctctttccctaaacaaactctcggaccagcttgaaaaaccggaaacttaaacgggctaaccgctttcaaaacccgacccgtttcatcatcttccaataaccaccgttcaggtttaaactcaccacaatttcccccccaaagctcttctaacctccccatcccgtacggaaaatacgtcactctatcacccttctttacgacagtcccgtcaggcaaaacgtcgtcgtttgcagcgtgctttgagtcccaagacacaggaggatacaatctcatcgactcacacaaacaagctttcaaaaaactcatctcttgtaatgaatcgtaattcaatgcaacattattgctattactacatgatctgtttacttcgttgagtagaagcttctctgcttttgaattttgagaaagtaaccagaatagccacgtcatcgccgccgaagtcgtgtcacgtccggccatgacgaaacttataaccatatctctaactacttcatcgtcgtgtccggccattaaaaacctcgaaagcatatcaccaccacctttattttcatcttcaagaataagttttctcttctttgttatgatctccgaaaccgattcgtgaacgatttcgatcgcgtcacgaagctttttctccgatccgaaccgaaaaaatcgcttcattttccacaacagcgccaccgttgaggtactacgcttggcgctaatctcagcagcagtgtcgaaagctctaaaaagactcggcacgggtcgtgacgtgtcaagacaacacgggtcgtgaccgagcgcgactttacaaatagtatcgaaagcgaatctcttaagcaaatcttgcaagtccaaaacggtgtcgttttgaccagcgttttcgagcaaaggaatcaaacgctcattaacttcttcttccagtgtcttcaccacgaactccctcaacgaacgagtcgagaattcgtgactcgctagcttcctctgagtcgaccataactcgccgtccatattgaatatcccgcagcctaaaagatcaccgaggatttcagtgaaagactctccttttgggaagttaggaaagttggtctttaaaatatactcgacgttagtcgggttggctgtcacgatcgtgcgcagagccccgagtcgcttcacgactacggtgcttgtgggagagcacaacaccaaatcggtgtaccaatggagaaggcggcgccggttctcgtagaaagatactaagcacccgattatagggtaagaaatgggaccataagtagtagtaggagtggtattattattattaatgtatataatataggattttcttagtattgagaagaggaaaaagagtatgagaagtgatagtaagaggagagctaaagagttaagcatgagaagaaaattgaagagatacatggcttgatttaatttgtaatagtaattatattgagatagagatattgggaattgggatattattatcaagatagtttgatgaggagtggagtgaggtaatggtggtgttaacttatgagtatatatatattttttatagtgggttttgtttgtgtactatacgtgtgtgttagtgagtagagaaccggccatatgtgcttttgtgcgtaggaatatcggctttggtcttaggaaggaaaaagacaagaaaaagataataatctcaatcacatgaaactcgagctaaaaatggctagttattagcttataagctttagctagctttcactgcactggtgggagtagtacaattatgtcaattcactctataggattgttttatttttggaaccacataatttacggcagtgtgttagaagatgtattatataggtccaattaatttgcttagttatattggtggacctagatggagggggcagctgatttatttgtaagaaactcgagtaattttatagggcatagctattaagtacttttactgatgtggatttgatagtatattgcaacaataatagtatgtcatattttgtggtacttaagtgtcacttaacatttttttaattcagtaatacactcataaaaagtattgctatgtgatggtgctagtagtttcgtcatgacgtagcacattataaatagttagctattttctacaagagaaatgctataagagcatccatgatacctactattcttgtgatgtgtaatatatcgttattggtgtaattagtttttaggtctcgcttattttaatttaataaagattataaaaaactgctaactaattatagggcaccaccatagtggtgctagacaccttcatgcctcatagcaatgctctttctatgatcattattaaggtaaaacaagtggggcttgataatgaattcattactataaaatgcattttcaatgtctagtaaaattagtgttggacatgaaaaggttttgaattttttttaagtctaacattactggacataaataatatttcatcatgtctaacaatgtttgacatgaaaaaaaggacattatatatataaatcaaataaaataaaagctggaaacgtgtgaatcattaacgggttaataaatgactctctattcttcgaaaaatcctaccatcaaccatttcatcttctttaaatagaaaacctagcaaccactccatttttcccatcttttcttgttacccgtattctcggacaaatgatgcgtagcagtcatggaaggatgccaccatgtactactcgttgtggcatgaacccttcgtgtgttagattcacgtgagaaagagtgttcctagaggaactaaggatcctctatgttaatacgaacagggaagactctaaagctcctaccattcgcctattacttagaaatgacgaagttctcacaaatggcctagaaggatagcatggtcatgtagtctggggtagagttggccaacctgtcttgaactctatccagctatattccatatagagctttaagtgacggttgtatgtcctttgacaccaaatcagatcttgtcccctatgtcagactgtggtagtgcgcgaatgtgcttctgtagtgctttttattcaacgacttgtctaggaaaccacttttaaaggagaaacctttgaccgacacatgtcaacgctcttacaaaatgccttacaatagctgtgcaccacacgatggaaaagttacctaccaaaccagcggtcagatggtcctgttgtacactacaactatttggattaataccagcggacacaataccggcgggccac

SEQ ID NO: 114119 - DNA, 6509 bp, Cannabis sativa
  modified_base (241)..(242): a, c, t, g, unknown or other
ccgtcagatcaaataactccctcatctgacggctgtcgtacatcacggattacaatccgtgaaagtacaataacgggacaaaatcatatcccaatatttaaatttgaaaagcgattaaagatatttcaagttggttgagatattccttcaaagtagttgagatattctttcaggtggttgagagatattccctaatctaaaatatcaataaccaaatttggttatagatatttatttaaannattaaatatgatttaattaattgagaattaattactataaatataagccttatttgagaaatcatatgatactttaacgctgtgatttttaaaatactagagagaaaagaaaaattatttttctctctcaaacaattcttgctcatgtgttgagaatttatcaagaacaaattatatactttatccttgtagcccacactactccttgtgtgtgatggatcgattttgaagactacgatgtgagatttattggatccaaattacaagaagttttgaggatgccttgatagtcatcaagaggtatttatttctttcatgtaatttattctttagatttaatgtatatacatatagtaatccttgagactatgatatgataataattagatatataattctttcattgcgtacctgatttagtacaataaaactagtgtatcagagcgattctattatatatatacattaaatattgtgtgagttttatgtatttatatatatatgttatatgtatgtgaatggatggttatattattgtaaatgtatgacaggtgatgaatcattaattaattatatggtaaaaattgagtgtaggcttcgttattatttttcttaaaaaataatgtaagccaatactggggcatagaaaattttatgtaattttattttttaaaaaaattattttacgtaaaaaattttacaatacaatgttcatggcatgagagctcggtttctaatcttgaaacctggccatgcacgaccacgacaccccatgcatgcgagtttgggttcatggaggcaccccagccatgcacgatgttcacattcatggtattagatatcgtgcctagccccgagagaccacaaccgtcaatggtcgataacgagttattttcaaaatttaattttgagacctgtcggcctcccccatgtggctttgccgacgttcgaaccgtacgaccccgtggtcgttcttttcgtgcaaccatcattgtcccaatagttgggacatatgaatggttcatggacataaaaacccaaggagatttggtcctctttgatcatcggtgcaccaacacctcttggacccctcggcgaagctacaagcgtgacatgcatgagggacgtgagtctttcgatttgcatggacgagatgaccctttcgggtcttgggtcgagtaacccgtgtgcgactgaagctttaaggcttccatggccactactgccatggtggctctccagagccgccagccacggtggtggccatggtggccagtccattttttgacctgaacttgacacccgtgtatatatatacggtatgtatttatataatatacaatatatattacatatatacaatgtatatacactataaattagatattattattttaataaaaataattaatgttgttttggatatttattcaaatttggttttagattcataataaatattatagtttcaaatttaaaattcaaattcaatttgaaactaatttattgtgttaagacaattgttgtcttaatgttaaataagtattaaaaaatattttgtatttaattaaaaactattaagacaaaataataatattttttggaaaatttaaattttcaaatttatttttgaattaaataatagttgattataaatttgaaattctaattcaatatctataaccatattaagacaaaagttgtcttaattataattaaaaataataaatactattattttaagataaaactaatatgataataaagttgtcttaaattaagagtttatttaaaaattaattaattaaaattgttttaattaatttatgggttataatttgtcttaaataaataatttatttaaaaataaatttattagattattttaaggggtttaaaagatgtcttaaataaatatttatttaagaataattaattaaaaataattaaattaatttgaggcttacgacgatcttacaaaattataaaaatgcccttacagtgatggagattcgttttgtaatttaattttctaattttttcaagaattgtaaaattaaaaatacccatattttactcaattcatcatcattatttatttatagtttttaaataaatgttcattaataattgattaataacatgctcatgcattagtaaataacatgatatacatagctatctcacacagttgtattatcatgcatctcatagtagaaatatgatatattaggattgtcctatgtgtttatgtgttaaccgttttttaaactggaagcatgtaaactgactaagattaatttaaaattaacttgttaatttaaaattaacctattaatttaaaagaattttaaattatgaattaaagagttaattcagatttaataatggtgacggaaaatttatttataatttgaggcttttattataaataaattaatcataattattaaagtaagtaatatgttttaattctaagaattaataaaataagcacattagcctaaaatagtgagtgggagaaggagtacattaacctacagtctccattatcggtcaacactgaatcagtatagactagcttcgagaagactttaattttgtccccttaaagaagatatttgtttatactatttttcaaggttgatctcttgactaagataagaggaagtgaccctaaggcggtgttactaagtcaagtcatgatcgacatttgtcttgcaggaggggaagtggctccacatatttctctggatgtcattgtaacgcctggagggcctattgaggccagtttggaggatccagaagtgatacttctggaggagggggaaataaatccttttatttccaagaatggcaagcaaaaagagcaggcttccgctacgtcttcttcaaagcgagctatgacctccacaactccttcctaaggcattttcagtttaggtatccattccaaagcagaccaattcccatgtgtacctccaatccccttgactcatgtccatctgaacccaaaacacactacactctgcgtggctcgacatactgttgacgtggatgaacaagcaaagggtcttgcggaggctaaagttttaaaaaaggtggataaataaccatcaggacgtagatctttaaaagagtatgtcgagcaagggctgaatttgaatttggatcccatgacctattatttttccaactatgtcgggttttccttggccccgtttacttttgaaattgttcgtagtttagcaatcaagttggtccagctgtctgttaagcgattcgttgcttgtgcttcaattaatattgtctatcaagctcaagacttgagtttgttgctggcttcaataggttatgtttattttccttatcctaccttatcattatttgttatttttgtttactaacatacttacacatctcttttttatgctgttgttgagattgaccgactttccaagaacttgattgagcaaggttatgcggtagctagggaatcacaggggattgttgaagtttgcgcagatttggaaaaggccagtaaggaggtggacaccctgagtgatgatgtgttggctgataagaccttgagggagagacttgaagaaaatggctgacttagagaagtccctgaaggaggcctaagacttctaagtccaactattggcggccaagcatgtcggtctcagaaggatgcagatctgtccacggccaagctagagattgagacacttaaacaccaactgaagagcttagaagaacttcattaggggatctttagttcgttgccaagatgtcggtcgagctgaagaagttacgttttctctgggagtccaacaagctagtaggtgaagcctcgacaaaaagagtcatccacctgccattcctagtcacttatgaacactgcgtcaaaagttatgaagatggggttttcatgtgctagaggtctaacaagttcatgcttattcttaacttcttgcctgaccctaaggtgactatccagcgttatcgagaaaaggacaagaagttggaggtagcattgtaggtaaagatgggagatcctcggcttcctccttcgtcttccccaaggcaataattgaactaggttattgaacaatcctctttctttttcacatgtggctatgtttagccaaattttaattatggggggacaatttaatagggcttttatatatttttcttctttttttagaacagttggtcaaatggccttattcatgttcctttcaagataatgaggcctttgatgcctcgctttatctaaaatttatcctagtcgaaccaagcttttggtttttctctttattttaattgtgcttgatgctttttttttaacttttattaaacttaggcctggtggttatatttttttttttacatataggtcgtgccatgcctccctgatagttatatttatttcatgcgagtaggcaatgccattcctccctgaagcattcttatgattatttttattttttgcgggtaggtcgtgccatgccttcctgacgcatacttatgactatttttattttgttgcgggtaggccatgccatgcctccctgacgcatacttatggttattgtttttttggtaggccatgtcatgcctccctaatgcatacttatggttatttttaattttttgcgggtaggtcatgtcatgcctccctgatggatacttattgttatttttattttattttggcgagtaggtcgtgccatgcctccttgatatatatggttacattggagatgtcatcacctatcccccatgtgactaaatagtgtagaccttgagtcacttgttgtattttctcaagttaaattaacaccttatatacgagtaatattatcaactcattactttgtcaaaaaatattatcttggtcaaatgatctacaagtctttgacaaaatactaaagataaaattaaatattgaactcctaactgttgatagtatttttgaaggtgatctacactccaagctcttgggatctgagatccatccatctgcttgaggcgataagttccaacacatatttcatcttcgatttcatatggtccttctcatttggggcccatcacccccactctaggatcttgtgatgcgaggaagaatcgtcttagtaccaagtcttcgaccatgaacttttggtcctttacctttgagttgtagtatttggccaccttcctttggtacgatgctaggcacatttaagactcttctctatgttcttcgataaagtcaagagactcttgaagcaaggattggttggtggtcagatcaaaagcggtccttctgtgggattgcacagtgtgttctactgggagcatgacctcacatccataaaccattgataaaggtgaatgtcctgtagacgtttgggtcatggttcgataggaccgcaatactcgtggaaattccctaggccaattattcttgcaagcttgtaatttcttcttgatagtagtctttcgaatttcattcacagcctctgcttgtccgttagcctgaggtcttggcatggcaaaaaaactattaacaatctcgtgatttttgcaaaactctataaagtgatcactatcaaactattttccgttgtccgagactattttgtggggaaatctgtatcagtaaacaatatccttaatcataaagtttaaggcattctttgcagtgattgagttcatgggctccacttccgtccacttagtgacatagtctataactactacggtatacttgacccccagctttcttggttggaagggatccgatagggtcaacccccacacttaaaatggccacagactagtcatcagagtgattttatttggtggagctctggggatattttcatatctctggcaggtatctcacttccagacatattctaggtaatcctttttcatagtgggccaaaaatatccctgcctcagtatcttttagataagttatcaccccagtgtggtctttacaaaacccttcatgaatttcttgcattattgcttgggctttggattcgaccacgcacatgaggtaaggcatggccaatcctctccgatataacctgttgctaatcataacatatcatggggcttgatattgcaactttttggaagcggctctatcctgtggtaattctatagatgtcaaatacttgatcacgtgttgcgaaaattattaaatactacgcaagtgcacgcaatcaagtagtatacttacgcaagtgaggtcgaaccaca

SEQ ID NO: 114120 - DNA, 2481 bp, Cannabis sativa
  modified_base (1385)..(1387): a, c, t, g, unknown or other
  modified_base (1492)..(1493): a, c, t, g, unknown or other
  modified_base (1564)..(1566): a, c, t, g, unknown or other
atattttttgtagtgtaaaatgtattggtttttttttttaaaaaaaaaattaagtttaataagtataaaaaatcaaatttccctttattattcaccttaaatgcatgccaatttataattattagaaaaataaaaatatatatctcttaaaatttacttctctaagttaattaaacatgaaaaactctatttgaattaaacaaaataataaaataaatatgtagttataagcgtagtttagtagttatatagatttttcctctcaaagaaaaaattccaaattcaaatatcccttctttaatatcaaaaaaaaggaaaattaacaaaaaaatatcctcacaaataataattagtattagttttgggaaaaaaaaaagtttggaagtatttatgtgattattagattttgtatttatagatgtgaagtaataaatgtttgactttaggaagtaaaaaaaaaagtaaatttattttttgagaaaatatgtaatacacccacctttttaaaaagatgttttgataaattttatatctattttaatatttagaagaaaaagattagttatttaaaattatttataaatttattttaaaaaataaataatttataatattaattacatgtataaaaaattaaattttatttttagtattataaattattaagatttttttttataaatttacatttatttttaaataattacaacgtatatttttttttttttttgaagaactttacaacgtatataataataaaaaaaattctccaataacgttgaaataaaaaagatctatcgaaatgttattttaagatttatactatatacttatctaaaaaatttatttttatgtttgataaacaaattaataattattattttaaaaaataacactctataataaataattgttgaaaaattgtaatattttataatgacacctaattttctcactggattatgtgaattttaaaagtataattgatactttttaattgtctccaattaaataattgtttgtaatgacatgttaaacttaataattattcctaattatgtttaattttaacttatgagattacttaattatttctttaggaaaaaatattttgaataacaatagatgaatttttaaaggggaaggacagtaggtggctgagcaaagacagacaagtttaccttgccgaggagcacatattcaacgcccacatgtttttgttttttcttggttcaacaaaaagcagaaactttagcgtaaatattattttgtattttgtattttgtaaaaattactaattagacctatttttttaaatgacaaaatagttttatatttttcaaaatagtaaaaataagatcctgagctcaattttcaacaatttnnntttttaatataaccaactttaaaacaatttctaacacgatcaggtataaaaaatataatcagttttgtcataacatctctagatcagattattattaagttttannttgacaaaaaatcagttcagagttctaattgtacaattttaaaaaatataagatctattttgtcatttaannnaacagaaggtccaattaataacttttgcaaaatacagagtccaaaatagtatttacccatataattataggtatatattaattattattttggaaaaattatggttgcatatttttttttaattttttaattataaaaataaaagtaaaatttttattttataaattttattttgaaaaagtgaaaatgtgttatataattaatttttgtatttttgtttttaaaaataaaaaacaaagtataattattttttttatgaaaataaaatgtaatactgtgacctttttaattttgaaaataaaaaacatgaattttgatttttttttctttttttttgttttttttttaaataaaaacttatgactatcatttagtttatttttaaataaatatacaaaattataataataaaaaaaattaaataaaaaatactcattagcatcataaaaaaatctaaataatttaaaattaagcttaggcttattatctatcaataacataatacaaaattgacaaaatcatacataataatatatatatataaactaataattgtccatttttaaagaacagtattaaaaaaattataacaattaataaactttactcattattttcattttcaatttgctctcaatatacaatcagtaatttcattaagtaatatcaaccattttacaactttgatctcttataatgctaaacttaatactatcattcaaagttctgaggggtgctttgtgtagtagtatcgtctacttcagaaattgttgtgataaatctaacatgtaagtatatatatcattttaacaagtaatatacttttttttttgacgtggtgaacagagtcacacatgattaacaaagcagcaaaccacaatcggcctcctcgaaccaagatagctcatcgtctaa

SEQ ID NO: 114121 - DNA, 976 bp, Cannabis sativa
  modified_base (923)..(934): a, c, t, g, unknown or other
aaaaaaaaaaaaaaaaagtggatcaaaaaattattaaattttttctcatgttgcattgaaatgatatttacttctatttcaaaatagaatagtcatttcactaaatagtagaaagaccattctattagaatgatattataatattttaaaatacaaccaaacaaaaaaataaaatgaaaattattttcttctcattctatttcattttgttatctccaaccaaaacttacttaaaagagtctaaagtgaacttcccctttctcctcttatgggacaaatttatcctatacttggactaattaagccatgacccttggaccactaatttcaaagtggtacaagtcacatctctaaatgagaatgatctttgaaaatagctttcatacaatgtttaaagagggtaacccaagtttggatttgagaagtaatttatggaaaacattggctattaacatattttcggaagttgaatctttctactaatatataactattaatacaaaacgtaggctgcttaattgttgttaatgagtttattcattggatgaattattattaataatttacaggtataattgtttttgatataaggaaagaagtggcctagaattgtaaaagatctcattttattaggaatacaattaagttttctaatttctggtgtcttggctttttctcttttaatgtattccaaataggttatgaaaaaatatgataattctcaacttcctttaattgtatcatcgataaactactcctatcaaacaagatggtaccacctacagcaacttaatcgggccatgaaaaattctttttgagaagggttgtggtgggtttcgatccttaacccaaaaaaggaaagatgttagcaaaaataattctccgattgttttttttttgaaacttacaaaaatactggaatnnnnnnnnnnnnttacaaaaatactgtcatacggaatttttttcaaaaatactg

SEQ ID NO: 114122 - DNA, 1165 bp, Cannabis sativa
ggggagttctcacttcaattccgggattgcgatatggaactcaggtccctgtaaatttctgaacacgcaagggaaaaattgtatagtgccctgaaaagctccggcaagcgatttttgagactagctattgacttttccctcacctgaaggcaatgcctctggtaggcttcttgctcctcttccaacctcttcttcactgactccaccgcgaactgcttttctgcaagaatggtatcttctgttgtaccagtctccccttcatctggtattgtacgctctttatgtttgtgataccattcctccaatgcccgagttttccgactaagctccttactggtttcttcgcatttctctctgagttttagctcttcttcttgctgacgcattattgtgtctatcacggtagcaaagttggaaatagcagatttggcaagctcatctggaattttctccaaatgatcctgccaagtaatgagaagtctctgtatgggggggttttgaggccttggtggggatgaaactttctcttttaagctgctctcagttggaataagattaagctttagccagaagtttagggcttttatataatctttttgcttatttacaaggctctcaaaatgtacatgccaatcatgcacaacaccatgcaactgcgcagtacgagaatggtgatgctcggtcgtttccttggggcattgtgagatgtcaaaatatttgagggcctgggaaattgttagttgagcctcatgatgatctcgcatggtatcccacatatttgtcatcctgcaattgttgacacacagaagacatttcacaatttcaaaatgggattcaaatcttttggaatttggatgggacaagcagacaccctttcccaagattgacatgaaaatgcaaaaccaaatccatttttgttacattgaagagaagaaactcacccgttaacaagctgaacaagttttggatataactgctcatctcgtaagcgattgatctctgaaactgttgaatccatggattgaatgtcaacaatgtatcttgtgtgcagatgacttactgctgctttcgctttctccactgcgtctgggttggaagcccgtttctttagcttattaagtgagttaactttccgttggtactcgaatttcataacctcacctgc

SEQ ID NO: 114123 - DNA, 5226 bp, Cannabis sativa
tctgactttgaaaagtcatgtgaatagggaaaggtcgaaattgaccttaattattgattagtttgttttgttggtgtagggacagaatagtaaaatactatattaatttcctacagttgccaaggaatcctatttatatttagaatataataatagcggatgctataattgaataaattctcactttcacattaataaagtgtttgttactcttgatgtttagtagttgacatatttttttttttaaaaaaaactatacatatatatttctctatcttttgctgagattgagactaaaattgtggttgataaaattatgtgaataaatgataattactctattttaaccgatgtataaaagaataacactaaaaatcaatccattatccatttcatggggacacaaaacgccgccgtatgtgaagtttagcaagttgcatgcatgggaaagcaagtggtttattttatatataagcaaggcaaaaacaggttcaagttggtgagagaaaatatgatattatttttatttgaattcaattaatttcatcaagttggccatttgcaatgcatgcctgtcatcatatttccttgtcttcttcttttaattatctcacctgccatgccatatacctacttttccaattttgtttcaaatggatatcacattcattggtaagatcactatttaatggctttacacaaaatactatatatttttcttcttctttttactgtttttaatttatttaagcttctatgaagattttattttttctgtctctttctttcttctttttttcagtcaccaatgctgattttttatttatttgcagtcaatcaacgctgactttttttttttctctgaatctccatctctttttcatacgctattttttttttttatctttatatagaaaatataagtataataagtttaactttttacatcacattttttttttaaaagtctcatcaatagataaaataaacttagatctgttagtcattacaaataatatcagccggtatagtataaattagaggtgttcgcggtgcgggtacactacaaaaaatcttacttttagtcctaacaaaacttgtgattaaaactaaaaaaatcgtgactaattataaattattatttctatgttatgactaaaaggtccatgactaacagtattagtcacaaaaattacaatttgttgtgacgaaatatatttttagttacaatacttgttgagactaaaattaaattagtgacaacttataactaaatactacattttagtcacaagtaatattttattgtgactaaaagtcacatttagtcgcaaaaaaattgtattatgactaaaatgttgtcattaaaagtagcaattttttgtagtggtagtgcgatttttgacctttttttcaaactaacccgcacatatatacgatttttttaattttccaaactgcacccgcaccgcgaaactaaaaacgccaaaaccgcactgcaaaaaatggtgtggtacggtggaatttttccggtttttatagtttgaactatcaccaaataattaattatcacaaatacaacaaagtttgagaaacacttgtcaaaaataccataaggcttgaaaataaatatgaaaaaaaaaattaactgtcaacaatacaataattagtggactttgggttggacagtcacattggacctaaataaatataaaaattgttctttttataatgtgcggtgcggtgcggtttgaatcgtatattaacaattcaaaactttaaaccgcactgcaccacgcagtttaggaaaagttcaaaccgcaaccacattttctttttgcagtgcgggcggtttgatgaacacccttagtaaaaatctttaccataccagataaattatgagcaaacgcccacttagcgacattgtgagccgcaaaatttcaaagtcttgaaataaaagagaaattacaacccataaataaagtagagagtctattacattggttaacatagtaatcaattccctagttagcagaaattcccttcagagaattgataaccatctcagaatcgctctccaccatcacaaaatgatgcttcaaaaggttcgcaatttttagggtaagtaagcaagctgcaactttaccaataagggcatcaatatagtccagcctttctgtagcagttcacaaaattgtaccaaaataatctatagccaaagccaccatacacatagtcccactcccaactctgacatcacaattaatctttaaccatgtcctccggggggagaccaagcgagagtggccttagtagtctgggcagggaataaaaaatcgagccataatctacataacaatgattaatagtgtcaagatgagtaatgctacataggttatttttgtgaactttatcgttacgggcccaccatatagtatccaccatagagaaacacctccacctcattaatacccttagcttttagaccccatagaaaattaatctaatcccacacactagcaccagattcaatcactggccaaatcccccacgaagaggatctccacaaatggtaggcaaaattacaatgaagaaataagtgttccatagattcctctcccaacccacagataggacaagagggatcatcgttatgcattcttcaccaaaagagtacgaataggaagcgcatcaaagagaatgttccaccaaaaaaccttgtgacgttccagcacggccaccaccacaggcggtgcacgctccaggtattggatcaggtaagcagacttacttgtgaactttctagaattttctttggtccagatccatcgatcattcccctggccacttggtatacctcctttcaaaatgtagaaaggtattaggcctgcatcacacctacatcggacttggcgtaaaaaccaattttctgcccaaaacacattagagacgtagatccaatgtaggctcgatgtaggttcaatagtggcttgatgctatccatttttttatgttgaaatgggaagcatcgggctattatcggactaacatcgggtcactatcgaacctacattgggcctacatcggatatatgtctttaacctttactcatttcaacaatagaaaggcatcaggtctgcatcagacttggcgtaaaaagtagttttgtaccataaacacagatatgaacaaacccaaccataaatctaacagaaactcacaaataacatagattcatcatacattttaatcctaaatcaataaacctatcaatatactcataaattttaaccctaaatcacccaaaaatacaatgaaatgaaatgaaaagagagggctcgaaatcttaccttcgacattgcaatggactggtcgcggtggtcatgggttggaaagagagtctgatatgccgtaatgggcgtgaatgggtgagagagtctgagatgtttgatgttaggggttgggtcggtggtagttcttcggttcgagaagacagcgagagagaatagaggaagagagaggcaggagtgtgttggaaaatgggagggataatttaggaaatagataaaagttggccaatattaattagctttagtttaggggaaaaaattaaacctaatggatggatattttatcaaactagtggagtctcacgtgcttcgcacgtgtggctcctaaaaatatttaagcacaactattttaaaaaaataaaataaagaagcattatttatttgaaaatatacttattgctagcaactaaaaaaaaacataagacaaaatgattattttcacaaatattcacaaaagataaaatgttaattagaggggaagcttagtttagaaagaaaaaaaaaaagaagtaagtagtgtatatgtttcaattgcctactttaaattttttataattaaatatatagtgaaggctaattgtgtaattcaattagtaaaaggccaaaaagctattctcacttttatataggttatagaagatttatcattttagatctctaacaggggatctttctcaaaataaaataaaaaaaacaaaaaaaaaaaagggtgcttttggtttggagaattagcaatttagcattttattgaggtgtatcttttttactattttttcttttaaggaaaacccaaatttgtaaatgtaaaggggtgtgtttataaaaaaaaaaatgtgaataaatggattagggcttatttaaattaagggtatatttataatactagattaatattatgtgcaatgcatatataattagttttatttttaattaagtttaattaggtgatattttctttataattaagttcgattaagtgtaatacatgtatgttcaactttttttaattatgtgatgtatttttttaaaaatattggagttgagattttaatctttgagaattttttttggttatttttaaaataaaattaaaaatatggttaaaatatctacaatattttatgtattttatataatttcaacaacttaattaaattattaatattgccaattatataactaattacacaatatttttatttatcgaaataggacacacattatgtaatattattaattttagttttgtttttgtgttgtcgtaatattatatacaaattctaatttagatcaatgtgtatatataattattaattaattagttgaaaaattatatacgctattgagtataatcaattttatggtcttatttaaaaaagaatactttttattaaaatatcaacatatttttatttttaaatataaaataatattctgttaaagttaacgtaaaaaatagaaaaatatcgttaaacaaaaatttcgttatatagctacattttatatagaatagattttgaggtatgttctcattaccaaaactcctttgggttaattttacttgtttgctcttaaaaaaaaaatgagaagtagaatatttttcgagctgggctttttaagtttgtctgtacaacattaacaggcccaccttaagtctttacaatcactggaaatagagaagagatatttacaaaaatatgggaaaagaaattaaagttttgataaatatggcatgcaaacttaattgtattaaatatagcattttttcaaaaaagtactttaaaatatgggaaaatcattatagataaaaaaaaatgctataaaaaactataaaattgtggttcattttttgtcatataaaataaccagttattta

SEQ ID NO: 114124 - DNA, 1616 bp, Cannabis sativa
  modified_base (1565)..(1570): a, c, t, g, unknown or other
cccaattcagggacaatatagtggctgcacaaagaagatatacaacattagctgagtcatccattcaaacaaagttagcaaacttattgatagcttttgaaaaaaccaaaaaataaaaaagagagaaataaaaacttactagttggtgtcaaaccacttggtcatttccatagcaggaacagtggcattacccctagccatggagaagtaaacatcaaagccaatctcgccgccattccaaccatatctcgagggaacagccccaagcatagcagtggtatccaacacctgatcatagtaagaaaatgtgttggatggaatgtacttgattccagcatcagccatctgtttccagatagatactctaagatctgctgcaaccttctgcaaatcatcagagctactcttcccatcccagaaagattccaaggcaaacttgagctctctcttgggtcccatcctgggatacccaacaatgtgggaagccattgctctgttccacaaacaaaatttcaaccatataacagcaaataaaattgatcataataacaaattcacatcataaccaataattatatgacaatcttattctaaaattttgattaatatctgcatttgcatctctaaatataacaattccacaaggcacagcacatatgaattacctgagagtagtagtacggaaagagaaacgaagaaaggagggagggttggtataaggagcgaaagcaattgatattgaaaaggaagaggtgaacctcaagggtgcaattgtatggaatgaagctttgggcatttatactactcgctcttcctattcctattctttgtcttatcaccttctcaccctctttttggaccaaatctcacctacaatttcactctttttttttttcttatttatttcttcctactaattttgtaattattaggtttttttttctcattttgatgtccaaaaaaacaaatcaccttgtgaataaaaattttatggtcatatttgaaattaggttatgggatgtggcattttgggaaatatgaataggatgtgacattttggaatttatgatcatatcatatgaccctaataagaccatttacaaggttcatcacttcatccaccgaaattatggtcatatttggaactataattttgttttttttacatttttatagattttaattttttttataaaaatacaaaatgttattttttttattatttttatgttattactaaaaaaaaattaactttccaaagaaaaaaaaaaacaagtaaataactgtaaaaatgaatccgtgaaaatataaaaaataaataaataaataaaagccaaattttaagtggattgtgtaaaaatcttctaatagtattgaattttaaatctatactaaattagttcaaatcattttatttcattctatttaaatgattgagtatacatatcattagatcaaaaatagttattatgtttattaatagggttttttttatttttacacttcaaaataatttttttacatttttatgtaattctacatataaacccctattgcaactagcnnnnnnacttaaattgcaacaaaaaatcatataaaaacctctattgcaacta

SEQ ID NO: 114125 - DNA, 1023 bp, Cannabis sativa
tttttttttttttatatagaattagcatagttggaagattgtcaatgtcaaatttggttattttgagtacacaactcccacttgcaaaccacctataattgaaatgacaaccacttcattagctttagcttagctacaaacaacatatgaattatattataaagtaaaattgctgactaattgctgtgttagattgtggtttaattttgacccattagtggctttgactaatgaaattttggttatgtaatagtagcacacaagattcatcaagttgatgagaccattaataacatcttttgtatacattatacattaataagattcctagttatttaacaaatatatatatatatatataagtatacagttaagtgtattactcatgaataactataattaagaaaatttaaacttttatatttaattaaaaaatatcacttattttttacgttaaatggactattatataactgtagttgttattgatttaaagagataaatgaaatttgagttaaattgaattagatatttttaatataaatatattaaaactaaatataataattttttcaattaaataactaaattaatcatataaattaaaatatttcttttattgattattaaaaatttaatattaataagatttatatttctagtgttctaccttaaaaaaaaaaaatattaaaaaaggttccatttatataacattcctaattgtacttcaataacatatgcacacagttttataataattaatattgatatgaatttatttatttttttttctaaatatcactttttataatatccaaatgcatgtaattattctttacatcattcaattgagacaaaaaactttcgtcaacaaatatgtgtatctattcgaaataaattgaatttggtacagttcgattatttattagggtgtcgtttggtaacacttttatttttttaattttttaatcacaaaatgaaagtaaaatttttatttttaaaaaaattgtttttgaaaaacaa

SEQ ID NO: 114126 - DNA, 1752 bp, Cannabis sativa
  modified_base (1727)..(1727): a, c, t, g, unknown or other
aaccattgaaacctcttccaaacagttaaataatcatattttatatatgaaagattttttttttatataattattagataatatgtagtaacatgtaatgcattaatatttagttttattagaaatattattatattatttttattaaaaaaataattatctataaatttcaaataatataataattcaataataaaagtataaatgaaaaatctccataaaagaatacattatttttttaatcaaaaataataaaaatataggaaacttacaaaaatacaggaatttggattaatttttacaaaaatactgtacttttataaaacaacagtggaacacaaaacagaatacagtagtggaacaactaaaaaataactgtaaaacaacagtgaaaacttaacacagtagacagtataaaacttatatagtatttttgaaaaaaaataaagtatttttgaaaaaaattctgccccacagtaaaaaaaattaaaaatttaagtatacggtgtaaataattctaaaaatataccattatttattataaactgttatcaaatatacaacaaatattattaatgaatataaacacattacataaatgatatatgtaattaatcatagatttagagagatatgttatttcaattagtaaatataaaaatttgtgactaatataggttattttttaatctatttaaaaataaaacaaatattaatgtatataataattgaaaaaataaatttaattcaattctatcaaattattttaattatataaaatttaattttactttaaatttaaacttatatcatatttaaatccaatcatgtttttttaaatttatatttaagtcctatgattttttttttagattttgttttttggtaatggtgttagttttaacaaaacaaatattattaaattaataattttcaaatagttgacactttatatacaaagataaaaataaagataaaaacataaatattaaattacatataataacttgatatattttttttttaataataaacttatcattaaaataataattagaaaatataaagatggaaaacaccattacaaccattacagatatcacatatgatgtcgatgccacaaatgcaacaaccatcttagattccaagagtacaacctatactttcgcaacagactcgaaaaaatgagaatagtggtgctaataatgagtctacatcttagatgtttagtttattacttttgttagtatgaacatttatgaactcttttagtttaaattcttttgaatatataaacaatgtttagtattaaatatgaaaacaatgtaggaactcttttagtattaagtataaaaatatttaatttttaaagaaattatttaataaaaaaaagtgtgatattaaaaaaattaatttgatttaaataaatttaattatttagaaaaatgacttcaggaacgataatttcatttatgataacaaaacagttgttcctcatagtgtgtaaaagttaagttatttgcataattttctggaacaactttcacttttcagaaacaacttatttttgttccagatattttagcattagacatgtcgctatattttgttcctagtatcaattttcaggcacaattgataataatttgatattttgaaacaaaacctattagagtttttgtaatgaccgctctagtaatttggattagtaagggcaattagcactnatttttattattttattattttatt

SEQ ID NO: 114127 - DNA, 989 bp, Cannabis sativa
  modified_base (36)..(44): a, c, t, g, unknown or other
aaaaaaaacaatatacacagtaaaaatataataatnnnnnnnnnacagtaaaaaagaaataaaatgggaaatatcagtacagggtgtaaatttccctattgatatttgtgtttccgaatgatcaattaatgggtcacttcaaaggcccaatatggaaatacgacccatttggtaggtgtatgaagtccaaaagccaagctcgctcatcaagaataagtgaaggcagatccgcgatctgggacctacaatcccggagcaatccaaccaagcagaaggcggcaaggtccaaagttcaaagtgaagccccctaactatcaaagggataacccaattatcccaagacatacaaaaccaaagacatgaagtcgaacttgttcaggcagttccttctttaagagattcaaaagatggaatccgaaagactgaagtctacaacaccaacttaaagaaaaggaaacacgcaaatagaacatttggaaatgggaggtgaaacgacacccgcaactgctattggtcacggacgtcaacccatgtggcgcacagtgagagtggtcctaagaaatcaaggaatgtgtcgcatgtgtccgaccactaaaaggcacactggaaaaaggataatacctttttgctcaacaccactactttgacctcactactctcaaaacaacgacacatgccccacgatcactatcaaataatattccatacaaattataagaaccaatattttctgtagtgacaaattatgtccagttgcattccagctgcgtctgggattcgtagtgttttgtctggagttcgtactgttagtgttagtccacatcagcaaagatattttgggttttaattgttcagatggtaacaactgtctttttcgggattcttggtttagttggttttaaatacaacttatgggtttgatgtcgattaaccttttttgatcaaagattatggattacatttgtttcttctttatgttccatggcagg

SEQ ID NO: 114128 - DNA, 1772 bp, Cannabis sativa
tagaagagaatgtgtgaatgataagtgggtaagcaaatatctatcatagaatttgataaaaaaaaatgtaaataaatcttcaaagctgagaccaagaatgtagattcagcataatagaaacagggtcacaagcttacatttgacagcccacccgaaaataatgcaaaagaaaaatctgctcgctgatttatcagctggaacctcaaagaagctttgccagtttttgtataatgtgaattggactcatttgcatacttgtactgaaaaataaggcataacatatcagtatgttgttgtataagttttctccaaattacttcagtgtcaagactaaactttcttaaataccttgattggggcagagcatatgtatggagtctgctcctttggatcatttacaggtgggcaagttgatgagctgacatattaaagcagaaatacatcagttttcaccaatgtgaagcaatattaacagtacttgcctcattcaaccaaatctcgagtaaatgaaaacagtttacaaccaataagtgaaaaatgtaaattacttgaactttgcaggagaaaagacagctacccaatcatcagcagcaggttcattgtgttccaaagccacagttacccattgggtatcttctccctgtagttgtacaacataaaattcatgcatcatcaactcccaagtctctaaagcccaaaaaactagaaaaatattaaatctaaaaagttctaggataaagttagtgctacttataaaagagcattggtattagcaagcatcacattgaggtagtgtcctacaaatagttagtgattttttatattgattattacaatataatccttaattcctaatccttaataaatggtgttattaaacaccataggttccctttagcattaatcaagtattaacactattctattgacctagggagtaaacaatatgcatgcaaaaataagctaattttcaatctggaattcatcaaaccttttaaataaaaacaacaattcattgcatcatcaaaatccaactattctacaaaacaaattttgacatgatttaagttaaactagtctattctccaacattcaagtgtttgataccaattaattagagaaacccatttaaaacaaacaaatacatataaactttagccaaaaataaaaaaaattgtaatagaagtaacattgatacctttaaacccagaagagtagggtatgcattaacagatgcagagtcacgaagagcaaaagtggctttgtgtatggcaatcttggatagtggctgctccccaaaaccattaccgtgagcccaaaccgatccaaagttggccaaaactaacaagtagagtaaaattgaaattctacacattccctccattcccaaaaattcaaaatatggaattgaactagcaatttttcagttgagtattagcagagtccatacaaagttaaatttgaatgaaaccaaattggaaatcgtgagtgagatcgagttttgagttttgactggtagctgagtagaaattaattattgtttgatttggtttacgtgttaattcaaatcagccgcatatgccttttatagattcctcggctagaatagaaataaataagagtccggccaattaggagttttgttttggttttggctaattagtaatttttctctctaaatttaaagaggtagtaaattatgcccctgaacttttttggccgttaaaaattcctctcgaattattgatattgttaaatttaagaacttttgt

SEQ ID NO: 114129 - DNA, 880 bp, Cannabis sativa
  modified_base (785)..(786): a, c, t, g, unknown or other
aatcgtaaaaatatttaaaattccttgaaactgtatttttgttgtttttgtgcatttgtgaaattaaccctttcaattaaggcaacgtagcgaatacctaatcaggaacttcttaattttcatagaaattaaatagtagatgacgggcttagcaacttctggagaagtcaagaaattgccaaaacggcgggaagaaaagttacaaatattcttcattaatgggatcaatcaaaattgattatttgtttatcttctaatgatatcttttgaatgaacaaatatgagaaaagatgaagttgaatgaatcaaacattcttttactctcaaaaaaacattctagacttttaggtgagggataattttgatgacttaatcaagccactttttgcataaaaccttccttgtattctatgtatatttcaagcaagagattagatgtatatataaaatgaggaatgtaatctatttatgcaagcatctacatttacctattattacagttgacattacaaaaggaaaaaatggtctttagttaccattaggtaatcacataaatgtatgtaaaactctttactaacaaataaataaataatttttttcttttacaaataatagactctgttgaaagatctttacctaaaataagtcgtatttgtaggtaaaaagtgcagtagaatctacatcataagttcactgatgacaaaatgtataagatggggagtatggtgagtagtaacctacggtcttgtagtcctcactgtaaaaaaaaatatatctttatatannaaaagtgcctatttaacggcatttcttggtttaacagaatatacttaaaaaataaaagaatattctgttaaatttaacgattacgtttgatctc

SEQ ID NO: 114130 - DNA, 1191 bp, Cannabis sativa
  modified_base (38)..(46): a, c, t, g, unknown or other
attgtatcacttttaaataacatagaaaaaaactagcnnnnnnnnnagtatacgtgtctcgcacgtaactttttgctagtatatatatatatatttgtagtagtgtaaagtatttagttggttattcaatagtacaatactaatttggtatttgttttctgtttttaaaaatgagaacagaaaataatttttgtagtttttaaaataaaaaatgtgtttaactaatgttttctaaaaacttttttttaagatttttttcttgacacgaacccaaccctcactcgagtataacacgaatttcggaggttgaccatagacatgatcctggactttggccctggacctggattcgaaccccaaatcgaccctcaatcttggactctgacctagacttagagtcaaactcaaactccaaaccttcactcggaccgatggagcctagacctcggaccgacggagcctagaccttggcgcgaaccacgccattggacctcaaacccagcagtcccagaccctggccctagactacagctgtaatatcacagaaaatattataatattttattgaacatacttgattaaatatgtgattatgttgatattggagtaagattataatcttacttaagctaatggtgtgataattagtataaatgtaataaatgattaaataaaacataatatattaattatagagattttattggattatgtgagtatagtagatactatttgtgaaataaaatattttcatgttcggcgaccttagaaactcgatggggtgataaaaaatgtcacggtaattaagttgtattgtattggaaattatactggactaatttagaattttaagctgtcaatttggcgagattagttagaatgactagatacccgtagatttacttagttcaagtgtggagtgaaggggtagaatagtaatttcatgagctaaaatgttatttttgtcttatttggggtattggggctgaagttttaggattaatgatatgttttgatattaatgtaagttatcttatatattcatttgaagttagtaaatagaagataaaaaaacctaaaactaagaagacctctcaagctctctttctgttagagagtctcacattattaatgtgtgaaaagataatagaatatataagaggaatgtgctactcctcccattgccaattg

SEQ ID NO: 114131 - DNA, 3810 bp, Cannabis sativa
  modified_base (49)..(55): a, c, t, g, unknown or other
agcgctgcaaccactttagaaacgcaaaccgtaaatttgaaaaaaaaannnnnnnaatagtatatgaagtaattctccataattttattatttgacgcgtcatttaaaaaaaaaaaaaatatttgacgcgttgtaaaaggagaaaaataaaatttgttacttataatataaataaaataaataaataaataaagagttagtaatgtgaaaaagtaaataaacatgaggtaggaaaacatattagagtagattgtgagagaatccattcaagtataatttttttaatccattttctctgtattttgacactattttacgttattcaatattcatgtgtgagtgctccaatctctctattttgaatatgcactttgtcatgacagtctcaattaagaatactcacggattggatcccaaccacagccgtggtcgaagaaaagcactcgaagtcatcccagaatccatatacagcttttcttgccacaaacactgctaatgttcttaacaccgttcctaaaagcctccacgaaagtaacataagagtcaaccccaaaaagggatcaacataaggaggggggctctgctctagagatggaccccgtgggaaatgagagcaactacacacatcatgtgatgatttcacaatatacactcggtgcttaaaatgattagatcaaattgccgaaccataaaacattgtgtacaatatatcatcaccatcacgctgaacagatatgtggcttaagatattaattgaattcttaatgatgtaattaacaacaaattctcagatttgtcaccttccaaaatgatacactccacttgagctgtgaagccggcatatatgtatgaagaaaaccagaatgaaacaataaaaacgacactaacaaagttaatccaacgatattatgttaaagaaaggcccccgcagtgtaacaaaaccaacctcatacgcatctagcgtgtcacatgctcaccagcgacaagtctgaataagttataattaaataaaaagattcactgacgtacagtatccagctcctgattcggtatcacaattcacaacagtggcgtagtttctcaattttcatcaattaatggctatgaatgaattaagcaagaggtcagcgaaggtcaaacaatgcaatttaatgttggttgggtactgactactgagaaagaaaatgacaagtaataaacacatggtgcaagactaggagactgcatatattattactcactgcaacccccttcctcttgtgtgaaaacctacaccttctatgatattcacagaccaggaaaattgaaaattcacgtaataagaaaagcattgtaatagtgttgtgtaaactatttcaaattatatgatcaaacaatgtatcaatgacacaacaaggcttacctgacaaagaagcaaattaaattttgtaaaagaaggggtgtcgtctctttcaaccgtgaagattcaattcaaaaagggataaaagaaacacacagcatcaaattaagtacacaaaagtcagaatccaaataatacatcacaaacaatgaccgataactaggagttttccatttttcctttagtgttgcaaatgttgtttaatacattagctattaccacgagaactgctattactgccggacaaccttcttaaggtgcaggcgacgaaactcctgcccgacaaaaggcctaaccttgacttgaaggaggttgatctactcgatccgaaatgagtagcgtatacttggctgctgctgccgccacctccacctccacctccaccaccgcctacaggaggcaattcaacagcattgtcttgagccccaccgtcactggcactagcgtcttgatgttcaggttcaccggtatctaaattcacggccagagaacccctacgtgttctcaacaaatcagccccatcaggggttactcctctacacttcttgaccttcactttcaccaaattgggacacccactcgccaatgcctccaacccactatccgaaacagggcaactcttaatgcaaagcttcttcaatgccgcacactttgcggcaatacaagatatctcagcatcgcccactgtatcgcttccgcataatgctaacctctccaaattttggcaattagaagccaacatttccaagctaactttagtagggttcacaccaattaaaaccaattcttgaagattggggcaatatttggcaatcgctaccaagccttcgtcgcctatacgattagccttccaaccatcaatgtgaagcttccttaagagcttgcatcgctccgcaacagaaactaaaccattatttgtgcattccggggttttgacgagatgcaaaatttccagatccaaagaatttgaaattgcagcgagaccataatcactcacctgaagcctctccagatgaatctcgaccattccggagactcgatcagcgatcaattgaagaagtttatcccagtcccccgagcacctgaaaagtttcaatgttcgtagtttctttgcgccaataatcagaggtccaaaacactgtccattgtacagctccttcaaacaaattgttttcagagaagcagctgctacaccgggcccaattggctccgctgcagctacatcggtgattccacggagcctcttcaccgataactcctctagagacgaacagttatcaagcactgcgttcattcctttagctccaaacgtgcaagatccacaagaaagcttcttcaaacccctgcagttctttgcaaaagacgccataccagcgtccgtcaattcgcggcaggcgcggagtttgagacgcgtgagattacggcaccgtagagagatgaggacgagcccatcgtctctgatgctcacggatctgcggtcacatttcaaagcaagtttggtgacagcgtcaaatctgtcgaagagggaagggatcatgggcaagagatctgcttgggcgttgagagaaagccggtgacggctctgtccctcgattttcaaccacctccggcaaacaagcgagcagcgttttcggtcaccggaaccgagggactgaaaaataacagccaaacactcttcgggtagatcggagatataatcggcgaaaccatcgatagttacttgccaggcatcggtctcttcagcctgcatcggggagatcagggccgttggtttgaacttcaatcgatggctgtgattattttcacggcagctggggactgcggccgtcgaagctgactggcccatccacgaccacgacgacttacaaagaaaggattagggttcgccacctcagcttcttatcttaggcacctccgcaggcgaaaagctttaagccactcacatcagctttcacacacacaaactccccagacgtgttttgcccccaaaattttagacttcagaggcggacttgaaactaaattacaatttgggtttttgttaatttgggtaaatgttaggtgagtgcttcttcatcagttatcatgcactcttactgttctatggactcgattttcatcaacggcccaagcccactaggcccataacaataacgataatttttctttttaaaaaaaagtgattgtcacgtgtctttctttctttcttttttctttttagaggaaagttgtttaaaattactagaagatagtgacatttcagctggctgtgctagtagttctgcgaattttccttctttttttttttttctggaaaaattatgcgaaattgggattggctttatttatactaggccggaacataaaaaccgctaaaccgtgggaaccgcctaacccattagaatccgccc

SEQ ID NO: 114132 - DNA, 3554 bp, Cannabis sativa
  modified_base (1461)..(1463): a, c, t, g, unknown or other
  modified_base (3480)..(3520): a, c, t, g, unknown or other
taaattagtgactacttgtatctaaatactatgttttaatcataagtaattttttgttgtaactaaaaatcacatttgattacaataaaatttatattgtgactaaaaaatcatcactaaagataactattttatagtgtatataaaataaccataaacaaaactttgaacaactaatctaatctctcttaattatagacttacattttctttgaacaactattgtttcgggaaacaaaacttgctttgaaacacttatattattattgttaatgcaatttatatattagaaagtattttctcgaatgtgagaaatcaaaaccaacaaagaagtaagtggaaattaaaagagacctaacataatgactttttcataataaagtaacctttattacaataattttaaaaattattgtgtgccttccaatacatcttaacttttccttcactatataagtcattggttttcacttcttaatgctcattgaatcctctaagtgatcattaggggtcttttcatctttagctccaaattattctttaaaatcattcccaaaccctaaccctaagtggagcatggagctaataaaatctgaaaatcttcaatccatattgaagtgttacaaacacagtcaatttttatacaatctcatccactcttctatggttgcaatacttatatgtagttttatgtgctcttattcttatagttttctatcactaactaatttttcaatcaataattactttgctttaatctccttcccaaacatttggtcatcttttctcaacccgaagtgcttgtttatattttttattatcataattgtctttcttgttagtgagtcaatactcaaaatatcatatcctgccattgatatctactcagagtatgttgagaggagtcaaaattcttgtggacgaaaaagacaacgaataattagctgtcgttttcatgaggagaaaaaagaagtaagagaaaccgagatgcagatggatgagaacagagaaggtaacaaaatagtttttaacaaaaaagtaacacttgaattagttgagcataaggaagaaaaacatgatcaaaagtttgaaatagaagaagtaataaaagaagtagaggaagctccaaataatgatgataagaaggaaaaaaatggtgaagaagaatgtgaagaattactaaccgaggaactaaataaaagagttgaagagtttttggcaaggattaataagcaaaggttgcttgaggctatataatgctgatagttattgtaattttgcttaatagtagtagagaatcaagttgagattcaaagagaataaattattgtaattttttttttgtagtactagctactaattatataacaacgtctgttggtttatgttaaagttacattgagaccctcgaattaataaatatttacattagcaccactctaataataataataataatannnataataataataataatatattaagaatattatttggagcataactatacttaacaaaaattttatgtttttaacttagacaaaggacttaatgatatttttagcagcaaaactacttaaacttattaaaattgtaagtggtgactagaacatgacacatgttactacttaattgggtcatcttagctttagttattacctaaggacatctctaatggtggccacctttaaaattactgtaaaaatttaaaatattatatttaattagaaatatccaatcataattgaaacaaataaaaaataattaaaaaagtaactcaactccgtaactccttttggacaatttctatgagaaacttatgttgaaaagttaaaattgaacccacttgttagttgagcaacccataaatcactactattgaagctactctaacaaaactaacaaaactaacaggaaataattgcaattttaataatcattgaatagttttacttcgattacaaaacgtaataaataggtagttatatgagtgggaggtctcaatgcaattttcaccaaaattaaggaatagtttttcctagtgttttaaattttaattttattttccaatatatgatgataagtgtttctattttggcgttggaaatgattttttttaattaagttacaactacaaagtagtagctatttcattcaaatctcctgtcaatgacttgtttacaaaatataattccaaaagagagaagatcattagtattttggtccctaaaaaggagagaagattaccatggtatttacaaagtataattccaagaagataatgatatttattctcataagtataacacatcaattaatttttctttggccactagtactacttgtcatagaataagcaaaatctggtcacttttgctttcaaattgtttaagtgattaactcatttatcattatgaattatgaaggtgttcgaactataaatatatttcatgattaactttttcaacaattaatagtggtattataataaggggattgagatctttctccatgtcatacattttacaattctactttgttgccctctctattatggtgttatttattgtttattaaaaatcttcttttggttaaataatgccttttctataatggcattttatgtgacctatttttgtataagttatgaaatgatgatatagtgactagtaaaatcatatatttatttagttttaaaaccctttgtaatgtgagattgagggtttaaactaaataaaaaattgagtatctaaatattaaacgagcattgttattgggtataagtggcgcattataaatagttaccgatatgttataataattattaatttaaattataaaaattcgatacttaattatactaatagttatataatactttatctgatgttaaacgctattagtgtcttttaataacatttctcttatatttagctatgaattatggatttctgttgacctcatttttagtcaacgacaatgaatcaattagtaagagattagaaatgtaatgaaaatagagcaaaaaccaataagtaataaagaacaccaggttttgaagaggttcgacccctttagtacggtaatagcctactccccttagattgtattaacttgagaacaaagaacacagtattttccctctcaacgctcttacaatgaaatctctgagtatttctcttagatctctctctaaagcaatgaagttagatcactatttatagaggcttaatgcatgagggaaaatttcccttttgattacaatatctataattggaaggaacattcattacataaataaaatacatgaaattagactccacgatactgtatccctctaatttaatcacatgattgtaaggattcccttcgtgattggactccacgataccattccgaagtagtcaagtctaggcacatagctcggaaaacaaaacttgttctctgcttgaatagtctgttgggttttatgccctnnnnnnnnnnnnnnnnnnnnnnnnnnnnnnnnnnnnnnnnnaaagatcaaaaataacattttatgttgcacggtt

SEQ ID NO: 114133 - DNA, 2264 bp, Cannabis sativa
  modified_base (2141)..(2180): a, c, t, g, unknown or other
  modified_base (2206)..(2227): a, c, t, g, unknown or other
ttttttttttatttcacgctagatgtgttggcctactttcgacttgtacctaattttttcgacttctaccaataaaatttgtgttgtgttcatgttgtgcgatcatgtcgaaattcatattgccactcttagtttctagaagaatattgcacatcaatcattatgtagagaagagttatctggtgatatcaccttagtcgtccatgtataagcactagatcacttcaaatgaagtactaggcactactagtaccaaaaattgccaataactaacaataccaattaccaagtacatcaaaagatgtttatatggtattgcgcaagtatacgtaaacattaccaagtagtaatgatgacaaatacaagcatcgttctctctgaggattgttagtaaataccaaaataaattttttatttttatttggctaataaaaattggatttcaaaattaataaaaacaagaaaaacaaaattaattgaaactaacaaacttaagaaataaataataaaaattaattcaataaatgttaaacaatggcttttttgtttatttttttttaaagaagattcattatggttacatgatcaggtagaaaaaatttgcactatctcacgtagagaagactacaaacgacaaaccacgttaattacaaagtagagcaaaacctcaaagctcactaaggagaataaagttacaaagctcacaaaacaacctaacgctaacactattaatgacatagggtgccaaacaccattattacaaagaaaataaaacacacaaaacaatatagaaaaaattaaaggaccacgccaccaagtcgctccaaagtcaaataccaagaggaaaggagctccaggatcagctcatatcatgctgaaaaaatgggtaaaggaggcagtactaaactctcaacaagaaacgcccattatcggcctcccaaaagggttcaaaacggtcaagaagccaagatagggacacacttcccttaggtaaaacctgagtccctccctctacatctacaaacctttgggagctcaaaaaggagctctagtgtacctgagccggacgcttgaaatgaacactgggagccaacaccaagaaaaaaaacctaatccaccaaaacctaatccacataggagatcggtaatgctttcttaaacccttccttaacataatcaccccaggcatgacttgtcatccagagggcgacaaggggttgtcgtcagcatcaaaccctccgtcaattacaggagggctagccgtgacgttaatttatacctcttctttgaaggactcctgcacctccgactcattttgctcagccatgagttggtcaatgtgcgagtctctggccggtacggtctttgttgtttgttttgtgttcgccaggtttaacttgggcgagggcagtggttttgaggtatgccttgctactataactattaagtctgcctaggcggaatctctcctcaataaagttagatgaccaacaagaaaagtgttaagggtgtctggtcggactctataagtccaccaagacggaagaaatttcctctaacctctatgcaactcctagatatggtgactgtatccttctccaccgatctggtcaggatagtggtgatgttggaattgaggttctgaggagtcgcttgagactttccacttgaaagaatttgagaaaagtgattattcacttgaagatgaggacgaatctatcgtacgaagtttttgggtgatcttcaaaaagttattggagcaagtcgttgtctactcagttatcacctccctagaatttagctgagttcgcctacaaaagaagaaggacaaagaggtgagtcaccaaacattttcggaatgcctcttcgagaaaaacattccaatactctgactagggaaaggaaagagatctaatttagagaaacccatcttgggaaaaaggattctagtgttttggagacttaaaatagataggaaaccctaaaaattatgagaaataacctaagagaatgtgatgaaggaattacacgtgtactgctttaatgtggatcaaatcgaccctgccagtcagcatctgtgtttgttttaatcaaaaatttgagaatttaaattcttatagcaattgagtgggagcgctaannnnnnnnnnnnnnnnnnnnnnnnnnnnnnnnnnnnnnnngtgaaatgatgatttccttcgagctnnnnnnnnnnnnnnnnnnnnnntgagtactcatttcagttcactgaaatatcatttata

SEQ ID NO: 114134 - DNA, 3715 bp, Cannabis sativa
tgttgtgttcttataaatatttgacaaccaattaatgatgctttgatgcctatctgaaatgaagaccaattcactctcatgcggtagaagcatcattctctgaatcaaccacgccccaagcaataggataatatttaatagtaaggtacaataattaattatttaatcaattaagattcacattattggttttgtcaattttaagaattttcactaagtttgtaaaattcggaagaaagagaaaataaatattaatttattaattatacacttttgttttcagaattaataataaaaattttaatatgttttatttaaataattatctagatataattatattaagactagtatttaattattaaaagtttaattaaatatggtagaaataaaacgatgacaaacttctaagtatattggattcaaattctttttgtcttcatgatacagaatactgctagatggtgagttaaaaataactaagcaggattcaaacacccattccagagttcctagagtcaaccttggagtagggctaaggacccctaccaggtcgacttctatgactcgggactactcaactccaggatgttctctttcttgccacgtgtcaaacattaatgtccacgtcaccaggatcagtttctgggtagacattagtggtattagctttagattgtttttgtagggtttgtcccattagtttctctgttatgagtctagagagatttgttcctcttgtaatcgacgtggtttgttatcagtcgagtcgtctcctagtgagatatgtgcgggtttatcactctgtgacctataggactttgttttctttttaactgctatcactgtttctagaagggggacacatggcattcccaattcaaaattaatcatctaaggcctggtcaaaagccctaataagataataggcccagtctgtacgaaaggatgggcctcacacctatctgaggcccagtatatttacatccaagaccggatcgctctaaatccaatagggcatccacctgaataaaaaggagcagtaaagaccctctgaatgagcatttggatacattcgaaagggaattccaagaggcatcctgaaaacctagtccaggatgatgtggcggccctctgacactgaatatcaccaaatcaggggattatcccctgtgtcaggccctaagagtgtgcgcaccaccaaaagaaaacctccctttttgtccgacgaccactattttgacactatagtacacaaagacggcacacatatgctatctgtcaatatcgcgtggtccctaagcatacaattcaccttcgccccacagattaggccttagtctatgggcccaaagtcaacgtattttatgtatttaccccattagtgtaccgtttttacatgcaaaccctagcgggtcacggatatatccgaactcagatcctaacctataaatactacagtatacccttatgcaaagggttagtaattcattgtgtaaacactatagtaagaaactaaagttcttgagcttgtcaagaacactataatacatcaaggctacttagctaaatacgattgacttgtgaactagggttcactaatatcggaaccacgtaaaaattttcatctctactttctattacttaatttaatttcttaactctcattataatcggtttctaaaaatctcagtaatcattaaccatgaatgattatttttttcttaaaaaataatattttttatgttgtagttttgtttatcaataaaataaatagaaattaaatttatttagtagacaaaaaaaagagagagataaattagagtgtggattggaaactcaaaatcgaaaggataggaaagtaagaaaaaaggatgaaaatattagagaaaaaatgaggagagcttgaaacagtaataaggaaaattgagtggcactatagcaaaactacctcaatggtatgtttcctgaaaataaataaaaattaaaaaaaaactcgacaactgagaaaatcacagattcattcacccaagtgtaactgagagaggagagagctagagaggaaagggggtggtgggggaagaagagggttagagagagagagggtttggaattgagtctgggtctctggggaagaagaagaccgagagagagggagagatgtcagacctagaccggcaaatagagcagttgaagaaatgtgagcctttgaaggagtcagaagtgaaagctctatgcctcaaagccatggaaatcctcgtcgaagagagcaacgttcagagagtggatgcccctgttactgttagttttctttctcttctcacttctctatctccgttatctattcgattgaacctcttccttagcgatttaattacttttttctgcttttgggttctaggtttgattcttttgtgtagttttatctctcgttctttagtatttggcaaattgtatagtgacattaaaatgtcgaacttgttgaatttaaagaaattgattgttcaatacgaggttattactctgagcttacaacttttttgttgggggcttatgtactgctatttatatactgagaaagtcaatggaactcgttgttgtgtatatgtacggatatgggaatgtaaagcaaaacatttggtcattctcaaatttagggccgcgatgtggcttttccaagtgaaaaatgctcatggaattgttttgctatagaggaaagagagtggtttcgctttggcaattttatcagtctgtttttgttcaaatatatgtaaatataagtctgtatgattaaaactaaaatatacaatcacatgactttaataaaataccaaaagagaacgtttaatgatgaccttatacctgtgtgtggatatgtatttattgatttttttaaggtgaatgtttgtatgtattagagactttcggttaaccgaggagaattgttcaataccatatgttttggagcattttcattgtagttcaggtgttgttgctaaacaagattttttttaacagatatgtggcgacatacatggtcaattttatgacatgaaagagcttttcaaagtaggaggtgattgccctaagactaactatttgttccttggagattttgttgacagaggattttactctgtcgagacatttttacttctacttgcgttgaaggtaatacagttaaaacttcaggtgatctgatggattagaaattcttgttattcttctattgtcagaagatttgtttgatctttgatatatttcatttgaagtgttgatcattttgtttttcttgctctaaaaaacagtagaaatttcattcttctagagcatagttttctctttaaagtgtggctagacatgtctgcttaatttcagtagatgactattctcttatttatgtttgggaacttgggattccaaaatgcatgttataggtgaaaaacaaatcttcaacctctactctgtctatatggttactgtacatctataaatgaatgttcgataagttaataacctcaatcaaataataacaccattctgtcctaagttgatctaatactaaataatcttgctaaatgcataagataattttttatctttcatacctctcagggctttacgaaaatataaattaatatttgatcgagcacataaaataaataacatatagggttcgtttggtacgccgtattacaccgtaatgtattgtata

SEQ ID NO: 114135 - DNA, 761 bp, Cannabis sativa
gtaggcatgagagagagagagagagagagagagagagagagtttattaggcttgaaaagatcaagagctttgtgtctcaagtctcaactcctaaaaagagataggaataatttagttttattatggtgaaggagtgaagagaagcgggaaaagtggatccatacgaagcataaaacagctccatttgatttgggggaattaagtattaagtacaacaaaaggtttgcttagtaatatatgtacggtagttatatttagtacaacacccacctctattctactttctccttttctatctctctatctcttacaccaaatttatttatttgtaatttttttttttaattttctacagttcaaacactcactcccaagttttaccagaccaaaaatcagaaccaactctgcctttattatctctttctcattgggaattgaaacccaaagaaaataaataaaataaaaattgaattagctgacgatatagatggtcatccctggccccattacctcccacgtattaatagataataaatatactctgtttactgctaatctatttaagctcaatttacaatgtgatgattcccccctcatgccagccacgggacttgaatatattttttactcttattttcaaatacgaggtgagttttattggggatctgcaatctaatccaactcttttgttaattttaggattattatcattacacatattataagactatatcctccatacactatagttttgcttgctt

SEQ ID NO: 114136 - DNA, 1347 bp, Cannabis sativa
  modified_base (118)..(121): a, c, t, g, unknown or other
cctgccatatatatcaaaactttaattatttttttccatatttttataaacaaccttatattttatctaaatactaataagtttataataatgtagtttttacaccacatactgaaannnntaatttttttttacttttttactgtggggcgaaatttttttcaaaaatagtgtgttctttttcaaatatcttgtgtaagttttatactgtgtattgtgttaagttttcacggttgttccactattattttaattgtgttgttttacggttgttttatataaagatagtatttttgtaagaaattctgccccacagtaaaattgtaaacttttgctcaaaatctagtatttttataaaaaccccaataataatacatacttctaaagttgtagatgcaaacgtgagattcctattataattattacatttattttatatcagttgaaaattaatgagaaataaataggtgaagaaagatgctccacatagtatacaaaagggtgtctaatctaaaaagatgcaagttgattctacaattatttaataaatttcaagagaatacaaaagaagcctgatagatactaggatgacgaagaggaatctctacaagtgggttgataaattgggacagtgcccatgttatactgtggagcccacaatctgtgcttccgtcatccaatatgtaagataggcccacaagcccataatctatctaaacacttccaaaatgacaaaaggcagcgtgatagtgattaggtcctatgaaactactgaggaattttcaaaaatatagtaaaaaatgtaatgccataaaatatagtaattttatataaaaaataattaaaaataaaattctcaacaaaataataaactttccaagaaaaagttttgtccaaagagtcattgaagaggccatttccattgaaaagtcatcagagttggtattgctaccgaaaatatcacaagattttccattcactaaaaaaagttaacgaaattgtctcgtcaccaaaaaagtcacttagaaagtcgttggacttgtcatcatcaccaaaacaatcacttgagttttctttgtcactaaaaagtaactagagttagacgtcgaagtcgtcaccaaagttggatgttagaattagacactaagaaaccacttccgtttattagctaattaaaaattctaactcaaagaaactaattatgtaaaatttctaaattaaaaagtaacacataaaaaaagttacctgaaataaataaataaaaaattaaaacttacattccaattatgtaaaacaacaaaaccaataataaaagaggaaattacacttagtatgggattttaaaag

SEQ ID NO: 114137 - DNA, 1451 bp, Cannabis sativa
aaaaactggtaaaccagaagaaaaaaacgcaaaaaatgagagaagcttttttgaaatgtaaggcggccgaacaacactagctccggtgatgggtcatccgactcgtagagtgtgtgcgtgtgtgtggtgtgagtatcctagagagagagatggatgtttggtttttatttatttaggggtaaaattggatgagaaaatggtgtaagtatattttgcatgatacaaaatatgctagcatatttttagtagataaattaattttaagcatataatttcaaatttcccaataaaaatgacgcactgcactgcatataggctgcgtggctcatatcctgcttttatataaccaccatatatagttgagtgaataaaataataactctgtatatcaaatataaacataacttcataaacacaaaatattgatacacttaataaatatatatggtgttgattcgatccaatcacactattttacttttagtgcgcatctgatctacattaagtacagatttcatactttgaatctagttaaatccatagaactatttcaattcattttgacccattctgcgatagtgcaaattggatcaattattttgaattgttatgttgtgaaaattagagctacgcaagtgaatgtattcagtttattacggtaagaccaatatcatgttttgtatgcagtccgataaacccacaaggcattgtactccaatttatccagtttggattcacaaccttttcaagaatcaatttgacttcatgattagaaacctctacttgtacattggcttgaggggtgataagcaactaccatcttataagttacactataacgtcgaaacaatgcttatatactctttttgtaaaaataattgtcttgatcgctaagtatagctttaggtgtaccaaatcgcacaaaaatatcagagcgaatgaaatctactacgttttagtcttttagaattatctattctagttgtgattgcttttgcccatctaattataatattacctaatgtagtgatatatatttagtcatatatattttatgatgtaaattgaatttagtagtattagttttattgaatttgaaatagaaattggggttgaattaatgtttcataccagtttttttacaaatttttcttctatcagttatgattgttttatgatttgagtttgttctttttcttacgtgacgtcgctagaattaatggtgctttttcgtctattagaattattttatcgttgccgacctcattgcatcgcacgaaagttttaattccaagaagtgttgattgtatgggttgaaagtgtgtgtaaaaagtatttgtgtaattttttttattagactgtatatttatactcattttttttttgtaatattgttattttttggtggctttttcatttttacacttcaaagtagtttttttttttttttt

SEQ ID NO: 114138 - DNA, 4265 bp, Cannabis sativa
  modified_base (1768)..(1776): a, c, t, g, unknown or other
gttctcaaatattacaatgttgggtggagagcctagtttgaaaaagagtcaaaaacttctatttttgtgatcattagggaaacttcaataacagcttccaacaaatacattctcaagctcaacattcacagcaagataaagagagttttctttcacagcatagctcatatctaaacccgattgcttcggtaagagctaaaagtaatacaatggttgtgccctcaaagattgtgtccctgccacaaaaccaagaagatgaggatccacaatctctaccttccatagcaaatagtgacaggccttcttacgatggatataattggagaaaatatggacaaaaacaagtgaaagggagcgagtatccacgaagttactataagtgcacatatccaaattgcgcggtgaaaaagaaagttgagagatctttggatgggcagattgctgaaattgtctacaagggtgaacacaaccattctaagcctcagcctgccaagcgaaactcgtcatctgtgacaccagcattggctgataccacccccagtctagaggccaaccaccaattatggcatagtcaactcaatgaaaagaacgaatgttgtgaaggggaagttggagtattacaagcacattcttgtcaaggaaaagcttctcaactttatgattctcttagtgttgaacctgaggcagaagatgatgaaccaagacataaaagaaggtaaactaaactctcttgtgcttcaaagataaagatatacacaagtgatataatatgaatactattagcaaaatagacgagaaacagacaataaagtaaataaaacaaaacaaaatctcacaaatactatgtgaaacgattagtactaaaagcttttgattaatttcatgcttatggattgagaattttaatcctattctaacacggaattaaggcttgctacaattgttgttgcaccagactttttaggagagaatcaaaagattttttgtttttgtaagaatactcagaaagaaatttgagtcactgtattcgtattccaataagtatagcatttcacatttttgtgcgtctttcaggaaaggtgagaatcaatcacatgaagcaggaacatcaggaggagaaggcattcaagaaggtcgagttatgcaaaattcaaatgatttagaaaacatttcaggggatggctttcgctggagaaaatatggacagaaagttgtaaagggcaatccatatccaaggttaacatcttatattttcacttattgttccatataaaactgtggcaaaaacaccattttttttatgcaactctgcaacactgaccttttttatttatagtttattgtgaagtataattttgtgacacgcttgaaatcatgtcaaatctcctcgacattcagtctggaaagcaaaaatatttatataaatatatagtaacgtaaaaagaagaaaaggtctgtttttaccattacttctaacatatatttttatgtatttatgtgtgtatgtggtgttagcagaagctattatagatgcacgagtgtgaaatgcaatgtgaggaagcatgtggaaagagcatcagacgatccaaaatcattcatcacaacatatgaaggaaaacataaccatgacatgccgatcaagtctactccaaatcttgtgtcttctgagattcacactaaggccccttaagacacaccacatgactactgactttttttgaaacacatctttagccagccaactcataacattattattattattatnnnnnnnnntattattattattattgttatatacgtgagactagaatgatgacaaactaggataattatatttggaaaaaaaaattattgtatattgaaaatttctataaatacatttaccaaaacaactaattaaatcatagctaaaataggatctttccacgtctctttaagctagttataattaatcacaactaatgatatttagtatttttctgtgttcatcgagaaaaataatacgagtatggaagtagaacaattaagttagataaaacactaaatatcattagttgtgattaattataactagctttggtgaagcataaagaagagacgtggaaaggtcctattttagctatgatttaatgtaatacctacttttattctttgaatttttactacaaaaaaaacaagtgaacctgtgttgtatttatagaaatttttaatatacagtaattttttttcaaatatatttatcctagtttgtcatcattctagtctcatgtatacagaaacaattaagtatacacataaagaaaaatgatatttatttatttattgagtttaaaatgggtgaagtagatgagctactttggttcatgaaccttgttttaaaatggaactgaaattgattaggcttattttcatgtattgttctattttgttgtgcttcaattatgaaattatgttagttttcaatattttgtagaaagaattggagtcatttttcaaaagtgtgttcaattatattccacaaataaaccctctcgtaaaaaaaaaagggaaaaaattaaaaacaaaaatgtttcaaaaccaacactacggatagggttggtggagttgaaaatgtcttcaattcaattcaaggagactttttttttttggaaaattcaaagagacttttattttatattaaaacgtgattcctactatatatttgtcacgtaataagaacaaaaagttaaaaatggagggtccatatgcccagctgtctgtaaaattttactatatactatatatataaacatttgaataaataaaaaaaaaaaagatagatatataatatacatattttataaacagagagaaaatctatggttagatttgggagacaccttaggcccttccaaatgatcctagccatccatttaacacgcatgtattgtgggccattaatggtaatatccagctcataatttatgggaggcccattgtacaatcattagcccatttatgttattcaaaacgatgccgtttcttttccctttaaaaagcaattcactattttctttttttcccctcttctaccattactgaaaaattagtatgtagtgtatgcctgtgaaaattctccacataattctttgataaatagtttttaagttaaaataaattactaaaatacacattatttatgtatttatcctacacaaaacagaataaatgattccatcaaatattaaaaacagaaaaattagacaatataatatggtaacagtataaccttttttttttttactaaaatcattaacccccaagtgatctaaatcagtaataatgcaattttttggggtaacataacatcaaacatttgaattaaaggaatttaatcattctctcttttttattttatattttgaaaggaaagaatttcatcattcaagtgaaagtaatgaataattttaaaaaaaataaaaacgttagaagttactctaaataataataataatattaaattaaaaaacaaaaaataaaaaataaaaaatagagaagaggcaaaattttccaagacaagtgccacaacaactctctatcactggtctggctcgtgttgggtctgctattggttcggttgaagagtttcacactttgattctttcttttatctttcccataagaaagattactctttccttttgtatcttccttcttcttattctataagaaagagaaaaaaatatataataaattaacaaataaaaataaaagatgggttggattccctgctctggaaaatcaaacagtaaagctaagaccaagaagaagaagataaatcagcaggaaaacccagttgatcagatcaaacccccttcaggtaatctttgatatctctatccatgttatttttttgttttttgttattatttttcttctctttttgaataataggtcgataaagcttgatactgattacaggttccattcattatagtgattaataaattaccctttttctgtttggttctggtttttctcgaataatgaagatatggggttctttattgtttttggtatctgggtttttttgtatattgatcagaactaagagattcatttgtttcgttttttcactgtattaatttttttaatgcctttgacatgtttgtcaataatacctcatgggaaattataatctctttccccttttggtatctgggtttcgtttaattttttaaacctcattatttcatacgaaaacttaatccattcgagtttac

SEQ ID NO: 114139 - DNA, 5532 bp, Cannabis sativa
tataaaaacacagtatttttgtaaactttttcgtgtgacagtatttttgtaaaagttaccttaaattccaatatttttgtaagtttcccttgctaaaagatactcatgatgtttaacatttttttgggtgtcatatactcgtataattaagtatcaaatcctatatataacttaagaaaataatttttagagaatatagctaaccaatcatatatggagcgcgactctgaaaagtgttggacactactaaaactcaataacaaatactcctattatatataacgggatacaagtgcctgttttgttttaactaaaaaataacatgtaatcattaattattactaataatataattttagtctaacattatatatgtgtaactataaattaattacacgtgtctaaaataattttaataataataaattgtaactaatacttatagtacttacgtcactatcgatctttgagcatatttggtgttgttttctgttttttatttttaaaattgtattttaaatgaaaacaaaaagtagtttttgaagtttaaagataaatcgcatttagttaatattttcaaaaaataatctttattttattttattttttagaaaaaacacttcaatactttgagcccccaatatatatgaagaagactcgaccagaatttggaccatggccccggccttgaacctagacccagaccccagacccaaactcaaatccagacctaacctgcccaagaccccaaccccagccccggtatggaacccagatccaacatcgtaacccggcctcaaccacgaactcgaaccctaaacttcaaattcggaccccgctctggacctggacactaccccgatacccgaaccctgaccttgttgagagaaaaagtggtgagagagaaagtgatgaaagagaaagtggtgagagagaaagtgaggagagagaaaaagattagagaaaatgataagagaaaaaacaattagagagaaaataaggagaaagaaagtgaagagagaaaaaataatgtgataaagtgatgagagagaaagcgatgatagagaaaaaaaataatgtgatataagtggaggaaaaaatattgacaaaaagtgaattgtacttttttttaaaaatagaaaacaacattttgttgttttcaaaattcttattttttttttgtaactttgaggctatttggttgtgctttcagttttcaattttcagagttgtgttttaaaagtgagaatagaaaataattttttgttattttaaaaatttaatgatatgtttggctcaaattttttaaaactattcttttagattttttttttaaaaaaattaatatactacaccataccacgacatgaatcccacctcgaaccgaatcccgcacccagtccccagaccctgaccttgaacctggacctcagacccaaaccccatatcccgacctggaccttgggccttgaccccaacccaaacctcagacccagactcgtacccagaccttgaccccagacctagaccccatactcaggctgagttaggtttcaggtccgagtgtaggttcgggtcaaaggtctggggttcagggtccaaagtccaggtctcgagtctggggtacgggtccagggtctgactttggatctgggtccaaggtgcaagtccgagtctgacatccatgtccaggtatgtgagcaaaaaagtaaaaaagaataatatgttagacaaaaaaatattatttttaaaaaatagaaaataaatttttattttttctattttctagttttttaaaactcaccagaggctgtttggctgtgtttttagttttcagttttcaaaagtaagaatagattataattttttgtcatttaaaaaatttaatggtatttgactcaagtttttcagaattatttttagatttttttagtaaaaaaattcaatattctacgagataccatatcatgaatccatcttaccccagaccataacctagacctagacccaaatcgagacccaacccgaaccctagaccccggaccccgaacccagcataggaccttggacgtagcacaggacctcggacccgaaccccaaacccagcacaagacttcgaacctaggcccgagttcagggtctgggtttgggttcgggtccagctccgagtctgggtcagggtaggggtttgggtccaagtcgggtatggaacttgggttgggtttagggtccgagtctgggtttaggtcagggtcgggatacaagttcgggtcaggtcggggtccgagttcgatttgggtcggggtcggggtccgggtctgggtcgtggtcggggtcggagtcgggatggggtcggggtcaaggttcgggatctgggtacgggtttgggtccaggttcggggtccgagtttggatccaggatctgggttcgggtatgtgagcaaaactataaaatataatatgttagacaaaaaagaaatatttttgaaaatagaaaatagcattttgattttttctgttttctagttttttaaaactcaattttaaaaaaaatattttttatattttttatcaaacaatccctattagtttttaaaaattattaaaagtttttaaaatttgaaaacattgaagttatgatgccaaacaatctctcaattttcaaaaaaatgttttaaaaaatttggccatatgtcttctattagtttttaaaaattttctatttttaaaaattggaaataattaataagttatgaagtcaaacaatttgttttttgaaaaatatttgtttttttcaaatggccaaaatgcctaattattctcaaaaagtagtttttttttgttttaaaaaaaaaaaacacaattttttaattatatgtcaaacatacactttatttttgagtcacaatttaatactgcatagtgtttgttttaggattttattttttttaaagattaaaataataaataattcaaattatatcaacgttgaattttactttttatttatttatttatttttttaattttacctcaaacttttatcatatattagcttctttacattataaaaatcctcactttctttaatttttctcaaatattttgttcgttttgaacatatacatatattcagagtaaaatctaacacatttaataaaatatgtttagctattattttaaaaacaaaaatataatatttttagagtactaaatattattttataaatttttataaatgtaaaatataaataataaatatagaaaagcattaaaatgaagaagtaatataaagtttattttacatcacctattataattggaaaaatcttttttttttttttgaaaatataactttgttattataaattaataaggataatcatttacaataacagagtaaatcaaaaaaggaaagtttttcatcagagaaatagtctcatccaaccctagagcatattttgctaaacaatcagcaactgcatttgcagttcgcttaacatgagtaacagatatgttaagaaaaaaggaaaaaagactagaaatgtctaatattaaatcattaaaagaggaaacaaccatcatatttgagtttaaggcattcgacaccataagtgcatttatttccacaattgatcttgacagctgcagttgaagaacccaattaaggctgagaaacatagctttagcctccatttcatgtgatgaaaaatgaccaacagtaggcattgagaaggcagaaacgacatgacctgagaaatttcttacaacagccccaacacctataatatgccgagtttcatcaatagcagcatcaacattaagtttcaaatgtcctgagggtgctggctaccatatagcaagagcaggagctgaggccgaagtcagagaagagactacctcaagttttctatatttctgcttggctgcacgataattgtgcaagtagttggaagagaaggcagcaagtgatgcagcagttcttgccgattttccatgaaccacttggtttcgctctgtccatattcaccaaagagtacaaaagatgtgctccattttagatttcgaatgtgtataagagagatgtttcatttagtctcctttataaagcagcagccatgttccaatcgaaagttaaatgagcacagcgccaaacagcccttgcatatcgacacccaaaaaatgcatgtccaattgactcccgagcatttcgacaaacatagcaagtagcatctgtgatgatcttcttttgcactaaagatgtagccacggggagtgcatcatggatataacgcgccaagcaaaaatcttaaccttttctagtaattgcagggactaaaagaatttccactaggatgtgtcatttgttgaggttgatgataggttttgatctgctagttttgttgctaagtggtagcctgattgcactgaatacatgccattagtactatggtgccagatcagtctgtcgttattagggaagaaacttaatggaatggtaagaattctttcgacatcagcagggtggaagtattattataattggaaaaatctttaatatgccctttaatctacgaatacactatttagaagagtttttcaatattttttttatatatataattgtataagttgtagttatttaaaattattatattttaaaaaactttaaataatatataatgttgaaaataaaatttatatattttgttgtaagtacatacatacttattttgttatatgtgtggcaaataattttttagattaaattttattttcagtatacttttaaactatttagattttttaaaaaaattatgagtgctactaataattaaaacatatacaattataaatataaatttaactaaaaacattttttgaatagcaaaataaataaagaatgtatatatatatatatatataaataaaagatgggaagaatagtatataaaggaaagataaaaattaaaaagaattactaaatgatacttatggtgtgtaatatgtttgtgggtaaaatatataataagatttataagtggtgcttgctagcatgcccatagcaatgcttaaaaattaattagtctattcctctgcgtgtcaacgttctagactgtggtacaaaaacacagcacacattctgtgttttgctaatgaattttgtaaaggaaaaaatatgtacataaaaagaagttcacgtttgagagtgttgagaccaccagtttatactaacttccgtgatatatgtataggtgtggccaagctagccctcccaccaccgtcaatccctccacgtgtcgttatcttgtcaattattttgtcaaccacaacctgggacttttcttttcttttcttttcttttcttctttaatttgagggtaaataccattttagactttgtgttttgcaaaatttacagattggatcctgtgttttgttaaacgaaaaaatggaccatgtattttataaaatagtaaaaataagaccctaagcttaatttttgacaatttttttttaatacaaccaact

SEQ ID NO: 114140 - DNA, 3712 bp, Cannabis sativa
tgtcccccactcacacaaacaaaaattaagcctagtgttatggatttaatcatatttcatcacctcatcacttactttacatcatcatcctcattcatttcaaccatgtcaaaacggggtccatttacctcatctcttcacaatcacagagtgaataaaggactttgaggggttttggctaaagggacatggatcccatttcccaccctttatttgatctaagaactagtatcaaacactttaatttatactataccatttttgtttaaaaccttccccgaatggatatatattaattagtaccttatttgtatgcctaaccaaatcaaataacaaataaccccagatcagattcatcatgagtttgacttaattaacccaaatatgatacatacctacaatagaaggaagagaaattaaactaaaaatattaaaaaagaaaacagcataataccttattctggctacatatgtttgacagctaaagacacttataaattatctcaactactactactaactgtgatgaagctgttacaaggcagctttctataacaatatatgaccgtactaaaacttaaatatctaaaattctccttagtacatataatgctgctgattaaaccctctactgttagttcttccattcagctatctaattcatcatcatcatcattcaatattatatatacatctcaccttcctaatctggtagctcttgggtgcataacacatccgggagtacaacaaaattgcaccacaaagttaaccaagtaagaaaaaatcagaacttatgatccagcatttctcatttttccatttaagtggagaaaaggaggacttggcttcaaattacaaaactgctgatcgtcgattccattatcaaaagatggctttcgttttcgcacggctgcttctacacctttgtatgaacttaatgcctggcaagcattgcctctaggaggaaacatggagcaccctttatccaataatggtaattggtcacaaaacttgcctccctctcggggattaacgtctgcaatagcctggggttgcttgttctcaacactcataggacccaatcgcaaagatagatcacacccaatattgcattgtctatcatctgtatctatgatcatatttggttctgtgttcttcaaagaggcatcttcatgacaggaaagatccttgaccacaccgagtttagagtcttttaaaggatcactggtaagtttaggaaggagggcgacatcttgccaaagttgttcaaactggggggcatttcccccataataaagagggtaagctgaaaatgagttagatggtttataattactaagggctaggagttggtcatagctgttagatggggtgatgttgtttccggatggaggcggtgaaaacatagcagtagaaatgttgtttacagaaaaattgtttctaaagtgagagctgagatggttagaggatctcaaaagatttgaaccagtagcagcattttccaacaagcttggagatacagatggaacctctgaagtgttgggagtcaggtaacatcttgggtgacaatttcgttggcttcttgaggctcttcttggtatacaccccaagttgagagcagctatacaaacatttggtaaatcaaagggaatataattataaaaacatgataacttaaactagaaactagaactcttctcaaacatagtaatgtccacacaatccaaacaaaatgataaaaacaagtactttgaagtcatagaacagttactatttacaaaaatttcaactcttatgttttagatgaagaaaagccctttctttgttcagatatatgcaatatataagtttttgtaccttcaatacaaggctgaataaactcgccggtttcagtgctttcatcgagtcgaatgatcgtactgatggcatcatttgttcgatcccagagtgtctttaggtccatatattcagcctatgcatgaaaaaaaaacgaaaaaaataaaataaaataaaatataaactgttctgttcaaagaagaaaaacaaaaaggaaagtggaaagggattttcaagaataatactttgaaccccagaagaatcagccatttggatttgattgatgagacactaagagagataaactatacctcagagttggctttagagtacataatttcttcagctctgagcacaacaattgggagcttctcttgccattctttgttctgtttagtagaagaattatgaatctcattcgcaaccctttaaacaaaaaagcccagattattagatacaaataaactcaatataatttacacatttcaaaaaccccaacaagggagaaaaaaaaaacaaaagaaaagaaaaaagtattttcttttaaagagaaacctgaaaatctctttaataagagaacccctgatgggctggtgtctatcactatgccaagctcttctaacacactcatacggtcttggacctggtctaggcataactttaattaaaaaataaaagaaaataaaatatacttatatattctatgatagataaagcttcaacccttttgagaacttgttgtagtgaatggccttcaagtcttcaatttcagcctcttcttcttcttcttcaaatacccttttgatgtttcttacctcactgactaaaatgtagttcaacaataagtaagcacacagaaaggttgaatttttatatttttttttctttaataaaaaaaaatggtgggggcttatatgtttgcttttctttatgcttcttttactgtcagaagttgaataatttcaacaggttcaattgatgagtttggtgtgttccccactcatccacatgcctgcttccccaagcctcaaaaactccctctttctttctctctctctctcttcttcttcttcttcttcttcttcttagtttttttttttcactttggctctatctctctctctctttatcctgaccagtcgtgtagtgttgtaaggggaaagagacttgatgaatttgtcattgtcggtagtgcataagcaaacatcaacctctcactgttaataaacagaacattttcctcacataccaaaaagagaacaatattgtacataaatgatattttttttatagcttttacacgtgtcgatctttggcacatcctttccagtgtactgttgtttctttgttttacagtatcagatcagagatgatgcgtgtaaattgggttgaactatttttcactttggttttattcaattgactattgagtagtaaaactgaaaaagaaaactaaggctttttttcaccttgtaaaaagattattcctttcccttctttctttgcaaggacgaagaagaacagttccaaacagctagctagctacctttcatactgaaaatgtactctatttattcattgaaatcatacaccaaattcaaatgaagtaatttctcttgagtattttcttcttgtaagtgctctctataaaataaattgctatttatgtgtagtcagttagagaagtggaattgggaaccagagaggattttctagtgttcttttttctttatgtagttttgggtaatttaagggtacacatttcaacagtcattatatctctatttctttttgcatctaggataaattgtagttacttagaattatatgtaaattataaaaaaattataaacaatttagtttacagtattaaaaa

SEQ ID NO: 114141 - DNA, 1848 bp, Cannabis sativa
tgtttgaatctgaaatccatatattcatcaatatgtcaaattctctaggctgaacgctgccggatttccattggacagccagaactactaacaagtgatccagacatagtggcagcattgaggttaagtaataaatacaaaattttaggctctcatagtttcttatttaaatactgtccatctctgcttatttatgttctttttgtatttccagtatcacaggaaactttgggtttcaatcttattctcatggtgacttcctcggctcaattcttggtacagggatttctagagaaaggcttggtgatatactattgcaggtatgttccctctaagaactgctttccaatgagagtttatttactatggatgctgaagttacaaatcatatgttttagctttcagttttcaacaatgaatttaactagtctttaccgtgaacctgaaccagttgcaggaactagttataaacttaagaccgtattgacagtatatgattaacaaactacagaatgacatatcagtgcttttaatgtcaagtaactcataaagcctgagtcctttaagggtgaataaacggaccatctctctaaaaatggtttgatgtcttaagcttagttgtgttgcatcatcagaattttttttgttggggtttattcttatctctgtacttacccttctacacaacagactaaacaaaagtatctaatgttcttcctgccaaatcaagtaatgtcaaataattagaatgtagatccctttcattcttatctgtgtttcttacattgtcactctctatttaacttgtacaattccaaaatactttaacaaggatgtgaagtcagaacttaaaacttgttacattgatacaagataatgatgtatagactatggatttatttacaatataactaaaagatgggttgatattccactgtttttttccaggctgttggatgaatccagtaaccaactagaaatcagtctgtgatctttcatgatatcatcaattttaagcctgcatatacttgattttttatgatggcttctagtgttttttgggttaagaacatttatctttttctactattttattaccttctgccagggggagaggggagctcagatcattattgtcccggaacttgttgattttcttatatcagcacttgacaaggtgagccactccctaagaaaggcttatctgctgtactaattatattaagggtgcatactgagtactttcaagatttcaaatttcgggtcgtgtttgttgtcctttcatacaacacaacaaaagtacatccaaagcaagaccgggagattaacaatctatcatgagaaaatgaaagggatttacgttctaattatttgacaacaactgcacctgataaataaataaaatgggaaaactaattatgcagtggactctatgcctatagatctattagcttttgctatgttactaatccaagtcatatcccattttggttcctgaaaaaaataattattttgcaggttggtagagttccggtatcttgtacaaagataccattggaagctattgaatatgaaccaccaaggttacaaatcattgtattgatcaatacttaattccatataatccattttacctcagatcagcagcagtgaaaattgttttctctttgcagtaccaagtcattcaaaaccatagaggcgtcactaaggctggatgctcttgctagtgcaggattcaaaatgtcacggtcaaaactggttgacttaatcaggtggattctttttactcatgtataatcccttaaatactagtcattttttttcagtgatccttgaattgattaactt

SEQ ID NO: 114142 - DNA, 2835 bp, Cannabis sativa
tatatacaactgacatttgcaaaaacacggtttttcaatatagttgctcatattttagccaaacttgctagtagtgagattttgtgcttggtaacccaagttatattcagaaccatgtgattacagatgctattttctaatgaatcatcgccaccacttttttaaaatacttaatgcttttggtgttggtggttgtgatatttttttttgggatttttacctcctgaactttgagatgtaccaatcatacccctaaatttttaaggtcgttaataatccctcttgaactattgagattgttgaatttaaagatttttgtccaattttagtaagaaaaatctaacatggatgaaaattcaggggtatgatttgatacatgtaaaacttcgaggaggatgatttagtagatatgatttagtacataaacaattatcaaattggtaaaattgaatcaaattagacaaatatttttaaatccaacaatcttaatagtttagttaccaaaaaaatttaaagagtataatttgatacatattaaaattaaggaacaaaaaccctaattaacctaaaattatactatttgtctaacccaatttatatgaaatatatatttaaaaaaaacaatcagggggtgtgccctcccacaaataatggggtaaatatttttataatagacacatttatttttatgtttaattttcaaataaacaagagaacatttaatagatctcttatcccaaaaattaaaaaatgtctcatagcaaataccttctttatgaattataaaaacaacctaattcccgaggtaaaatacaaacatttaaagccctatcaatgtctttcctactaatccccaagtcattaattttatgtcaataaattattagaaacaatacaatattaagggtcagccccgttactataaagaaaactatattatttcttgttgtatatatatatatatatatataaatatttcctttttgactgcttattattctaaagattatccactgtgaaatgtattaactactattattattaacttgttgaaattgaattataatggtggaccaaattgaatttggtgactatccttagtaactatcactatctgaaatttcttcgtaattaccatgtaacttggatgacacttacatatacaattatatatataaatatatatttacatttgtgtatatcttacacgtatctaatatgtgtttgtagttgaacttttcactcataagttcgtgtgatttagtttgttgttgccttaaaaaaagactttgatatatattaataattaaaagagaagatagatattaccaatatgaacatgggaaattaatggcacttaacctaatgataataatagtaataataaatgattactttatttaattttccaagctagaggatttagataggtgttaatgttacctagctatagtcactttcaattgatccttttccaatgaaacaaaatctaattgctttgcattaatggaacagtgagaaaaaaggaagcagttaaatccatatacatatagacaaaactaattaattatgaaccccacaaggtataaatacatatttatatacaataaaatctagatatatatttatgtgtatgtgtttatatactctcatggcatcgatcatcaactttttcctaacctaaaacgacctaacaattaagtttagtctatgagtagtttctcattcatctctatgtatattgtagttagagcacttaataacctaattcacctaactatataagttaaactccatatatatatttagatatatttggttcattattttttcttgtggataatgagaaacctttttttttttctttttaatttccttttttatgccttatgtgtgagcatttggaattagttcttgaaatacatgaatatatataatggatatccttttttatttaacaagggatatctctagattttagttctagtagaggaaggttggtaaactttttaattttaattaggttggaatttagattattattttttattatgcttttttttttttttcatcttttgttgcatgggctaacacttgtcatgttatccattgacacacaattttgactcaaactataagtttgtaaacatattaatttcccattttcaaattataggttgactaaactaaaatataaataagatgaacaatatctttagatttggacaattaattataaggatcacgaacttcactaaattataataaatattctaatcatatagaatagattgttcataaaagggattagtatagtctactatttttttttaagtgttatattattattttttttttgtgtaattaagtatcaagtctcatataaattagttaattaatttttagagaatatcactaacgatttacaaggtgtcatctttatgtagtgttaaacactactaatgcccaataatgatactctataaaataatatatatatatatatatgtatatattagtgtcattaattgattaggattaatttgtttattgaaaacatgccttaaaccaatactcttgaaatcagtggccaatccaagatttaagttgagggagaacaaacttttttttttaagttagacaatgtgtactttacttttctatatgatataatatgttaaaaattaatacaaatttatattttctagtattaaataaaatttaaagtaaaaaaaataacaataaaatggttgattttaatggttaaggcactctacaaatgttattggtaagggtttaaattctatgactatatatctttcttttttttttttt

SEQ ID NO: 114143 - DNA, 2698 bp, Cannabis sativa
aagtcttttcagtgtgctttgtcctcactcacatgttctttggaaaacttcccaagaggtcacccatcctaagatttctccaggtcaaacacgcttaactttggaattcttaagtaatgagctaccgaactgaaatttactaaattgaaattgaagggcagaggggattccgagttgaatatcagggtttaaaatccagttcaataaagataaagggttgatgaattataaaacctcagttctcaagccccgttgactagcaaattaaacacctttatgtaacatctccacttcaagtctccattggcattcttctacatacttgtggctctattacatgtgtatgtcactttggctacttttgagaatgataactagctctgcaagccaacacaagtcttttcagcgtgctttgtcctcactcacaagccaaccttaatataataaatatttttagttttagtttttaatcattaaggtaaaaaaatataatatatatatttgcatctatttatcaactattattcattgtgtcacttattttacgaaaaaattaaatagagtgtgataaaatgattacattaatgtaaaagttatatttggagtgatgatattattaacaaactatatacttaaaatataacttaataatgtaaaaaattcggaagtaattattctttatgctaatatatacttcttcttttttataaacttcattaattccaatatagtaaagagatataatattaaagatacgattttggagttatatcatataataagttgttttctaggtgtacctttcgtttttctaatttggcaagagaatagttaaagtttaatatattggtgaagtgggacattgctttcttttttgatattgatgtaataataataataatcaaaggataaaataactcaacaacaaccaaattaaagccaaacagataattcatcaaaatcaaatgagttcgtttggtgcataactccaattttctttattatacttaataatattcttataataattctatcaatttgcaatataccaaagtattataatacattattattattatttgtagtagtgttattccatatgctaaaagtctaagatatatatattaaattattattactcttagttatgaggcagtatctaaaggtgtgtcgatgcaaacaatcaaatttgagaaatgaattctatttaagactaaatattatcacactttggtatatcaattttatatatacttttgaaagaaaataattacaaataatgagcaatatattcttcgatctgacccaaaccaaacttaatgggtcaacattatatatgttaatgaaactctcttttgaaaatgtacatacctaataataatagatagacaacgatgacacatacataatactaacgaaaactccatattcatagaatcatagttcatggaaataaagagacttgggccttggagaagattattttaggggatcttagtatcttacaaaaatactttttttttgtacttttcaaatttttactgatatattttttttttacatttttactgtaccaagttttcaaaaatatcgtgttaaacttttaaaattacaaaaatactgtatttcagtaaagtaaaaaaaactacttaaaaacaactttagaacaacttaacaaacaacatgaaaataattataaaacaacaaaaagataattacaaagcaatagaaaaataacaaaacattgatttaagggtaaataccatttaagaccttgtgttttgcaaaagttatcagttggagcttctgttttgttaaatgacaaaatggatcgtaaagttagtggcggtaacttttacaaaacacatggtccaaaatagtatttacccttgatttaattgcaatatgcaaaacaacatcaactcctctcaatatgtttttgtattacaatttttttatttagttttgacaattttatttatctttttgtactactacattatttttttttatatagaatttattgttacaatttcatacttttactttttttgtctttttttttttttgagttagtggcagttacaatgtaattttttttaaaagttaaataaataatcattaatgatagaaataataaaattttcaaaataaagtatataatataatgggtaataaaaataaatgtatatttgagggtatttgtgattcggctaaagccattagtttaacggttaagcttaatcttaagggctagatttagttgttgtaacttttctaatttcaaagctatgaagaaagatgtaatcctcataataaacaacttttaagttgtgaggctttgtcttatgttttgtatcttgttttggtggttggttgaataaaataaaatatatttaaattgtattttatttgataattatttataattattaaattaaaattagtttttaaataagtttaattaagataataaataaatttgtaaaagataaatttattttaaattatggtatgatataaaataaatggcaaacatttaacttggtccagctatagtaagaggcaattaagcaagcatggttttcttggttcaatttacttttctatttattatttttttttttttgaatggaaaataataattttattaaccaacaaactcagttacaagacaatgtaacaaatcggtaggaac

SEQ ID NO: 114144 - DNA, 5186 bp, Cannabis sativa
  modified_base (27)..(34): a, c, t, g, unknown or other
aaaatagattacattgaaatggagttnnnnnnnnggcataaaacccaacaaaaatgacatcaagaatcagaacctggagctcaaggaatctatcatttgcagagagaactactctcatcaactcagttctgatttctatccagacatacttgagccaaatcataatcatgcctaaaagaattttgaattccgtagaagctatctgtagagctttcttatggaaagggcaagctgtattttatggagcaggtgttgtggcctgggataatgtgtgccagtctaaatctacagggggattaggtatcacaaagcttgaaagttggaacaaggcagccatgtccaaatacatttgggcaatctcaaacaaccaagagagcttatggctaagatgggtgaatagtgtatacatcaagggacaaaactggtggagttgcaatgcctctatccactccagttggtactggaagaggcttgtttctctcaaaaaccagatcctctccttgattgatagtgctgagttccagagtaagaaatatgttatcaaagcaggttacaaactgttcagcactccaaaaccgaaaacacattggaggaaagaggtatggtcacgactgaatacacccaaacattgtatgattctttggcttgtgatgttgaacaaactgaagaccaaggacaggttgatcaaaattggtatcctagtgcaagagaaatgtagtttgtgtggtgaacacaatgagaacatacaacacttattctttgattgcaggaacaccagtcactgtttgaaggagataaagtcttggctgggttggaaagctctaacttccaatgtgcagcaacttgttaaatggattgggagggcaaagatctcaaaattcaggaaggctgtgtattgtgttgcagttgcttccatggtttacacaggctggaaattgagaaatgctgtcatttggcagggtgcacaagtggatatcaaccgaatgattgaagaggttaaatggagtctaaggactcgagttcagaatttccttccaaagaatctctcaaaggtagataaagagtggttttttgctttatagttaaacaaagaattcaattgtaaagcataggtgaattgtaaaaatggaaaaagagaattgtatagattgagatccttgtgtttgggtgctcttagcttgtaattttgattgtgcaatacaactcattgatttatcaaaaaaaaatatttggtgttaagttttaattttttaatattagcttacatttccaattcaccccactcttaaaattatatcttgggttaacaattggtatcagggtgatggctcatttatttgattagatttcataatctagagcatgatgtttccatgtaattcacaaaataacatgttagaaggtgtaagctcaaatagagcaccatacttcaatagagtagactttctttattggaagattagaatggaaacttactttcagtctatggattatgatttgtgtcatatagtgtgtaatggtccttacattcccaaacatgtcatatagtatgtaatggtccttacattttgatgtagaagttattaagacttatgaggcatataataagaatgataagaaaatactttctaaaaatattagaactaaatatgcatttatatgttgtttggatagagatgtgtttaaaaatatcgagaaagccactattgcctttgatatgtagaaaatgcttaaagttactcatcaaggaactagtgctatgaaagagacaaaattcaaatttattccactcaatatgagaacattaagatgaaagcagatgaaactattgctaacatgtatacttgttttaccataattactaatggtttaaactctcttggcaagatattcactcaaaaagatatggtgatcaaacttttgacaagtctcaccaaagcttattaaggaaaggtggttaccatccaagaagccaaggatctcttaacacttcccttaaaagaactaattggctcactcatgaaccatgaaattttcatgagtgctcaagaagaagataaagttgagaagaaaaagaagactattgcattcaagtcttcctcctcccatgccattagtgaagatgatgaggatagcttgtgtaatgacatgaagaacttggcacacttctcaaagaactacaaaaagttcatgaaatttaagaagaactttggaaaaaagccacaaagagggagtgactcaaaagaaagagcaaagatgatccaccaatttactttgaatgcaagaagcccagatatgaaaatggattgtccaatgagaaagaataaagaatacaaggaagggcaatgttggcggattggctcaatagtgatgaggaggactctaaaaacgaggagaataatgaggaagctaatatgtgcatgatgacacttgatgatggggtaagtatttctagctaaagtgactgtgatagtgaaaatgataatgataacatatatattgcatatgattaattttttaattcctttaaggaactatttgacgatttttgtaaatatcttgctataaaccaaactcttcgagagaagaccaacatgctactaaaacaaattgaaattttgaaattaaatgaaaagaaacttttagctgaatctcaatgtgctacatgctcctctataagaaagaaatttttgattacatgctaatgtaaaaagcctaaagaataacatatatatatttacaagaggaaaagaaggttatgaactcatgctagaaagtcaatcatgtggttctgtaaaaaaattgcattagctatgatcctagtaggaaacaaatttttttgagaaatttctttgtaaaatcatctagtcaacctcactttacatacacatattgtaaccaagatagtcatactattttatattgtcatgtaaagaaatatccatatctaggtaagaataaatgggtatcaaagggttctagtactaacaagaaaggacctaaagttattgggtaccaaaagttaacaagcatgtttgattttgtaagaaccgacaaaaaagaacaaaattctatggttcttggatactggatgttgaaagcacttgaccagtgatccctcaagatttttaagctttaaaagtaatgaaagtagatttgtcacttttggagataattcaaaaggataaattttgggcatttgtgatattagtaatgtatattctccttgtattaaaaatatgtttcttgctgacaaccttaaacataacttgcttagtattagccaatatgtgataaatgtttttgtgttttgattgaatcttcaaaatgctctattgagaatgcttcaaccaatgaagttattgttgttagagaaagaaaggataacgtgtatgttattgatgttgattcgtttgataggaaaaaaaatgtttaaccattgtgaatgataattcttggttgtggcatagaagattaggacatgctagtatgaattctattgtagaattgggtagaaaagatcttgttattagtttgtcatctattccttttattaaagatatactttgtgatgcatgccaatttggaaaataaattaaagcatattttcattccaagaaagaaaattcacctactagacctttggaattgcttcctattgatttatttggtcattctagaattactagtcttggtggtaaatactgttgagcttaagtcaacgacagtgagtcaaattaaatcgattagaattagttaaataacaatgattatgacaatgataattattgacctcacttttagccaacaataataggttaaattaaagcgattgcgaataattaaacaatagaaagtaaatcgtttaaagtaaagaaaataccaaatttataaatgttcgaccgttatagttggtcatagcctactccctttttttgttatattaagttgtgagcaagaatgagttcttctatctcgaaggctcttacaatgacctctgagcaatttactcttagatcgtggtttctctcttgagtgttctatctatgaatttttttgtctccttgaatagtgagatgagaccactatttatatgaattaattacatgaaattttttccctaaatcaataatacatacaatgagaaactaatttatttccataattataatgaagaaaataggaaacttagactgatttcctttattctttgaagataagaatttatcccacaaatatagtgatagtatcgtgattctcaagcttggagatatatgagatatatctcagaaattactaacttgcatcccctagacggtgcatgcgagctacctgcttagtggagctagtcagatgtctattcatgatctgctcggacatcctacaatctatatgtaactttaagagtcatctgcacaggttatgaaatacattacacgtgtcacctagatggattccacatcatagtgacaaaatttggataacatttgccgcaattccgcacaagattttcttggtcgcacgtggacttattcagctaggaagctgttcagatgggtgacgcatgtctggttatcatctttgatccgatgtgacctgatcgaacgtctcttcagtgtttgaggcatttaatacttcttgaaagctataccttgaatgacgcattgacggttgagtgatactgcatggatgacgtctatgccgtttgcaatgagtactaacattcgatttacgggggaaaactaaaatattcaaattttaaattaattaactatccccctcaaaaacctataaaagaggtttaaagctttttattgggagattcttttagccattttactcttataaaacgagagcaaaaaaattctcttttttatcctcaaatcttcaaagaaagcttattggaaactccattgctgataaccctccgagaaagttcagaaagctttgaatagtgagtaagctgcctttccctctttttttatgcaatatatgttgagtaaaagcattattttctgaatttattgctgcgaaatttatgtattcttgaactattcttgactgatcatagagtagatgacattagtgttggaaatattttaccaggatttagatttactaccaagtatgtttcattaacatcctaatataaattctaaaacaatggaataaacacatataaagtt

SEQ ID NO: 114145 - DNA, 1687 bp, Cannabis sativa
attacctccaattacacagttatagtgtaattacatgatcagacaaacatgttaaattgtgtaattacctctaattacacaaattcaattacaccgtgattttccaaacgcgctccaaaagtgaggtttcctaataaacttggggaggtcacatatgacatttgtctcattttcaatttaaaaaataatgcttgaagcaacaactcctttgaattgattttggtgttagtgggttcctgatttttcacgagccttgtccatgctacaatatatgcatttaataactagcatggtgattgtatagatatcttgattgccattgctaattcccaaatggtagtcaatagattttttttttctttttactttcctaatatttattttattctctggtacaggaactggtggtgaaggcagtttccctggccattgctcgtgacggtgcaagtggaggtgttgttcgcactgtcattgtaagagtttccctcaaaacagtgatttggatagtaaggagaattaaaattttgcaagatagcttacaagttttatgcttttgcagattaattctgagggagtgacaagaaatttctacccgggagaccaacttccactctggcatgaggagctggagtcccataattcgttactggacatattgaacgcttcgagtccagagccaatgaacatacaatgatgagcttgctatcagttattactgtttacctcttctcttctgcaagactttagtatactttaaactagaacagatatttcatctcagctctgaatgaattattattgtattgtgatttagattatgtatggtgcttaattttaagctacactttcttctcgttcttgccctatacacttgtaaattcttatagttctctactgtgttaaaggtggtctggttgtttattatagaggtattatctttatagagtgctcgggtttgaatattgttttgtttagttttaagatatttttttaattcacaaaattacaaagaaatgttttttaggttctacatattatgtacatgttgatcttacaatacgaaaacaaataacaatgcacacactatataatttatattagaatgtcacctcaaaccggagcgaaaagcttaaccaaggattttatcaaatttttattgcaaattgttgcaaaactatcatcaagcatcattttgttatcatttgttttttgcttgaagcgtctcttgtgttattgagattttatagtcgtcgctaaactatcgttatgcatcgtttgattttaataacatgtttttctggttctccttctgtaagggagttagcacctgctgttactaacatgttttgagttgtgttttttttaataaaggtcttcgttttagcaaaaaaaaaaaaaaatccgcatgacagatttttaaatggtaatgggaggtggtaacatctttagaatgaattagatttgcttcaattggtgagggtaaatgagaaactatgaatgtatgaaagtttagaaagagatttttaagagtgagtcccacaaattagagagactgtgaaaaatgacagatgaatgatacatgttttgcctacaatttttaagattggcatattttaccctagtagaatatgcctatatgataagtttttttgtccatttgaaaaacaataaataaataaaaaaaaaa

SEQ ID NO: 114146 - DNA, 2033 bp, Cannabis sativa
  modified_base (32)..(33): a, c, t, g, unknown or other
tgattaacataaataactgctaatttccaaannaactaagcgggctttacaagtttcaatttagagttatggctattctttcatagcggttatgtctgctttctcactttcataatggtaatgatcgtcttgttagtttcataacagtaatgactgtcacttactctcataacggtaatgaccgtctcgttgctttcatgacggtaatgatcatctcattactttcataaccaattaattcacaaataatcttgatcatatcttgacatgctatgtggtgcatatgtacttttcttacatttaattttagattcttgcatgtcggccaacccaaatagagaaacgcctgacgatcccgaccttaagtcacaagaacgataaattggtcggtaaagcacttgacctatcccgtttttattcttaattttttaatagagttttcctatcaatatatagcatgtcaataccctaaatattgagaaaatatgataaaacaaggtcctaaacattacctaaaatgacagactgttttggctcttcttgcccaaaaaaatagttgaccagttttccaaaactggtctgccattcgtctgcaaaaaacgagccccgagtttttcttgtctccaacaccttccaaacctaaccaaaagtaatgaaacttcacagagcaatcatatagcattaatataacattcccaaattgataaaattcatgatcaaatcaaattatggaagttgtcattaaaggtctaactttgagttaaaaaactcaagttttccttacacttcactataggcacatatccatcaaaataaacattaaaaaaacttctaaactaacctataaactcatcaaatactttatgttaattcaatttttcattaactcataaataagccttaattgacaattaaatattactgagagatgactataaataataaacaaagaaattttacgtagttttgaagttaaatcttcatagtccataagtccatcttatttttaggtttttttgtttatacagagtacaagtattatacaagtattgatcgtaaagatctttatattctcccaaaatttgtcctccccttgtctagtggtttctgccactatttattaggatttaggaatggtagttattctatttatttttatcttgatatctattcctgaaacgtggaccatttccacattttattcaattgttaaaatatataactgctaaaaaattgcttatttgatcttaacttatacacagttatttgatcgagatacccacttttaaggttttgctcgcaaatttgcctctattcatctcgcagtatacatgatctttataataaatcgtctccttttcacatatctttgtataactcattgagacgtgtttatcctgtatcatttcgcgttgtacggtggggatacgacacatacgggacatatgtttggccattcttctcgcattgatcatccatgatgaagtttttggataattcttatataaaacttttaagtatgctcttcaaattgtatcattgatgctcattaggtcgaactcttttatattgtcttgttcgactaaataagccctttgtcttatttttcctgtactttgttgttcctgaggtggttgttattgatttcgcttgtaacatccccgtcttaagcctccattgaacctttacagccataaaataatgactcttatatatgagtacgtcactctggctgcttcatggactcatgactgaccctacaaaccaacacgagtatttctagcgtactttgtcctcactcgcacacttactagaaaaactttcctagaggccacccattctgaaattaccccaggtcaagcacgcttaaccatagagttctttcgtgatgggctaccaaaaaaacaagatgcacctagcagatataggtagtaccaatcaatccatttaagccttattcaattatgtagtcccgtacttacacaatctcaaaatcatcccacttgaccttccccaagcggtgtgggattgca

SEQ ID NO: 114147 - DNA, 1411 bp, Cannabis sativa
tgggtgagggtggtgggtgccgtgggtggtaagttggtgagttgagagagtcggctgagagtgagggaggagagagaaagggtttgagttatgaggggggtattttcggggttttcaaaaaattggcatattttttatagtgtaaaatatattggtttaaaaaaaaaattaaatttaataagtatagaaaatcaaatttcccattcataatgacctaccaaatggaaaaccagatgacatggctaccaaataaaacatatgggccctaagcattagcaatacacaaggtgggtttcaaaatcaacaagcagtagcaaataaaaggcaaaaagttgtagttttttttattattattattaacaatctcttaatattaaagtatagaagctttcaagacaacatttaatgacaaagttgcataataaaaaaaaccctacaaggtaatattttttttttgcagtccctacagagtaatattagaacgaaattaagctcaataaacatagaaatatagaaatacttggccacaaaatatgattgagacattagacaagttgaagaatatggagaacaattgatctcaaggctttctatatgtttgtttatacaaaaagtgacaaacttgtcgttttttttaacccaaaaagaaaggaaaatgaaggttttcggttacttttgaatgttttagaaagtatgaaagccatccttgcaccaaacgtacaaaacacaactgatcagggtaggtttccctttctttttcttataatagaaaatatacgatatttgaagatatcaaatataagcttccaaagcagatactccatatcacttacagttcattattaacaactaggatatgttttttagtaagtccgaacttaaataaatatttcacatttttctttttgaaagcaacgtatgaacttttgaccatcctatatatacttcttttataatatttttttccttctttaacagtttgtccattactaccacttaaactttaacttacaagttaaggcaatatagccccctccatttttatttaatttttataattattcgttattattaacccaccaacatgttaaaacacattagacaatacgttagcatatatataaatatatatatatatatatatatattctaaacttgattatcacattgttttggattgcaatgataacttacttcaaagggtggcatgaatgaccaaacctctttgtgagaggccactcttgcatacttcaagtatccaagttgcttttttaaaataaaatattattaactagggtgtcgtttgataacactttcttaatcagtttttgtttttaaaattgaaaaagtaaaaatatttttaaaaaacatgtttaataacactgtttatacttttcaattttttaattga

SEQ ID NO: 114148 - DNA, 3205 bp, Cannabis sativa
taattaagaaccatgtgttggattccatccaatctctggtatctaatgatttgaacagtgttttgatgaggcccttcactgaagctgatgtgcgagtggcataattatttcatatgcatcctaataaaagtacgggtaaagatggtatagggactgtttatatatatataaaaaaaaaatagaaaattttgggttcagatatgtgtcttgcatgccttgattttattgatgggatagatttaattttatcaattaacgagacaatcattacattaattcctgaggtaaaattgcctactctaactagtgaattcaagccaattaatttgtgtaacgtgctttataagattattgctaagatgattactaatagtactaaagaagtgttaaatgacattatttgtgatgagcaaagtacctttatctcagggtctcttatttttgacaatactatgattagttttaagtgccttaatgctattaaaagacataagaaggatcgaaaagagtttcttacgtacaaaacagatatggttaaggcttatgatagagttgattgggtttttcttcatggtatggtggaaaatttagggatcatcatgggtgattggtttgattatgtggtgtgttttgaccatgacttatgcaaataatgtgaatggtgatgtgattggcaatattatttcgtctcggaggctcgggcaaagggatactctatctccttttttgtttcttatttgtgttgaggggctgactttcattatctaacagaaaattaggttagataaaatttttagtttaacttgtgggaggtgtggccctatgatatcccacttattgtttgttgatgatagcttctttttttttggaagccaatttggaaagttgtactcgattcaagaatattctattgttgcatgacgctgagttgggtcaactagtgaatcttaccaagtttgcaatttgtttttctccctgcatgcctaatgatctttgtgcgtcgttggctctaatcttaggagtccctttggttccctaccatgacaaatatttaggtttatcttgtttcgcagggaagagtaaaagtgatttgtttcagtcaaccaaagataggatttggaataaacattttgggtgtaagtccaagcctttttcttcttcgggtagagaggttttgcttaaatttattgtccaagctatcccccacgtatgctatgagtttgtttcgaatccttatggaaattattaatgaaatccatagtatgtgtacccatttttggttgggtggtgatattaaaatgcattggtgtacttgggatcatctgtgttggcacaaattggatggcggtatgggttttcgtgacatgttcttatttaatcgatctcttttggttagcaagttgctcgtctctacaatttccacgattccttggtgacgcgagtaatgaaaagaatttattttcacaacagctcaataactgatgtgaggaaactaaaaggtcctggtttctttagaaaagtatcctttgggtgtaatcattggaaggagggttgtcgttggttggtaggaaaaggcgattctatttgtatttatatagatgcttggattcctaaagaccatgtgagtcgtacctattctttttgagtgagggttagaattcaaagagtttgtgatcttaaacttaactcgggtgggtggaatgttccactcattttggatttatttgatgatatgaaggttaagtcttttttttatttattcctatttttagctttgatagatatgatagattaatttagaatttttctaataatgactagttttcagttaaaagttgttactagagcttgatttctcagctgggttaggatcgtgattcttcttcaagaccttctaagtggcagaaatttctttgaaagctttcccttcctccaaatatcaaaataattgtatggaaagctagtcttaattttgtgtcaacttatgctaatctatctagacatggtccaaggaataggtatgtcctatttattttcagaataatgaaactacattagatgtcttgtacttatgtccttcccttaaattaatttgtcaaaggatggggtttgtaaggtttagatagtttcaagatggcttctaatttttatgagcttttggttggtgttatggatttctttccaaagaagaagttgaagaatttctagctctttgttggaggatttggtatcgttataatacatttgtgcatgttaataagttgatttctgaagatacggtaagcaggactcttagctacttatggtgttacaagtaagctcaatgctctggtttgccagtccctgtgagtttgtctctagataactctagtaacaaagggagggtggtttttgagtcgaatttgggggcatataatatgtttgttgatgctagtacttcttttgagcgataaaggattggcatgggggcagtggtatctcattaaaatggtgaagtcttatgttcagctactacccaagcaacagctttacttgaaactcacgtggcggaggcttctgcccttctccatggtcttctcctcaatttgcgactggattatactcatatcattatattttctgattgcctgggcctggtgaagtctctctccaacaagatgaatgtctgcaatgagtatggtattgttattaatgatatttttcatgtatgaaaatcattttctcatttatctatttctcattgtaattgagttagtaatgttatttcttattctctactagctaaattgtctctttctttagaaattcttcgagtttggtagctgaattttctgcttaacttactttaaaaagactatcttcgtattgatctcacgatccatttggctttggacctttttaatggaattatcccttttcaaaaaaaaaataataatgctaataataaaaaaataataataaatattcctctctctcactaatctcccttatatagtcaaaaagcatatctctatatgtttttttaggataaatatcattttagatcttctgttttataaaaattacttattagactctttatttaattaaatgataatttagaccatgtataaatagtacaaattattctaaactcaatttcttttaacttttttaatataatcagttttgaaattccgtattttaatattcccagtttgattat

SEQ ID NO: 114149 - DNA, 2002 bp, Cannabis sativa
  modified_base (1939)..(1950): a, c, t, g, unknown or other
atagtgtaaatatctcatcttgtaaagataatcactcttgcttaataattctgtcaatatgcattgcacaactttgattgttacattatcaaatgccggaatcaatattttcgattcaatttcttaaattgttggaactattttgtacttctcttaccggattatcattcttttcaagttagtgaaatcctgaagtgtgttaaattattgaaagggcgaagtagcaatttcttcgtttttttttcgttaattcatttgtttctttttgaaattgtgaacatcctttgtgcattgtgtgtatgcatattcatcagatgggctagcttgcattcatgccactcttatgtatataaaggcaaacatatgtcttttgacaggtaatggaatgggtgatcagggaaaggccctacaggctaaaggaattggactattcttttctgttggaattcacaattaagattcatgggatttcacaaggtgaaaagctcttttcttgccttccagcagagtttcaaaatgagctcctttataccaatttagtaatcgcatgcttggacaaaggtgcaataatactttcactagcttacatgaagaaaatgagggaattgaatcatcccatgtcacacttggttttcaaccgcctcataattctccattcatctcccaggcgtagaaagttcatcccgaaaattctctctcaaatgagagctgataaagtgccccaacatgtctccacatttaacattcttatgaaaatagaggccaatgagcacaatattgaagggctcatgaaagtttttagtgacatgaagcgagcaaatgttgaaccaaatgaaatatcttactgcattgtcgccactgcacatgctgttgcaaggctgtatactgttgcggaagtctatgttgaagctatagagaagtcaatgacaggtaataattggtcaacattggacgttcttataatgttgtatagctttctggggaaggaaaaggaactagagagaacttggcaagctgtgcaagatttaccttatgttcggtccaaaagttatgtgctggcaattgaagctttcggtagaatgggcaagcttgaccaagctgaggaactttggctcgagatgaaatcaagaaaagggttgaatactactgagcagttcaattctatattgtctgtgtattgcaggcatgggcttattaaaaaagcatcagaaatttacagggaaatcggaaaacatgactgtaaaccaaatgcaataacttataggcaccttgctttgggttgcttgaaagcaaacttggtggaggaagccgtgaaaactctcgagatggggatggatttgacgacaagcaacgtggtcaggaattcaagcccatggttggaaacaactctactaatagttgagagttttgcagacaagggtgatgttgggagtgctgagaagttatttgaagagttgataagagcaaagtatagcaggcatacttttgcttacaacactctaattaaggcttatgtgaaggctaaaatttatagtccaaatttcttgaaacgaatgattttgggaggatctaggccagatgctgagacatatagcctggtgaaacttgctgagcagtatagaaactgagtttagttttttgaaatgatcataaggaggttcatttttattcttcttttatgtacaaaattctgtgttgttacaaatagaagacatgattgaataagcttaaaagggataaaacaatggggaatttacacaaaatattatttttttttaggtaaattgcgacaaaactctcaaaaattttattttgctttcacttaaccccaaaacccaaatttgtgcgggatagctaccaaaaccacaatactgttagcaataacacacctctgtcccatgattgttgatttttgtgccctaaataaaacttatttcannnnnnnnnnnnttactaattaataaaagatcagaaattgttttatggtccatggttcacatga

SEQ ID NO: 114150 - DNA, 2136 bp, Cannabis sativa
  modified_base (2091)..(2108): a, c, t, g, unknown or other
ttttttttttttttttttacaatcacattgtcccttaagaaggtagtaattacctagttgcttgtaaaatattaacggagagaatacaaaaggtatatggatgttggtctacaaaaatgtgataaaaaccagaaatatttcaaaggatcaactagaaaactcaacaaaatccttaaatataagaagaacaatatagttatattcctttgaagtaaaagccccaaaagaacctgtaaattggttaaataacatcttgagctagttatctagaagcattttaatagagataattatttccttactttcaaaatttcaaaactcattacaagagaaagaatataaaatggcattcttgcatacttttgacccacagtgtcatctttctcggacatagttctaatttagaatggagaaagttgtgtaaaatcataatgagagagaaggccatacccaaaattccactcagcacaaacataaggacctatccgaaggtgaagatagagtccactggatcccactagctttacaaacttaacaagatcatacctcccatcaaaattgtactaaaaaggaagttcagaagaaaagttaatactctagcccaaacaaattagtcatattcaagacaataataaggctctatctacgatatcacctctcctttgacaggctcatgcccattccaaaatacataagtctggatcacatctgcaccaccttccttgctcttttcaatcaaatcgggccacatctgatgtcaaggggcatgaacagaacatgtttcagaaaatagcagcataaaccatctttagaatgaactatacatccatattatataaataatatattcttaagcattcaatttttgtgatgaacaaaaaaaaattgttataagaaaaacaatgcacataaagatcaactgaatgaagaacatgaaggaaatcatccaagtcaaaattgcctaaaatagcaccaactgcaccaaaatttcacaaaataagaagaccgactagtataaagaaaagaaaaatggactgccattacttgggcttggagcaaggatcaaactcctgttcattttcagcaacaatttaatcagaataagtgtaaactatatagaaaattcatgtcataccacagattcctgtttaagactcaacaatattcttcagcaacgattgaaacagatagcatagtggtggtggaagctattcgaagctcatttcagatgtgttctgcatttgagtttttgattgatgattgtaaaaacttgttgggtttattacataatgtttcgttacattttgttatgtttgttaagtgttctgcaaatcgagctgagcatttcattgtcacaaaattctcgattgatagcaactctgttccttctaaattattgtttattcttttgagcgattgctccatttaatgaatatgaatttgttcaaaaataaataatcaagtttgagcgttacttaggactataatgcttctcatccacctaaatatcaaagaacatcacaaattaaccaaaacaaactctatccttacacaaaatccaagtctcctaacttcacaaattaaataataattcactcaaatcatcaaaatttcagccaaaattttctcagcaaccaaacacacacaaaaacagtataataagcaattaagcacctcgggagtggctcgagggtagtgaataccggcggagatgagcatgcgacgttttccgtctacgatcatagcccgatgatcgtagctgacgttgaatggcttaaagtactcggcggcgagtgcgagcagagacaagtgaatgctgagacacagaatcagccatgggagagtgatcgaagctcttcgccctaccatcttcgctctctctctctactgatcttagagagagagagttatgagtgttgttattgttaagagtggtttctacgcgccaacggagtaagcaatggaaaattacgatagagatgttgcagttatccggttgttgcctacgtgtcattcggttcgggtcgggtcgggtccaatttgtaaattgggggcaaattgataataattatatatatatatatgggtgannnnnnnnnnnnnnnnnntttattgtaaccatatagttacattttt

SEQ ID NO: 114151 - DNA, 1551 bp, Cannabis sativa
aagcaagaatgaagtaatttgtttgtggctaaaatgattggagaaattggaatacaatgttgggttgggaaccaccaaaagtagggtgaatcaagtggagccaatacaacttaaagaagaggcagcatgaaagttcaggtttttttgtaatccctagtcaaagttaatggtctaaaaggcaaaaacaaaaacaaaacaaaaaaaatgttttagacaaaataaatatttataaataaactaaataaaaataaaggtgatgtatataaatagcttctgtctttttcttcaagattaacttcactcttctcttttctttgatttttttctctatcacccacccacagtatatgttgaacaaacacttttgtgtcaaaaaaactctgattttctcccctaaaatagggctaaagttatgcagaaaaagctatgtatatagtatatttaaaattcataaaccagtatatttttcacattttatataataaatattgaataggctaaaaaggttttgaagtataattgtaagtaagaaaatttgtgttattatgggagtgcaccaccgactacgtgctctgtctgcctgcatgaatttgtttattctcttttttccacatttatatatatatataataatattatgtatatataaccgcacacagctagtgatgctgaacgtgacatgaaaattcaatatataaaattggatgtcaatgtgtgatatactagtttattatctaataaaagtgtattgttattactatattcacactcacacacatggcacaatgtacctacttggtatggttaaaagtaataaatgcttacctatctcccatctaaattgttgtaacctatatataattggtaagtagaacatttctttatgagttagttaatgatatgaataaaattaaaaggaatgaaggtaaaatattaaaatgtacttgttgagttaactctcaagtgaaagaaaagaaaaaaaaaaagaaaaggaaaatgtcactttgtcacgaataatttgtctagcaatcaaaatgggtcatgccaaaaaccattattattttttatttgtactttttttttttaattttagagagagagtttagtgctgttaggtttatatgggtctgtgcctctgtcaaaattcaattttgatgaggcaaatacatccaaaatcctccccttcaacccataacccccaaaaattaaccttatcccaaccacagaagaagaggcagctatcccatgtgattttgattctcttcttctcttcttttctttcttctcaccaccaaaaccaaaaccatttctcattttcttcttcttcttcgtcctcttcccacttgtctaccttgcatggtcgccatttggcaaaaatagttagtagattgtaacagtttcaaaaaaatcaaaaccctttacacactcactaatcactacattacatttcatatccttattccaattaatgataagagtaacttattatgatgtttggggacaacattaacctcgttaccaaacaaccccaaagagagcaaatattggatc

SEQ ID NO: 114152 - DNA, 2930 bp, Cannabis sativa
ggtaatatcaggttgattggggagctgtacaagaagaaaatgttgactgaaagaataatgcatgagtgcattaaaaaactgttgggacaacaagagactcctgatgaagaagatcttgaagctttatgtaagctgatgagcacaattggggagatcattgaccatccaaaagccaaggagcatatggatgcatattttgattggatgaaaactttatcaaataatatgaaactatcatctagggttagattcatgctgaaggatgcaattgatcttagaaagaataaatggcagcagaggaggaaagttgaagggccaaagaagattgaggaagtgcacagagatgctgctcaagaacgacatgcacaaacgagtaggctcagccgtggtccaagcattaatacaccaagaagggggccttctatggactatggttcaagagggccatctatgctgtcttctccaagttctcagctaggtagcttccgcgcaatgccaggcccggttcgtggtttcggcaatagtcaggatgttcgagctgatgagagaccgtcttttgaggccagggccctgtcagttcccttgactcagagaactattagtgatgaagctattaccttgggccctcaaggtggtctagctagaggaatgtctattagaggaacacctttgtcatctgcatcaatggctgatgttgcacccaacagtggggactctagaagagtggcagctggtataaatggttatggttctgtctcagaccggggttacggtcctattagtgaccacatcccaagatttatgcctgataggttttcaggacaatctgcttatgatcagtcaagcgcgcaagagcgaaatattaattatagtggtagagatatcagaaatacagatgcttttgacaggtctattccaaattcaccacctacacgtgggcaggcaacaactcccgcccagaataatcccgcagagaagacattgcctgaagaacatctgcgcgagaagtcaaggacagctattaaagaattttacaggtttgcctatctgctgtgcgtgctttttttttatttatttattattattattatcattttctgcgtttcagtacaatcatcagctattttttttttttgataacataatcatcagctaattgaatgtgctaacagatcattttttgtgtactcttgtaacttcttttttgggtactagctcattgtgactatcattaggtagaatggcctctgtcagctgtttgataataatgaaaactagttttgaaaacatgcaaattgataagcctatattaactggtgtggtactgaaactaatgctattgcccaatttgagtgttctcatctttttgtatggtacacctaaagcagcattttattaatagttaactctacttgggtcatatttattttctcagttaatattttgacaagattcttggttcctacagtgctagcgatgagaaagaagttgctcaatgcattaatgagttaaactccccaagcttccacgccacaatggtatctttatgggtcatagactctttcgaggagaaggacttgcaaagagatcttttggcgaaacttcttgttaatcttagaaagtctcacggtgatacgttaagtcagtcacagctatttaaagggtatgtgctagttttcttatatatatatatatatatttttggaatgtattaatagaaacttgaaccctttttgtcactaacgtttcttctgggcaggtttgaatcggttctgtctaattttgaggacaccgtaaccgatgcaccaaaagcaccagagtatcttggccgaatctttgcgaaagtcatcatggagaatgtggcttctttggcggagattggcaagttaatacatgacggtggtgaggagcctggcagccttgtacatgcagggcttgcaggcgatgttcttggaaacaccttggagattattagatctgagaaaggagacagtgtttacaaggagattgttgagagctctaaagtgagtttggaatccttccggccgccggaacccctaaagtcaagaattctagagaaaatcattttgggatagcaatgatgatgatgatgatgctcattgtaatcttggtagaaaaattcaaatgctagagctgttagagtactttattaatctgcattaatatttttgttggttggcgcgggagagagggaatttatataatggggttttccttctccatggttttaaaatattatttattgctaaatctttactgaaaattttatgaaaaggttcaattaagcatctaaatttatttaagcttctctattgtgaagtcttttttttttctttcttttttggtgggtgatatcttaaccaagttttgtttactatgttgaataaagaacatgaacaagagaaactagtaaaattgtaatatattgcttggaagttgggatcagcaacagacttatttcctttgacatttctagtgacttctagtatttggttggttggttgtctctgaatgtaatttactttcaagtttctcttagtatttataattaataaagataaagaatattaattagcattgttcatttgagcaaaacaaaaaaaaaaaaaaaagcattgttccaaattaaatcaaataactcatgctttggtttggattgatcctgactgtcaaaacaatttgtctttgacttgtagccaaatttggattattgcgaaatgtcctataatttaatatggtaataatataataattattataaaaattattaatgccccgcttaataagtaggaagaagcaatttatcaaaaaaaaaggggttaattttacaaatgcacaaaaacaacaaaaaaacaacaaaaatacggtttcacggaattttaaatacttttacgatttttttgatttta

SEQ ID NO: 114153 - DNA, 986 bp, Cannabis sativa
ctctctctctctccctctctctccctctctctctctctctttatatatatataaataaacctttctctctctaaagtggcagtgtggagtggagcttacaattagatggggttgggttctctctcttcagtttgcttcttctgtaaaaataaacacagaaaatgacagattggtaagttagggacaccactagagagagaaatgaaaaatatgaaagagaaatctcacccgacaaacaacactgtgtgaaaacttgagattggtatttttgactaaaacagcttcataggaaagaaatatagtaagataaaaatttatataaaaagaaagaaatttatgaaaacagttgatgttttttccctttttgtaaattgggattactctgttttggtttcttatacaagccaaactgaaaaagttaccttgttcgtaaagttcatacctttaaactctattttcttttctctctctccaataaatccggcgtcttttactacaaactgtacccttataagaaattgttatggaagctaactcaaataagaataaaaataaataaaataccattattcaccattattcttagtattacattatggtttgactcaaaattttattgacggtgacaaaaaaattaattaattattttttctcttgcataaaaaaattattagtagattttttttttttttttcataaatgtgaactctacaatttatgtcaaattgtcacacaactaaggttaagcttaataaactattaatataggactgaaattcttgatagtattaattcaaaagttgtcaggaaaatcgtggtcaaatctggggaatccttccaagtttcgattctttatttgaaaatgacagcaatagttttttatataaaaaaaaattaaatatattttcttctgccatttacttaaaaaaatagataaatgtgaataaaagatagtttatataggaggaattttttttttttttttt

SEQ ID NO: 114154 - DNA, 3509 bp, Cannabis sativa
  modified_base (3420)..(3421): a, c, t, g, unknown or other
aaaccgcaaccgcaccgcgaagaatttcaaaccgtattttttttgcggtgcgggcggtttgagcggtttgatgtacagccctagttgggacgttacattgcgtgtccacattaaaattgatgtcactctattgttgccttgaggcactggcttccatttccaaggaatggcaactccagtttggcttgatttcttctttgaaaatctttatgatttcagtcattattgcggctacgttagccatatagtgaactattgctctgatttccttactaaatgcaacttctcctcgactctgcctatgctctgatatgaccactccccgggtgccaagatccgtattacctttaaccctttctatattgctagtacccgcacccgactttgatctcacaatactagccccaaatctttagctcctaatcaccccttaggttgaaccacccgctaataatctcataaggcccatacaatgaaccaccctctgactatggcattcaacatcttggccaacctcgtaccatgccttttggcttttatatagctagttcatcccacactactccttaaacacattgtcaggagggcacacatgtcactcctcctacatctgtttggccatcaactagaaatattgttatcattgatgctcaatctccccatacgcacactccattgcctaacctaatgactatcatccataccctaattgcccatcctatcattactaccactgaacaactctttacaccccctacccacctcaatatcttcacaacctacaaaccttattgctactactagcacgaacaggtacactgtccctatctctcaagctttctcaattatccttgcggatcttgcatcaacccaacttctccaattcaccattggttcatcatcttcacttactttaactacacccaccattcacatgtttaagccaaaacaaccaaattgtatcaatgaaattgagtttaggaaaattctcaagcatactcagaacttagctcaagctcattacgaggagcacactgatgaggcgggtgtttctttgttgctctggactcatgatgttgatgtaaagctactttcttatattataaggcacttatattgttatgtaaaattccttaactttactggatttatttttactagcttttatggagctcccaatccaatcaataaacctcaatcctggcaacttttacacagactaggtagggtccactattcatctttctccccagcttattatggatgatttcaacgattatctaactttgtccgacaatattagtggagacatgtctcccagcccatcagctcacttccaaaaatttttagataattttacccttcatcctctcctcgccatttgaagcccttatactcggactaataaacaaaggcaataaactcacactcaataacactttgattgtgccatctataatacttcatggaactccttcttcccttaaactcgtctccttcatggagatttctatagttctgaccatcacactcttgtcttgactctccattacaggtacagtcactcgcgcccaaacccttacttcctctttgataagatatgaatatccaaaacgagctttgacaattgtctttgtcaagcttcgacctctggtacatccaccggtgcgcttgacccaatttccaatattagtgccaaactccagcaatgtaccacacatctcatgcaatgaaataacttcccttggtccctctctctcataaaatttagaacattcagtctcaacttaatagtgtgcaaaatatttctcaacccccaaactcttagctggctttatgttggtctcttgaaagttagttactagacccttatacaaagaggaagagtattggtagcaacattcccgtatcaattggctcaagcttggggacaagaatactcgttatttccatcgattagcctcctcccgccaagctactaaccaaatttgctctctcttgctctctgatagaactcttgctactgatacagctttaatcctaactattattgaacaatatttttcctatttgtttacgagtcaaaatcttgaaaacaatattattgataaagttttagcgggaatcacaaagcgtattacataggccaaagttggtagcctccaagcttcatatactacgagagagataaagatagttgcctttcaattagccagtgataaagcacctataattgatagtttaatggagttttctttcaagaaaattgaaatattgtgggtgatgatatcattcgagaaccaaagagtttttgaatgggaataatggtattgccacaataaataccattgttatcattcttattcccaatgggcccacccctagcaagtcactaactactgccctataagtctttattctactcactacaaagtcatctcgagagttatggttaattggctaaagcccatcctatgtcgtataatatcacccacccaaagcacttcctcgcccaaccatctcatatcaaataacatcattattggttaggaggttatccactcccttactcatcgtaagacaaatcgagtaggttcaatggcccttaagcttgatatggtaaaggcttttaacagagcagaatggatttttattcaaaaagtcatggaaaaatttgcctttccaactcgattcataaaccttattatgggttgtgtctctacaacatcattctccttttccattaatcaacatgcactgagatttgttcaacccaccagaggaatccgccaaggtgacctgctctccccatacctatttcttttatcttcagaaggactttcctcactctttaattagaaagctcatcagcgtagcccatataaacatgctcttggtattaagattgctcaatcaactttgattatttcacaccatttctttgctgatgatagtcccccttttagtgttgcttcccttactattgctgctaccatcaaggagatctcgcctaactatagtcttgcttctagccaaatgatcaattgtggaaattagtccctctatttctctcccaacaccaatgctaaaatcaaaaggtaaatcacatcactcatgggcattcctatttgggattcaattgaaaaatacctgggcttatcccaaacctttgggcgatccaagaaggaagctttcaacgaccttaaagacttggtttggccctatctgaacaaatagaactcctctttcttttcaaaagggggcaaagaagttctcttgaagtcggtagttcaagccataccctcttatgttatggcttgttccaagcttcttgtgttcttttctttacaagattgaatctatgatggcttagttttggtgggaagtgtaaatagcgcttagcttaaatttggaaattannagataattagggtttaattatggaaattatttattaattttaaattattaaattatgatgatgtatttaaattcagaatgcattttat

SEQ ID NO: 114155 - DNA, 5927 bp, Cannabis sativa
  modified_base (178)..(178): a, c, t, g, unknown or other
gttctgtaaaattcatttttattttcattttttttattttatttaagtcgggtttaggtccggagtcaaatttgaatcagggtcagaggtcgggttcaacacaagggtcgtgggagaggatttggatccgggtcttgtcgtagtctaaaatattaaagaaaaaaaactgtttaaaaanatattgaaagtaattttttttttgtttttaaaattttgattatcgattaaaaaattaaaaagcaaaaacagttttatagaacatatttttgaaaaatattttcacttttctaattttaaaaacaaaaaactggagcgaataggcatatacattaaggtagcatttagtaatactattttaattagttttttaatttttaaaattaaaactgtaaaaataattttaaaaaacatgttttataaaattattccactttttaattttttaattgaaaatcaaaattaattttaaaaataaaaaaaatcatttaatattttttaaacaattttttttataaatcaatatgttagactttgactagacgcagacccaaattccccccacggccctggcgctaaacctggcctctgaccaggaccggctctgaattaaaatgggctatagcctatagacaaaaaaaaaattgagcccttactataaagataaatggtatttttaaaaaaaaaattaaaaatatgtgtttttttaaagaattttttttatttggacccctaaaatgagtgggctctaggcgctagcctagcctgcctatgcctaaggccagccctgcctctgacccgaacccgaattcaaccccggacctagacccggcttaaataaaattaaaaaatataaatgaaaataaactttacaaaacaaatttttgttttctgttcttaaaattgaaaaacaaaagtagttacagaacacatttttatttttcaaaaacaaaaattttaaaaataaattttttactttcattttgtaattaaaaaattaaaaaacaaaagtgttaccaaataacacttacatttatgtattaatgcatatatattatataattattttatattttaaataatatgtgttatttagccgagtgtaaaagacactgtaataatatgccttatttagcaatttggtttctttttttcattttaattgtcttttaactccttctaacttcttccttcttctttttctcttttaactcctcttccctccttcatctttgtcccttgtaaccccactatccccttctcttctataaatactaagccctgttctcatacccccgtgttctctcaattgccatggaccatctactatctcatatgaactctaccataactctaattggaggctgaaaaggaagttcatatttttctagatcttattccctccgaaaggtcatcttctctagacaatactctttatgatcgtgttctttctggtagagatataaacatcaagacttttagaatcaaaatgggtgattaattaaaaggaaagtatccagacgctataactgataaccgtacgggcctttttaccatttcctttggttgctcaggagataagaggaagcttcttctgttggaaccttggtatttctagaaccaccacatgattttagggacgtcatctgttctgcaaaatgtgtttgtggaatccttgcatttctcccctttttgggtccaactccaccgtgttccctttcttagcaaatcctaaaccttggctatttgggcaagtaatactattggaaagtttcttgatgttcatgaggagtcactaagtgagggctgtggggcttttttttgttttcaagcattgattgatgtgtccaaatcagtattaaggggaaaatggtaaggcttaaagataatcaggatgagttttgattagagtttcgatctgagactactagagtttttgttttgagtgtggtaccattggccgtccttttgataaattgtcatggcttccttgataaaatctataatggtattgaacccactcttcaataaggtccatctatgattggtgctcctcttcctactttgggctatgatcgataaaggactgatttccataaaggaaatgcttggccttttatgacccgattaactaaaaaatcttctactgctgtaattcctagtcttgccacaagacctttaccccatccgcaatcattaacagtctctgaatcatcctctgctcctgttacacaaccactaaattttctactcttcctaaccatgcaaatcaagctatgcctttagtgactaatgtggctggtattattattgaccattttgaaaatattccagagatgccttttcccctttattttctatcccctttggcacttataggcttgatctcctgtagtaattttttccgctactttctctcttgctcctgctactgttacggaatttaactttgcaagtctatcttctttttgttcataacatgttatttctcctgcaactaaagtcactattcctctcgagcaggtgacaccatattggaggagcattagcaatttaagtgtgtcaatcagcttccttggtcgatcaatattcttggtttttgccatggatattttctaaaaacaaagaaagcaaagaaaagaaaagagtgtagaaagagattggggaacaatactagggcgtgtgaagaataaataaaaaattaaattggtcaaatagagaaagagagggtaaacagaataggaaacaaaaaaccaaccgtcctcatcaagcaataactgccccttcaaaaacaaacactttccattttcaaaaaattgattttagtttttcttaataaatgatccgcacaaaaataacacaaaaggaaacaaaagagaaattaaacaatatatttcaaaatatgttgtaaggtccatctttttgatagattatatccaaattgattccagattaatctagtcacgtttgcttatcgtaactagatgtgaatgttcttttggtatccacgtcagtcggtcttaagtctgttatcatctatattgaaaattatgttaagtctcgttagggttgtatgtttataaatagttggttctatttagagatttaactaacttttctaattaaattcttagatagttctagcagtatagagtaacatcgagggttgtagctggcgttgccattttgttttacaggtatgattgaagatcttggaggatttcatccatagcagaaagatcagagcctgattgagctgagttttgacttgagggattttagttccatcttcatcatcatatctgaagggatttcagattgaagaaaagtgttgaagaagagctcttcatgtgcacaaggggatcttgtgtattcaaccaagaatcttggttagtgtgggtaatatttcactggattttgtaaaagattgtattcaataccttattgtgaactggtatttgtaatgtaaatctttgaatatggtggatgttattaccctggtttggggaacccaagcactagtcggttggaatgtgtttccagtgcggatgaagcttgtaaatcagagtcttctttattgattgatcatttacttgtttcttgaatagtaaagttacaattgatagttgattccttaagaaactcggtaatttgaatcaagtaaataggctaaattattctttcattttctatcagagctagaaaattttagataaattttgtgttagatcttatacttgccaggtatttgattcgaaaaaagtcagttgtttctaatttatgatttgtgttttttattttatcgccactaatcctctctgagttacatctcgaagagctatattacggtggtctgtgttttctttgtgttcttctatgcatgatgaaaatgttcagggaaggtggatctacctcgagacctccaatgttggaaggggctaactacccttactagaataccaagatgtgagccttcttaagagcagttgatgaacaggtctagatggccatagaataaggttgaataagtcctaccatgactgagaatgaaatcattaaaccaaaacccatgagcatgtggaccactgataaaatggagagggcaaattttaactcaaagcccttgcatgcactgtttaatgttgtctccacgaaccagttaaaggttattgctaactatgaaattgcaaaagaagcttgggagaagttaaaaataaagaatgaaggaacaaatgctaaaaaaagaaatcaaggctatgagcattggcaaaggtatttgaaaatctatatacatggaggaagatgagacaattgcaaaatttcatgctaagttgtgtaatatttccaatgagtcctatgctctgggaaaaacctactttaactcaaagctagttcaaaaattgcttggagtactaccaagaagattcatgtctaaagtgacctctattgaagaaatgaggaacattgaggaactttatctctatgagctcattggttcactatagaactatgagttgtcactgtctagatggaagaaatcaaagaaacaaaaggatgcggctaaagataaatttgatgcgagcattgctctaattcatcaagaagataagaaactaaccccagaggaaatcaatggtatctctgacaagacagttgatcagttaacaagaaactatacaaaattcttggaaaaagaactacaagaaaaaatttctggttggtaaagaaaatgctcccaagaaaaacaaaggggggaacttcatataatttcaaccacctattgaccaaaagaaccgaggaattaagtgtagagaatgtgacagctttggacacattcaggcagagtgtgcgaacactctcaaaaagaagaaggcccatgctacaacatggagtgacagtgaggaagagaagaactctactgtaagtgaaagtactgataaggaaaaacaggtggtagcattcatggcccaaagtagtcattcagttgagtcttaagatgatggagtccccacttcatcagaaggggacagtgagggtagacataatgcatacaaggagatgtttgcccaatgggaatacaggactaagcaaattaaaggtttgaaaagcgccatggagcaagtggaaactgaaaaaggcaagttagaagatacagttatgaatctcaacatgcttcttgatgagaaggataatgagatatacaaacttattgttgatctggttagaactaaataggctctgaaatttattcctccggccacaactattatcaatcagactctacaacttcaaaaaccctatgtgatcaaatctccattggttacaggatgctatacaaatagggaaattatttgttcgttaaagattaacacacttcaactgtcaatttgaccaaaaaggatggcgagaaactagacatttcttctacagttaacggttcagattcttctttgagtggtcatgttccatctagacgtaccgagttgaagttcgaaggaataagaatagtccctagaactctgtcacaaatttaacaattcattccaatatgtcacttctgcaacaggaagggtcacatttgtcccaagtactataaaatgcagaactacttgaaagttatgattaatcggccaaatagctttcaacaaccaattagaacttaagggcgcaaaactcatcgggaatggagaacaaaattggaccctaaactaaatgttggagtggtggctaaggtgcctctgtctacttttatggagggacagtggtactttgatagtggatgttctcaacacatgacttggaataaaaaattgttggttaactacaaaaaggaaaaggagggtgttgtgacatttggtgatggaaacaagggaaagattgttggaaaaggtgatgtaaacctaaatggtgtggctgttgggttttgtgcc

SEQ ID NO: 114156 - DNA, 2430 bp, Cannabis sativa
  modified_base (2367)..(2368): a, c, t, g, unknown or other
cgtgtataagagtcattattccgtgggtgtaaggacccaatagaagcttgaagcagggacgttacatcacacttctcgtcacaaagaagatgtttcaaattcaaactccccttccacgtgtcgaaaacaaaatattcaatctatgtatattttactcgcattttattaatattattttgctaattatatatttaatataatttagatctaattaatttaatccatactcagtgtttattttaaaataattacaatcaaatttctataaaagtgtgtagattagtttagatcaattattttttctccatctaataatttcaaagtactataaactaattgtgatattttcttaccatataatttataatcttaatttttgtaaaacaagtttaatatttaattgtataaataaaaaaatttaaagtgttacgggcatttaatttgatataaaaaaattaacttattagttcgcaagagaaaaattatacaagtattatataaataacaatttattgtgattaaatatatttttagttacaagataaaaattattatttataattagtcataactttttatttttaatcattagaattttttgtacaatagttttgagttttgaatggttatatatttttctagttattatatatatagtaaccacatgtacaactatatggggtcctagctattagtgcactctctgtctcaaaaaataataataataattattattattataattatacatggttataatattatgttgtaacttttccatatatataatttgaaattggaaagagactccagcaaaagaaattggaaagagacttgtcaaatagtattggccatatcaagtttatcatactccatactttcatatattataactctaaaatcaaaccccttattgtgtgttgttttgtggttcaattcaactattgcaattattattattattatttgtcttttttttctcttctgaatttcataataataaaaacacaccaaaactatcaattccaccccattcttctgaaaattgtcagccaggcccctctctctgcatgaaaatatttcaacaaaaaaacaataaataaataatcaatattttctcttttgtttttgtcatattcaataatattttctctttgccccccaaccctagctacctataaacacaaataaacaaaaaagtactacatctcctctcaataatgccatacctatatatttaggttaattgattatcatctacttactaaattgattgggaggaatcttaattacaaccttttattaaaatcttttagtcaattttcacgtttgaaatcacataccgaaatattttttttcaaattttttttcataatggtattcgttattgttacagtatcatttctgtaaatttttgaaaaattctaaatagtttaaagtaccgaaaacagagtttctgatattccagtttactatgcgtgttcaaaaaacttcaaacgtattttcggcactgtaaactattcgaaatttttcaaaaatatacagggaagatgttgtaagcataacgaacaccctgtaaaaaaaattgaaaaaaaaatattccgacatgtgttttcgagcgtgaggttgactaagaaattgtaacaggaaattgacggtaacactcctcattaactaatactattaattatatatgaataaatttaatcttgtcccctttaattatgtatttttatcttaattttctttgaaagtagttactccaattttaatcactcaaatttttcatattcttttttttttttttaattaacatgatattagagaatcttattttttatttactcttacaattattatatcaataattaagttgatatttttattaattttaatttagaggccaaatttattacatcaaactttgattaaaaaaaatgcattaaacaaaagttgaattcatgataggggtcctcccttctagggaaattgatagtttataaataataattaattttttaataaatttataaagagtcatattatggatatatatttatatatatgggaccatcaccatgcaatgtatatatatctatgagaactcataatgcagatttatttggttgtcgggcaaatccaccatattcatcatcatgtgctaaaaaatttagtactcaattctaacttaagatagtagtacatgcatgagacaaaatatatgtatatatatatacgtacctatataattgtttattttatgtatatatataatatagattagagcattgatatagtaccaattagtcactttaaaaaaatttacttttcagcacaacaaaacttgtgactaaaagtgaaaaaatnntgactaattataaattatgattctatgttgtgactaaaaagttcgtggctaaaagtattagt

SEQ ID NO: 114157 - DNA, 3526 bp, Cannabis sativa
  modified_base (2745)..(2752): a, c, t, g, unknown or other
ctctctctctctctctcatgttttaactatgttggctctcatcttcaacgagttgtgtgactttatcagagattcaacgatcttattgagattccatgcttttcaatcgaaagatcctaaactgagtttttatcaaaataaaatttaatgatagtctgatctaaaagtgttatgacaaaactgtttacatttctatattagttcgtgttaggcattgtcttcaagttggttataataaaaaaaatctgtcaaagattaagctcagggtcctattaccattttgaaaaatacaaggtccattttatcatttaacaaaataaagagtccatttagtaacttttgtaaaccataaggtccaaaaatagtatttacgctactttttatttattttaattttattacataaaataaaaaatataacgacaatttagtcatttaaaatgtcttacaaaataactatcatatattatagtttaatttaaaagaacaatttagctaatttaaatattccgattacgtttccaaataaagtgaacaagattaattactatcattccatttctgaaaagaattagttaacaacatattacaaatattgattataattattcttcataatctattatatttttctattagtttattccaattccgaatactgcacagtaaacatgctattagtgataactttttagtcacaccataaaaattttatgactaaattaatgtgatttttagtcacaacaaaaaattacttgtgactaacacataatatatttatatatataagttgttactaatttagttttaatcacaacaagtattgtgattaaaaataaatttagtcacaatttattgtaatttttgtgactaatacatttagccacaaactttttaatgataacataagaataataatttataattagttataacttttttaattttaattaaaatttttattttgattaaaagtaagattttatttttgtgagttaagaaccacttatatattattagttaataaagtgacaaaatacacataaagtcttgaaagtcctgtgaatcgaccatataccatgaatgtgtagatatcaatggtggcctaactagaatatacttagtcaaacttaattaaggtggtgtgtagatattattactttaatttgtttcctaattaaattttatcatcactatatttggatatttttggtaaacttataccaaatgttttttttttttttttaacaaatactaaaatatttgttaatatcaatcttagttattttaaaatgtactcatattatattattttatctaataaaatatttagattaatttattaagtgtgataaattattaattttgttaaattataaaattacaaaatgtgtagataatcattaaaattagaagttgcaaatcctttaattgatcacatgaatatataactctttcatctcatttatcactttattagtaaaaaatattatatactaattgtgtttgaatatgaaaatgaatgatagctattgataatataactgttagagatttgatttcaacatttataaattgttcaaaatcaattggaaataatttgaaacactttgaaattttttttaccaaatctgaaaaagttggtaaagcattgagagcaattctaatagcttaattctttttttttttggtaattctaatagcttaattaaataacctcaaaaacgcccaattaataccacgaaagtctattttatgaacacccacttttgacttaattctaggtaaatatttgttgacccattttcatgaaaatcctaaatatcatttaattaattgtaactaattaaatcatatttatcttaattttttttttttgaaaattatctgtattaaaattttagttctttatattttaaatgtactacttttgttatcatacattatattatataatttaatttaaataataataatataatttaaatatttaatttggaaaaatcattaaaaaaaacctaataacaatataagtggagtgaattaaaccataaaaaaaattataatctactattcaaaatataaatatatatttttttcatcaacaaaatataagtagtgtaagaaaaatgcatagtatacttcttaaaaagaactgatctggaacaactctaatttattttggtatttaggagagtttttttaatctttttattataattatttcataattttgtatattgtatttatttaggactactataaatattaaaaaaaaaaaatcaaaataatatacaatgcaaaaaataagattcaaactaagggtttggcatctaatcaaacttttttttcctcattcaatccaatccaatatattaataattggatttaaaaaattatcatccgatccaatccaattagacctcaaaatctaatctaatcaaatccaattactaattggcttggatcggttttttaattgaatatccaattacacacctaaattttaatattaacttaaaaatatgaagaaaaatatcacattttatttaagtttaatacttcataaacatactatcgttataagtgtaatgtagtcaaaatttttaaataattgaaacaacaaaatttctaagtaagaaaatagaacaaaatattttaaaaataaatacacaaaacaaccaaatgttacaaattcaacacaaaaaaaatataattactatatattatattttttaatatttnnnnnnnnataaataattttttaatatatatataaatataattgaattggatcgatttttaattagattttgagattgacatccaataaccgattcaatctaattagaatctaacttttagcttctaatccaatccaattgtaattagatatccaactttttgtaattggattacattaaatcagttcagttcaattggaatagattggatgatgctcacccctagttcaaacaatatatttcttatttcaatgtacaaggaaaaataatcacacatatattaattaaaatatttaaattttatgccgactgccctttgtgtaactctggtactgaaactattcaacatgcattggtggaatgctcgtttgcaaaggctacttgacatcgcagcatagtggacgttggggctggggctgtaacgttcaacaactggttgttgggaattttcaccagggggcacggaattggaatggaggaagcggtgatggtgtgttgggctatttggcgtgcgcagaatgactttgtttggtaaaagaagagttggcttccttcaaatattgtaacatcagctagaaacatgcttgatcaatacaaatttgctcaggaaaggaagggcctttcgttgtctcctttgaatgatggggacggaactgtgagcgttggattgcacccgtgttaaacaagattaaagttaatgttgatggtgctttatttgaacaataggggcggtttggagtgggctgtgtagctcgagatcattattgtaacgtccccgcttc

SEQ ID NO: 114158 - DNA, 5714 bp, Cannabis sativa
  modified_base (4954)..(4966): a, c, t, g, unknown or other
gggcataaaacccaacatttccattgttgtttggaaatattttcttattttcttgttatcattcatgtttttttgtttagttttaggagtgggaatgcaaattccctgtttctaatcattacaagtcaagtgatttttatttatgttgttgcatttttgttgttgatgtgttcattattgtttaactattttaatttgtattttattacacagtgactgtggtgcttttgttgctgcatttgctgatttctttatacatggaacagatgttccactagattttgatatcaaagttatcgcacaaggcttgttgtgctttctttcacatatggtaaaaggaaaatttatgaaaatattgatagtgagaatgagaagtctaagacttggttattttaatgctagatcttaagacttggttattgatgttatggttctattgttattttttctttttgtttatgaactggatatcagatttctatctttgtttgagacaacgtattatttttggattataatgcttatgcttttgtgcatgtttctcgtttatgtcgatatatcaaatatttgattcagctgtgggataatttttattcaacatgtttaattattatatctatgaaagtaatgggagaaatcacttgaattttttgaatcaaagtgttaggtgtaacaccgactatacaactatcatcgaacggcttaggtacaattgaataactaatatatagtcaatgtaataagaaaagttttttaaaattctaactaatgtttcgaatatagtgttgttaatgctttacgattttgatgatatgttggatatggtattcaactacaaaacaattattatgcatctttttgaaaaccaataatgtattaaatgtaatagcaatatattaaagtaacatttcttcttgtaaaagttcacaaaaaaaaaataaataatttaaattaattttacaaaaaaaaattaaataatttaaattaattttctcaatagctaattgcttgattatgacatgtcttccggttgtgacctttttggtcacatttgctgcacctattctgttttttgtttcccatgcacctaaaaattttcttctccttagtatttcaattgtatttgagtgttttcgtagttgcattcaagtaattgtgtcagcttgtgtattagttcattatatttacaatcaattgagatgagtttcccactagtttcgtaattttcttaattgattccttcatcaaactgtccattgcaaaatatgaggaatggaattgcgtctttttcctaatagtataggagtttgagtattgtaagccaacttcaagacaactgtgatgaaactgtaatgcaacagttatgtttgttgcgagccaactaacataaaaccacaaaacaacaaataatttcacatatttaatacaaacgaatattacaacaatcttgtttaatctgttcaggtcacatatttgacaatttcgagatctatttttataatactatgatattgtagtagtaaaactattattcaactaacatgcaacttaattgcaactagaaatgttaaatgtgaatgtttatctataagaaaccatttgtctgtatttttttttttgtcattgatcgataattaattgtacattaatagtaatatgtggagaaacaacttagacctctataaaccaactttataacaactaatttagtatattaataaaattaaacatattataatttttttaaagagctttatattgtattgacgatatgaaacacttgcaaatctgataaaatctaatgtatcgttatcagtttgtaataattgatatgtcaagtttcagagagttagcaaaatattatgcaactgttatgaaacataaaaaaccagaatagtgtttccacgtatgtgactctatcttcatgtgaatttactattgttttcgtgatttaatatgaacaaattcactattagaaatttggaaaataacgaaaatacatcgagataaacatttaactatagtattggtacaatttttttttggactatacctgagttggattgtttggaacttcagttcaactttttgatatctgcatttcatggatctaaaaattaaagtcaggacattagtttttatgcgaaataaactagatttatggttgaattttagttttgtagtagtttttctgtacttttttttttcatgaatttgaaaaagccccatattttgattgatctcgattgtcttctcaggttaagtcgctagaattaattgtggttctcttctagttgggtttcgtttcagttgtgttgggttgctgggttggtcgatcgaaggttgcgtgcatgagattatctatttcgttctgtgcaattaaagtagtagaaaaagtggtattttcgtaatatttagtttatgggttgtattaatgttcataggaccagccataagtattgttgtaatttaattatcttttttgtatatacatgaacaaatccctaaataattttaccctctcctcactgaatatatagctaagtctatgtttatgttagattaaaggagagttttatttgcccccccaaattttatagctgtatcccattttaataattcctattttacataaaaatatatatccgtttttttgatcaagaaaaaaaggatcttcattcatcaactctacaagatacaaccaaatgaacttctccaaagagaagcaacaagaagaacaagctaataattacaagtcaatctttgaagtaaatttttctccactcttgttcctttcctatcttttatcaggtaaagcctatacttcacatcataaggaaaataaacatttgtttcgattcctccaaatatgataaaccgtggcagccaacacgatcactctaactctgtctaaaagcctcgatctcgtgctacacagccacttgttccaaccatcaaactttttggtccatccttcaaaacccagccatggaaagattgcatttaccacctggtttgacagttagcagcagagaaaaaggtgattgtggatctcggtttcaacctcacacaccacacaattcatgttagccacatgaatattgaaccggcctaacatgtccctagtaagaagccttgagtgagcagtttgctaaagctgaaatgcatgtttcggtacatttaaattgcaccaaattgcagcagcagcgggatcaacattttgttgcagcgaggtgttgtaaagtttcaccactttaaacactccaccacgaccagcagcggtcaagtcaacctgttcaaaaatatctcgcaaacgacaaagcttcctccaataccaacttgaatccttcttcaaggtataagattaaaaatctctccctttaagatagaccaaattgatccacttgacccacgacaagtctatcttattcattaaatcccaaataaatctagcaagagaagctttattctatttcttaccatctttaaacccaagacccccataagctttaagaagacaaaccctctcccaactcgtcaaatggaatctagtgcgattctcctttaatccccaaaaaaaatcccagcataatttctcaatctctttaatcacactttgggggtaaaaggaagattctcatccgataattccttaaaccaatcaaggtagattgaattaattggattcggccaacataagataagtgtttattggcccaagaatgaagcctacttttcaatttttttcaagatagagccacaatcctcaagcctccaattagtaggtctaagcgggatccctgaatatttgagagggaactcaccaacaggcaaattgatcttctaggctatagttctcagatcagttactccaacaaaataaatttaaaatttcccaaaattaatggacagacccgaagtcgtgctaaactcatttaataccttctggatagcaagaatagactcctcattccctttgcaaaaaattactaagtcatttgcgaagcaaaggttagtaagtttcagctttttgcaaaaggtatgatacctgaatagcttctctctagccgcctattggattttttgagacaaatattccataaacaagcacaaaaaggagaggggagatgggatccccttgtcttagaccctgctcgccttttaaagagccctaaacacgaacattcatgagcaaagagtaagtggtatttcttacacaattcaaatccaactaacgaatttggcaggaaaagaataggccaccaagagcttttcaaggaaatccaaattgaccgtatcataagctttactgatgtcaatctttatagtgcatcttggagagcagttcttccttctatatttattcaaaatgtcttgaagaatgaaaatgttgtaggctatagaacgacccttaacaaaagccccttggttctgattcactatgtttgagagaacattagccaatcgataacaaatgagcttagagatacacttataaagagttgtacaacaagtaatgggccggtagtcaaccactttggagggacaatttatcttttggaataagtgtaacgccctaatctatagggacgccacatgtaagatttcattaactagtttaatacaaatagattaattaattgttaaaaactgtgagaatataaaaatacttgacttaaataaaacactaaaatcgaatattataacgacctaaaaagcatccctgttataaaaagttttacaaaagaactatatacgacgatgccttaaaaacattaaaccaaaatacacaatagatacagcccaaaacaactcctggcaacccaacacgcaggtcggtgagatcaatatgtacattgttggagaagactatcacctcaaggttgatctagcttttctttgtcttgatctgcaccacatagcaccagtaagtcacaaagactcagcaagaaannnnnnnnnnnnnatcatatagtttattatttgaatactgtcatttatacacaatcagaatcaaaccaccacgaattgttcataagatgaaatctaaatcactactggcatctgccacgaataaacatcagtatacaaatatttgataatacaaaaccattataccaataatagaattcatattcatttaatcatataaattatatatatatatatatgtattacctcataaagtaaccatcttcattacatcacgtcgcctaatcaagcaagtcgatactttaatctgataatcatgtattgcattgcttaatcaggcaagcttgtcccatagcctgacaccatatatcacataactgcatcacctaattaggtgagctcgtgccaaaaacatgcacccatatatcttataattggatcacctaatcgggtgagcccgtgccacaatctggtaccaatatatcacatcgtctaatcaaatgagcctatacctacgtccggtacttatcatatgtcaatgacgcccgtacttacgcccagtatatcgccaggaaaatcgcatcacctaatcaggtgagcccattgctatgctcggtactcatcatatatcattgacacccatacttacgcctagtacatcgtcagaaaatcgcatcacctaatcaagtgagcccgtaactacgctcggtactcatcatatatcactgacgtccgtacttacgccaagtacgtcgccagaaaattatatcacctaatcaggt

SEQ ID NO: 114159 - DNA, 2710 bp, Cannabis sativa
actaaaaatttgccacgtgtacaggtgtgtacacgtgaacagtccactgtggcacttaactgtgatttttggacgtagttgtacagagaaaaacggaaccagagttaggtagtttagccgtcaaaaattcagtttttgtggttaagtgttacaaaccgtaaaattcatgtggtttagccgccaatatcccttatagatatactgaatactaaaatgctatatatttataaatatgattgatatatcgtaataatatttatacatatacctattaataaaaaatatatacttgcagaaacaaaaagaaataagccaaaaaaggcattaccaggaaagcttttagaatttttataggatgagttcaagcttttagatatattagaagtcatgatgttctatcttttcctagtagaatatgctctagcccatttctcataaccatcttgacgaattctcagtttgatggactccatttggcgcatataaaactcaaaatcactctttgtataagctcttgagcaattatcaaaaagcacatcatgaccagtgaacttcaatgcagatttaagattgtttaacaaatgataggcacataaaccatgtgctgcatccgcgtacactgtagatattgcatttgcgatgctcatatgtctatctgaaataatgaccaagttctcccgagtcccaaatgcacttcttaacttttggaaaaaccataaccaagaagcattatactctgactctccaatacaaaaaccaattgagaatatatggttattggcatccataacacaagccataaaacagtgttcctccataatttgtagttaaaaatgtctcatcagatataactagtctataatatttccattcttcaattgatgatccaaatgccatgaacaaatacatgaaataaatcctacttccaactatccagctaatatgaactccatattctctcaacatatgagccataattttcttaggacgtgttgaaacatcatctcttaataagtcaattacacaagaactaattagtctgctactagcttgctgatgatcgtttaacacaatatcaattggacaagaatggtccttgacatatttttccccaccatccaaaaatctccattaccgtacttagaagctctcatgtaccattcacaagaggagaccatgcattttacaaccaatctactttggctagatttaacagtcacatactgaaattttttcttaattgagatcaaacctaaagttgtgtttaactgttctttattttcaaagatgtctttgacttttagatcttctattccagtcggatctacaaatgcacagtctacatttttaatatttggagaattgttcatgtttgtacttagaacaaccgaactactactgctctcttcattactagatgatgatcctaccacaaaatttgtgtcatactttgaaggagaacttagagcaactagacgactactgccccaaccacaagaacagtctgtcgagtttgcttcaatgtttattccaacattttaagataaatctaattccattgtagaagattaattcaaaacaagacgtacattattggaatgagatctgtgaactagttccaccatcggacgctcctcaaaagtcacaatgagtgggtacttgatttccttgttagaattggccatatgtaggtacctactcatacctctatcaccaacaacctctaaaatattatttccattctctccaatattcatatctacaaacatcctaatgtagtggccattacaatccaacttttggggcaactctttatacaatagctctaagacatcaagaaaagttgtatcatcatctagtaacatggctgtcaacatgtagcccatgatttttttgtttccaatatccatcatacaatattgttacaggaaccttccccatagctgaaaaaagttataagaaacaaagaacagtataaaaattcaaatatcgacatgtgaatactaaagtttgatgtaaatatatatatatttatatatatataccaacaaatatatgattgaagactaaaatatgttgctacatgatattctaatctgttcaaccaaatgtatatcaagttcacttttggatatatcctatttagtgctatattttagacttttcaaccaaatgtgaaatatgattggaaaataatttctaatattgtggtatattattttttagatcaatgatatatctagaattgcatcagtttcacatagaataaagatttaacattatggtatatcatttttcagaacattcacatatcagttttacttttagtaatatgaggtttggtattcaactctattcatatgacagtatattactttgagagtagggtatattgtttctatgtgaggtagtatattgcttaaatagtgtgctatattgttttttatgtgcggtggtatataaagaatggaagacaaagatatttattgtatgttttgcatctttgataatttaacagtgtggtatataattttttagaacaatgatatacttagttttgtatcacatcaatgtggtatattgtttctaataatgtgatatattattgtttttatgtggtgtattgtttctaataatgtggtatattattgtttttatgtggtatattgtttctaataatgtggtatattattgtaatgaccgctctagt

SEQ ID NO: 114160 - DNA, 1371 bp, Cannabis sativa
taatttagtagtaattaatccaattccctgtggttcaacctcacttgcgtgagtttaatacttgattgcgtgcacttgcatattatttaataattttcataacataaatatgcattcacaaaccaattttaaaataacatagtctctaaatattaaaatcacaattgaacattaaacatattatactgtgataaaacataaaataaagcattataatcagcttcatgagaaattattactaaaaatgaacagaaaataaaacattaaaatcagtgtccataaaaatttaatacataatttctttcgacctgctccttgcttaatttgtatctttatttttctagcagtataaactttctcaccaagcattggatgattagaatcaaagtctatttcaatacatgttatgtttatattttgagccattgacacgtggatattagtctaaaaaattaaggggaattataaataaaaaggttaatatatctcgggttgtgctacaatcaatgaagtattgtcttgcattgtattatatgatggctatcaaataaaagtaataaaattatacatacggtgactagcaaaaataatagtatcatgagttaatctcaaaacttaaccaagatgaacgaggcttgcataaaacattaaagtatgagttagatggaaggggtggataatgagttctttaaaagcttgcaactcattgacctacatactcatgtgtatactgaaagactaagggccatgatctagagagaatctacctcatcatcttccatcaaatgtgagaaaaccaatcaagagaaacctgctttagaccgcttcctaatataggatttttgtttttgggaccgtctcaatgtaaatgggtcagactttgcattgggacatgaactagacacactacagagatatttgaggtattagaatcagattcagagaaagttcattccaagttgacaatttatttatctgggtaacttctaagtattagatcgacaatctgactttcgcatcttcttcgccttatcaaaaatgaagaaataggtacttcggggaagaaacaacacttcctgggtgccagaagaaaggcccagtgcccaggttgacatgtggggctggcccaacgtccaagttgacattttttcaacttgggccatttaaaatggagttttgcaagaaaaattctaagcatcttcttcatttttagaaaatattaagattcaactatttttggagaccaaacagaatttccaaagggccagagctgagacctagtgtaaagaccgcttagctttaatttgggaattagcagataattagggctttattatgaaaattatttattaatattgaattaattattta

SEQ ID NO: 114161 - DNA, 8483 bp, Cannabis sativa
  modified_base (1967)..(1972): a, c, t, g, unknown or other
attggattggatttaaactcttatgcggatcggattggatccaaaatatgaaatccgcacttagtgcggattggatgttgtttgagcaaaaaagtgcggattggatcggatgaacacccctagataggattgtagtttctatgtgagacgttggcacatttgactattcactatttaagttcacttttctaatatgagttttcaaaagaaaatagtttgtaatttttttgaagaactttttattttactcttaatattttgtatataaaatagtcatatgagtagttataaacatagtattccttacaccgagtataaagactatgtcttgagttcatatcccctgcaatatgatataataatatcataaagacagtgacaagaattatattaaaaaaataaataaatgaattcatacatatattaattaaattcttaggatacatatatatttaaaaatatttatgccaatgcatagaactaaggaacatacatgatacattcatatgaaatgagcataattgaaataaaagagagaaaaaacaaaagaaaaattccttatatatatatctatgttttaatatttgaatgtgtgattttcaagaagtttggaaacagtagaaccttgtcttttagtctttcggcttttttatattatataaaatcaaattagaaataacatatttttaaacctaaaatctcaataatattatataactcatttattattaaagcatatctaaatatctaatagagatacaaataaatgatataaagttataatatagttcatttagtaacatttatgtttgtgtcaaaaagtaatgtaaatttagtgtatattaaattttgtgttaaatttgacaaaatatttattataatgtaaaatttgcatcaccataaatgtataattttattatttatttttatatgcttttaatattttattagtatatttagttatactattaattattattgttatggggcattagtagtgttcaacaccttctataagtggcgttctaaaagttattttattaagttatatggaacctaatacttaattacactaataacaatatgacaccgaagaaaatgctaagtatcaataatactttttagcaatgctcttatttaaattatttttttattgtcttacattataaaataataataaaattaatgataaaactataacctttttatacttttaataagaatattaaattttgcattaaagttttataattatgcactaaagcataatgttaaaaattaatgcaaatatattataattttgagcattcttttagagtgaccaacaccaaataagttgacattttatgaatgagcgattagtagttttttcatattatttaataaaataaatatgttatacatgatattaagttgtacttataagtcattcaggaaaaaatgtactcataatgatattccttgtagtttttgaaaaagaattagtagaatgcaataaaagtctattctatgacaatttgtgctcttttagcaattttctatcaaaatcggcaatgaattaattgtgatttttgtcgtgttaatatttgagttgtttatctagttgatataggagagtcttggatgatattttcgtttcaaaaaaaatataaaaaaaaaaacacttgtcaataactaatcttcaaaagaaagtataaggtgcttttacaatgaactatcttaaaaaagatgcattgatagctaatgcactatttacttgtttccatattcaaaataattttttagttcaatttaattttatatttgtgactagttatttaagatattttataaaattttaagaaattcggtataatttacaatatggaaatcagtgttcaatttcacacgcgtataaaattaaatagttacgcatacaacacactgtttgaattatatttttaatatgttaaatttttttgaatttnnnnnnattttacaagatatcttaaataattttaacgtatataactacgataaaaaaattaactaaaaaattattttaaatactaaattcctttaaagtgtttattttaaaattttccaaaagtttataatctttatgaagatcattaaaataattattgggattttgaaagtacaaacaaaaagaaattataataaccactctttttcctttattaatttaaatgtgagtataagtattagaataaagaaacaaacaataagaagttgccatagtgtgagttgtcacactcacaatcaaactcatttcacggtagaaataaaacagtaaaataggcaaaagtaggtatgtcatggccctataattagactcagtcctctttggttggaaactcaaaataaagcaaagcaaaagttttattatgccattactatttataaacacacctctatccatcagaaacacacattcctatgctaataatacacaacacataataataataataatagatatatattttcccttattttgaacaaatatatggcaaaaataaaaaaacacacataaacaggtgctattctcaatgctcaacatctattctaataaattatttgtttatgtttcttaatactaggcctcttcttgcctaactaggtgtgttcactatatgtatattatatatgccaactcataacgaaacaacagctgcaaattgcagagggtagctgcaaatgcatggctattttggcaaattgggataagatcaaagtcttgcattatagaaaaagttattctcatgtcttgttttaaaatactttctaacttttctttctttttcaatgacaattatagtagtggttttgagtgaattgtgtgacgattgaaagactctaagattgagaaatttggttgtatttattcagctttagcctcttccgaccggtccattgacggtggtgtcgttttcataaccctctattatccttattggaagaagcaaaaactaaggtaaaaattataccttacttttttcaccaaacaaaccaaacacaacttattatttatattaacattcacttaacaaaatttaacatattacattacaaaacatagtcaaatattactacgtacacacacatggctattcaaaacctagctagacaaaaaaagacaaataagacttcataataactatggtcttttttcgtttttgtttttttttcttaacacaccaacaaacaaaacaagaaccgaatccgtttttcaatgcaagaaaacggaatactgggtgggggctattatttttgtaattagacgaaaaagacttccatggctgcctccttgttagtttcacaaactggacaagaaacaagagaggtttcgcaagacttgcaagaacaaaggtgtctgcaagggaagaaaagaacacataagctctgtgttttgcagctgtgacaaacaaatttctggtcatttttataaagtactgatccctcgcaacatgatccggtatcttcgaccaggttatggttgttgttgttgttaacgttcaaagctttgtttctgcctttgaaataagcgagtgtgtttctgaggtccacaactgtagagtcagttcctatagccactctttcccatgtttggttttcaatctctacattcttcaactcatcatgaagctcctctgatttgattctaactcgaaccatgtcttcttccttttgcctaatcaagctcatcatctttgactcgaaactactcatcagaacagataattgttgcttactttgttcatgcaacaccaaccttaacttctcactctaaagtaaatacaaaagaaatatatatcagtataattaaaaaagaagaagaaagaaactctaatatatatatataaatatatatataaatgatcatgtagttacttacttgtgattgaagaatgaagtcaagctcctgtttatgcaactccagctgagcatccatagccatttgaaaaacaatatcagaagaagatgatgacgatgaagaggcatataccccataataattattattattagtattactatcaaaaacgcctgcagtggtgtagttttggggttgaaactgaagtggtggtggtggtggtggtggtagtggtagtggttgttgtagttgttgttgaaaggtttgaaggccataagagaagtcattatgaagatgatgattatgatgatcatcctcaatcacgagagtaggaggaggaggaggaagaagatgaagaggttgaggagggttgattgaccaataatcttggacaccacaaataaaaggtgcaggtgatgacaaacccatattattaccagaaggaaagtaatccataatatattttatgagaagaacgataataataataatgatgaaaaagatggtcactatttttattcttatatatcaaacgaattaatatttgggtaggtttaaagctataagattcatgttgttgtttacacaagaaaagatgcatgacccacctctctcttttctctttcttttctttctttctttcactcactcttaatttgttggcttggcttggtatattgtaataataagagcatttgggttatactgccctttctaactgaagaaattgaaaaaggttttctttgtgaaagaaacccgtgtggggaggagtcgtatatatagcggagctagctaggaattacaaaaaaaaactactgacaattggacgtgattaattactatatggtatgggatatatttatcctattacggggattaaaaagtaaatgcgaatttggttgttttttttttaggattttattaaattattatatgtgtatatttgagtgagtggtcagaacttagtacaactttttttaaccagcagaagcattaatgagagaaggtgtaacaaaggttggggaaaacgacggcgtacacatgcagattttgtgacaaagaagtcacacaaatatagagagagagaaagagagagagagagagagagtaattcactcaattcagacgtgaaagggtgagatttttagacgttatagggggatgggatggaaagataattgaatgactagcaaaaccaaatttcttttttcttttttatttgttttagaaaaaacaaaataataatactaattaaaattaatgaatttttttgcttatcatagatgttatatttgttattatataagcaaagtgacatcagagaaggaacacattttgccaagtggcattttcaagctgttgtggtagatatcttttcatgaagggatatgtaaaaagaacacttttatgatgctttcttttagttaggtaatttattaatatgaaaacttattataacatggtagggaaagaaaagaaaaagattgatttcttttttcttgggttaatgagagaggtgttttaaaagcctgcaacgcagtttatagcagagcattgacacatgagaagaaatttggcgaggctaaaccatgtattaagatttcattatgaaatttggctctctctctctctctctttcttgtctttcattgtattaacaccatagaaagaggggagcttccgaagcttgaaaatcgggtcaaacagtatgtgcatcatgcaatcagattttacttgggggagtaggtgagccttttagtaatagagaaagaaagagagaaaggatggtgatgagaaagagaaagtataatgtcagatagggggccatgtcatatttggttaaagtggataatcagtttgtactttctgggtactacatatatgacatgtttattgattatgtgggatattgttttggcatatcaaaagattcaatagcacagtagcccgtagccatgagaactagcctgtgtaattgagctaaactgccaaagtgtcattatatctctttttgactctctagtctctctctcaacatctcatgttgttaaatattatataaatgtgaaaaatgaagatattcacttctcaatgctcgaggacagtcactgtgagatgtgagaaaaaaaaaactagctaaagaataacatcacctcatgtataattgactgacatttgatcatttattcagatacagagctggttttgaatctgtatggggctaggctactactaataaacatcaccaaaacgctttgctgagtgattactaatttactactgccaaatcaattaataattatcagcaaagtcatcatccaaaccagtataatttatataagtttcaatttcttttctttattattagtaaagtagattgtaaagtaattcattaataaaacagtagtagcattatgcctgaatcttagaagactttcccactgcactttccatgcgactgtaccattcttcaatccgggtattgtccaccatgtctcttccagattgaaggggcctgataggcctcagaaccccaaaaacagatatatcagctaaatttggatttgaatcacctgaaagaaagtaaatttttgcattattagaagcacttattagaggagccaaagacactcaaatcttttacagtgatttcaaccaactctaaagcaatgactacttgtattctaatgtgtaggttaggcaagaaaaaaaaaacatatagaatcttttttaattttagtaggcattataagttgatgcatacatattttgctgatttcttataattaaaaagataataaactagagagccatggctcccctccttagctcagtcagtcctatcaagtatagtccaatattcagtagaccttaccatgaaattgtcttcctttgagagcatccacccatgtttctacagcttcatataaggctgcacgctcatcggtgatgttatgcctcttcttcagtttcttagagacaaaatacatagctgcagctcctccatattttgctactatcctttcagaaaaactaaaattgcctgcatgcacaagcaaccaattttaaagtaagtgagcagataactttatctatacaactggtttcaccaaaattttatcatgcaaggtgcgccgaaggtccaatttatctggggacgttagctgtgctgaggtctagaagactaccaaaaattctaatataaacttacaaaaatattctggatttagctggtataccatgagtagtgatgtaatcaaacgactcaattgcctcagaaacagttcgatatatgtttggtgataaaacatgcaccaaatggttatccacccacctatatcacaacaaatattgcattttcagtgttctagtatgatgaaattaaacataaaacatgagcttggaagatggtcagatgacgcaaaagagccatcatacctgcaccaaatcttttcttcttctctgtccagggtgtcgctctcaggattgatccttttatacagagtatcaattatatctgcgaagaaaaaaaaaaactagactttgagcaatttgcacactaaagatgggacacaagaaactgatatataaatcagagtaacatccttagccctttgccaaatgaattttgatttggattctccattagattgaaataccaaacgatacacaaaaactcaatacatatgtcataaaccacatagttggcaatgaatgacttcgttctcacagatatgacagagaactaacctgaagaatcaaccatctgttcaccatcaactttcaaaataggaacctttttgtaatcagaccactttatctcttttttgttcatggggttaacctccacaattttgtatggcaaatcgtaataatccaaaaaagctacagtgaatgaaaaagaaaatcaactaaacattaatagagcttaatcacatctaacaaatagtacaatgtaaataatcaagctcataattcacagaaaacattcaaaacagtggcacagctgcacaattaaaaaaaaaaatacaaatatatatatgatcttttttttttattttacctttcaccttattgcagaaagggcaggcttcatattgatagagcacaacgtttttaggttgaaaattatcggagctcggagactccttggcatgagtgtttcgagccaatgatgctacattagagaaacacgtggtcccagaaaaggggctcgattgcccaatgatgccatcggataaccttccggagcaccaaaacgtcccgaaacgcggcgagcatgagctgagagttcctggttgaagaagttgaagttgagtggcgcctaatccggcagaaatggctcgactgattagtgaaactccgttaagccttctgatcatgatcgaaaaaacttgaatacgatttagggttttaaaggggttttaagacagtttggagttttgggtcacctactactcacacacgcctcttcttcttcattcttctacttgtctacttcataggatacacgtttcaccccaaacaaccatacttttacttattattattattattattattattattattatttataaagaaatcaattcagggtcctatttgt

SEQ ID NO: 114162 - DNA, 5448 bp, Cannabis sativa
  modified_base (1009)..(1010): a, c, t, g, unknown or other
  modified_base (5399)..(5402): a, c, t, g, unknown or other
gtcaaagttcgggggaaaaaaatcctaattagccttaataatatgtggaccactaaaaatttatcatgtatacgtgggctatccactatgacacttaacaaagatttttggatggaaatgtaaagagcaaaatagaatgtgagtttggtaagttttaccgtcaaaaaatgagtttgtggggttaagtgttataaagcgtaaaatttaggtagttttaccataaatatctctatatatactaggttaatattacgtgcaatgcacgtatgcttagttatatttttaatttttatatgggttatgtatatttttagttgtataattatttttttcttttatgttttcaataaacaacattatttttttattaaaaaatatttaatttaaataatatttacaaaaaaaaaaaaacataataatattcaaaatttgttgttaattataattttagtttaaccccaatacttttaattttataatactttttattttttaaaaagtatcatatactttttctagttttaaaaagaaaaaaataatagaaagataatttttggtaactacaatatgtaactgcgtcacaatagtaattttttaagaatcataaacgctttttctatctttattgtgtaaaaagaaaacaataatagaaaaatattttcttatggattgggtaaaaaaaattataataaaaagatattttgttagatatgtgcaatgagtttaaatttgaattataatgttaaaaaaatactttatgtgatatagatacatttaatataagacaaaaggaaagagagatgtaatgatttaattttgaattataaaatttttaaataaaaaaacaacaatttatactatatagccacatttaatataactaggtattaatgacatgcaatgcatatttgcttagagttactattacctaattattaatttaaataataataaaattaaatataatacaattcaattatatttttttaatatataaaatttaatctanntttaaatttatttataaaaaaaatatatctaaataattttattaaacaataaaataagtaaataagtttagatattttaaataatataactaacaaattttttataaaatataactaattaattaaattaatgtctaatttaatttaaattaagatttatataagaaaatatgtctaatgtttctgatattttttaaatttaaatatttaaaactaattttttttaagaaaataataatttattaattgattaaggtgttaattttaaccgttaactttaacgtaaaaattaaaaagaaaatcattaaactaataatttttgttagataaccataattttggacatcaacttaggctaataaaaaatgggagaaaagtctttggcatagtatcattctagttctagtatatataaataaataaagtgaaagctaaaaataataaaataaataaataagtaaataaaatagaagcctagcaattattatttaaaaaaggaaaacatagaagcctaggttattgttacgtgcattgcacgtatatttagttatattttttgtttttatttttattatatgtatttttaaaattttataaactaaaagaaactaattaatttttttaattttgttttttttttaaatatttatagttttaaaaatttgagaaaaataaatataaaatttgagaatattaagattaaacatactgcctaatattaaaataacaataaaaaataataagattacagataatatattaatatttatatatgtatatttaaattaacttaaaattgtataaattcaattaacttaaaacaaataatattcatatttatatatatatatttatataaatttaaaataaataatattaatatttataaaactaaacttactaacaccgttaaatttaacggaatattcttatattcttaaaatattccgttaaaccaacaaaaatcgcgaggaacaagttcaagttcgttaatggcaagctccctgctcctaaagaagacgatgacgaatttgaactgtggaatcgatgcatcagcactgtcatttcctggattctccatgttgtgtcgaatgagatagttgaaaacatcatgtatatggataatgccactacgatctggtccactcttgttaaagattaaacctgaaaaatgctcctcgtatttttgaagctattcaaaccaaacaatcccttgtccaaggttctcacaacataaccacgtatttcactcgactcaaatctctgtgggatttgattcaagaatataggccacaacctgtttgtacttgtggtgccatgaaaataattcaaaattatcgaaatgaagattgagtgcttgagcttttggttggactcaatgaattgtacaatggagctagatctcggatcttgatgcaagatttcattcctaatatcaagaaaacttatgatgcagtcatacaagaagagagttaaaggtgtctatctaatgcttccactaaaggtgataaatctgaatttggatcaaaccagggtcagtttactggagctgtgcaaccacatcgatccaatttagtctgaactcattgtgggattactggccacaccatatctaggtgtttttgtatacatgattatcctcatggacataaacttcatgggaaatttcctaatagaaatgccaatgctccaggaaataatcatggtcataagcctagtgctcctaatgctgctagtgaatcagcaggaaatgttggcaaaagtaatgaagttatttttattaatcaagacctagtttctagtctctcatctatgcagtgtcaaaacttaatggcattgttgtcttaaaggattccagaaatgccactttcccccactgaacctcctatggtctctcaattgtctgggaagattttaaaattgcctaagtctacttggatcattgacataggtgccacacaccatgtttgtcatgacatttctttatttcaagataagtttttttatcctaatctcactactgctaaattaccaaatggagctaatgccaaaaaattttgcttaggcaccatacatatcttaccaaacctagttctttataatgtcctttatgtacaagattttcattgcagcctattatctgtgagtgcattgactaattcaagtgtttattctttcagtttcctaactaaatactgcatcattcaagactatttgaagaaacaggtgattgggatgggtgaaaagattggaagacttcactatttgaagtctatagctgaaacacaaaatgactagaaaccttttgctttttctgctttttctaattctaagatttctgatgatactatatggcattatagatttggccattcctcatgtatcaaaacacatcctttgaataaaactttgaaatttcatgtcaacacttctcatgatttttattgctctatttgtcattatggtaaacaaaaaaggctttcttttatttccaactataacatgtctatttttacgtatggggccctttcaacactcttattctcgatggctgcaagtatttcatcactatagttgatgatcattataggtttacttgggttcattttatcaaaactaaagcagaggcacaaactgttatttctcagtttatattgtttgtccaaactcagtttgatgtccaaatcaaggggttcacgtctgaaaatgccaaagaactctaattccctactctttttagctatctttgcattatgcactatcactcttgtgtgcaaagacctgaatagaattctgtagttgaaaggaaacactaacatttgctaaatgttgctcgagcattgctttttcagtcccatatccctctaaaatattgagatgaatgtatagccactgatacctatctcatcaataggacccctactccaaatctcaaatacaaaactccttttgaaaagcttaaaactaagccccctgtgtatgaccatttaagagtctttggttgtctaacctatgcatctactgtcccacatgccagatccaagtttattcctagagtggccccttgtgtgttcctatgctatcctcctaggatgaaagcctacaaactacttatctcaacaccaacatggtgttttattctagggatgtccaatttcatgagacaatttttccatttgtaacttctgaaactttacccctcactatgatcactttttctcccatcctgttttgcctactaatgtccctgttgaaccttccccaacctcatccaatagtagacctactagacacatcacaaaacccttttattaaatgattagcattgtttcctatccattaaaaatgtttttgtttcatctcaggacataatgtctgtcactgcacactctctacactaggtgcttgattactcaaaactctcaccaaaattttgagcctttgttttggccatttcaagtttgacagagccaacttgttttgatcaagcacatgacatccctgaatgggataatgctatgtctacaaagattattgatttagaagcaaatgaaacttggatcattattagtcttccccctggccaacatgtcattggttgtaggtggatttacaatatcaaatttaatgctgatgggtcagtggaaaggtttaaggctaggttggtggcaaagggatataaccaacaagaagggattaatttttctagtacattttcccctgtcacaaagcttgttacagtcaagctttttcttgctcttgttgttgtgtatggctagcatttacatcaagttgatgtaaacaattcctttcttcatggggatcttcatgaagatgtttttatgactctacctcctaagtatagtcctaaaggggagaccaaactaccaccaaatgcagtgtgtaaactcaaaagtctctatatggattaaggcaggcttctagatagtggtttgaaaaattctccactactcttattaaagaagggttctgccatttagcaacaaatcattccttgttcatgaaattcacttctgcaagtttcatcattctactggtttatgtagatgatgttataattgtaagcaacaatattggtgatttggaagcactcaaaatcagactaaacaataggtttaaattaaaggatttaggtaatctaaagtatttctaggacttgaagtttctaggtccaataaaggaattttcatttcacaaaggccttatgcacttcagcttcttgaagagcttggataccttggatctaaacctgttagcacacccatggaagtgaatctgaaactgtcacaagaagctcaagatgaaaaggatgattttgcagatcctacatgttggaaattattttaccagatctagatttactaacannnntgttggattaacaacctaatataaattctaaaacaatgaaaataaa

SEQ ID NO: 114163 - DNA, 2261 bp, Cannabis sativa
catactagaacatttccaatccactagcagaaacaagagaagggaaactgaagttgtggaacaaagcaagccacctatttcagatgatagttattgtatcaagactgctacatcagaagcatttctagatgattgctcagatgagatggtcattggaccaggttgggaacataaagtgaacagtttattgcaaaagcatttcggtaatttttcgttaaaaaaatttcagaaagaagcattggctgcatggctagctaatgaagactgccttgttcttgctgcaacaggatctggtaacagttgttaatgtatatgcactctttcttgtgttgggtgagtttcaggtctttatactcaattattagtttgcagggaaatctttgtgttttcagattccagcattattgactgggaaggttgtggttgtaatatcaccattgataagcttgatgcatgatcagtgcttaaaactagcaaaacatggcgtctctgcttgctttcttggctctggccagcctgatagttctgttgaaactaaagctatgagaggcgtgtatagcatagtgtatatctgccctgagacagttttaaggtatgtataagagtagtgctatttcttgtgtcatttaggtgcatacaagtttgtatttacttttaaaattttaaatctgctgtgctacagactgatcaaaccacttcagacattagcagaaaatcgtgggattgctttatttgctatagatgaagtacattgtgtttctaagtggggtcatgattttcggccagactacaggtctgtcaatttccactttaattctttacccctgtaccacaatatttattagatttgcatttccacagtgacttttgctttgaatgaattaaaaaattgacatttttcaagacccattcttgtgtttgtacttcaaatatctgaatgtaagtattataaatttcaggagattgtctgtcctgcgagagaagttcagtgcaagcaacttaaagttcctaaaattcagtataccgctgatggcattaactgctactgccacaatacaggttcgagaagacattctcaagtcattgtccatgacaaaagaaacaaagattgtccttacctcgttttttcgaccaaacctgaggttttcagtgagttccctctcacggcattatccatccttcatttcagtagtttaatttctagagggctccagagctttaaatttttaccaggatatgttactttatggtaggataaattcagtcatttcttttgggctgttaaacattttaacttttctcataatctttgtcagtaacattcatgctgttgctgttttacaggtaaagcatagtagaacctcttcaccattatcttatgagaaagatttccatgagttgattgacctatatgcgagaaagggaaaacctggagaaaagaaacaaatgatattcccacaagaatttagtggttcatttgttagcatattggaggcagattccatttctgacaatgatttaactgatgttgaggatggttattctgatagagatgatgaaacaaattcaacagagcataatagtgcaaagggaaaagaaatgtcaattaagtacctggaaaatgaggtggatgttttccagagtgtggatgattgggatggtattcaaattcatattctttattattttgtttctattgaaattattttcttcaaatttgctctaccctgcatatttatacacacatacattatattacacacacacacatatcttatatgcatccgttttgatacttcaagttccactgctgcagttgcatgtggtgagttttccgcagaagctcctcatgtagactgtgatctcaatggtgtatctgagtccggggataccccaaatagagtggacaaaagagatcaacttcttaaagagaatgtagaacaaggaccaactatcatatatgttcccactaggaaagataccctgaaaattgccaagtatctatgtggatatggtgtgaaggctgctgcctataatgcaggggtatgtctttgatatattttgtaatatgttctttttatacatatgtttctaaagcacttccttaaatttctatttataaaagatgcgaagataaacaaaaataccaattgaaagtttttgattcatcaattattataattatagaaggcggtcctaacaaaaatagagtaacataggtaagaaatcaattcatcatttgtgacatctatccatttcga

SEQ ID NO: 114164 - DNA, 5892 bp, Cannabis sativa
  modified_base (2191)..(2204): a, c, t, g, unknown or other
  modified_base (5024)..(5028): a, c, t, g, unknown or other
attatatataatatatgttcggtcggttctcggtttaatcggtcggtttgccattgacactaaaaccgactatgttaaggcggttttaaccaaaggcgatttttcggtgtcagttttgttttttcggtgttcggacgatcggtgtattcagtttggtcagtttttttagattttttgctcacccctaattccaaatcccatcactatagtgatctgagtagtattatctctcggtatcaatacaactaaaagggagtaggtcattatccgctaactaagggggctgaacctctataaaatcctatgttcatttactttattgttcttattgtgtaacacgtggcaagcatcagcattaaatacgactttgctgtcgaacggccaaatctgaggtcaacagtttacttctttcattgagagtgagttgatattttatctgatcaaatgtcatggttagcacgaggagaacttcgactataacctctgcctcatcaggtctccctcaagaccctatgatgccagatcctgatgttcatgttccagccacgaatggaatttccacgaacgctccagatgtagtcaatcctaccatcttggcagacaccacaaatctggccactacagctggccaggtcgacacaaacatctcagtggatttgaacaatcggcctttgcctctcagggaagaccctccactggtgccgtccactaaaggaaggccccacgtggagcagcccccaggaacaacaactggacctcatccccagtactatgctggggaaacagggccatgaatggttgaacctactattagcgagccccatgtagacttgggagaagatctcgagttagcaagactttgagaggccgtctgccaagtcggccaaattgaagaaccatgcgctgttgattgcgatttattcattcaatagagatgcgaattcctgagatggatgcatgaccaaaagtacatcctctaatctcaccaggcagagctagactgccgcaatagagaggctagcgacctgataaggcagttcaatgaaagaactactgggagaggccaagatctcatcagagatccactccaacgaagactagtcaacagatcggggagggtctaccaacaaactgtccaatcaggttcttcaggaaccaggacaaaccttcccctacttgaaggaggacaagccatgccatgaaggtctaatggcgagaacagttagatcccaagggtcagttagggatctcaggctcaataactccccccattgaccaacccttttactggccagccctctagtggtacacctctggacgactaggaaattgaactcataaataaagagaaaacaagaaagttatagtggttcagtcagagctcggttggcttagtgcattgcaatgattttagcttggtttatttgaattggatcactcctttatatagaaagcaagtgtcccttaagattacataactgatcgattaagaatcgtattcacaataaattatagtatttaatcaaaagaaatcttaaagaataaatgaagaacaatttaatccgttcttgtattaaattcagcaacgtatgcgacttgataagtcgagtttggcatgttcatattccaacacacgagttcacaggctctatcgcgtttgtacttgcaaggtggcctgaaggcctattttttgaatgtttaccttcatctttgatcacatagttagacattctatgtgttgagaatgtggaacatgtaagtccctggcgagtcgtcgaacacactagtcaatcggaccaaaatctatgtaaataaatgatttttactagtcgcaggagaggtctgcttggtcatcgcatataatcggtataagtgcgactagtattaactcctcttggtcttgcttattcttttgactatgcgaggtatagcatgcaactagaccttgtctcgatcgtatcctctcgcaagtttatgtcaagcgagattagctttatgggagctatctactaacacgtcatccttctatcaagaactgggtctacatgttagcttcatacgagactgtactcgtatttctaagcaaaaacttcacactataacataaactttgttataaaaatattttagacatatattggaatgaattattgatttatatattctcacatattataataataataataannnnnnnnnnnnnnataataataataataaaaagtgaaaaaaaggttttatagttttccttagtgtgggaaaaccgtggctatcacaaactaaaagagaaaaaacatttttaataggctttacttgaaatttttttaaaggaaattacattgtatacccactttactttatttgttttaatgtttatctttatttccatattctttaaactgtactcacttttatagatgatgtttccattataccccttaggttaatgtaaattatgttttagatttaagtagagggtgaaggtatattgggcaacccactcacaaaaataagtacattttattaaaatataatataaaagtatttttgattaataaatataaaaaagaagtatttcttaacttatcctaattttcttagtttgttataaattcacacgtggagtactatttcttttctcatcctcacccaaactgtggtccataatataattttggtagccttgttcactcattttatgtttattgtgaagctaaaggtaggtgctaagttccatccatccatccattctatataagagtggcaaaacgtgtcatcgtatcgtgttcgtatcatatttaatatgattcgcttttatatttcgtgtccggcatgtcgacctattttttgactcgtgtctaattttctcagctctaacccgacccgtaaaaaattgtgtcgtgttcgtgttgatctattgtgacccgtttttctattattgaaactggaactgtagagaaaaataataaatttaaattccattagaaaacttatatatgtgtaaataattagttatatataataaaaattaaaaattttaaaatatttttagtttcacgttaaagaaaattacatttaaatttttttaacttaacattgaattactaaatatatatttttatataattatattattattaataatttttattttactatattttaaaaaaaaatcatatcaaacacgtcaaattcgtattaagcggatcgtattgtgtttgacccatttttatttcgtgtcaagtcgtgtcaaaactcattttaccacccctaattccatatgtttgtgaaagggttgccagttgccacttgtacacgtaacatgctaacccctaggccctatctatctttgcagccagtataggccctggtcttagcttttgctaattaaacctaatttttttttttgacgtaatctaattaattattctaatcaaataagagaataataccgtatttggagtcaagagcaatctatatttatatagaaagaggattgttattgggtaccaatggtgcttaatagtttctaaacgtgtcgtcttgtaattgattaactatattttttaaaaattattacattaaactataaaaaatctgatacttagttagactaatagtgatattaacacatagaaatgtactaacaccactgatactttttagcaattttcgaatttatcagcaattaaaattaaagggaaatccggcttaaaagaaaggggaaattaagtttactagctcaaaactataaccgttttttttgggtcttatgttacacctcctatcatttgagggatttgacacctgaaataagacaaaatttatgaattgtaatattgtatcaataagttattatacactttcattttagttccaatgagcggttgtttgtatgactgtgtttagatagatatgtaaaaataatgttttacaaatgctacctactcagtatatgtaatattttttaaattaatttttcttcttgggagggcaagattgtaaaagtatgttactatgtttactgatatgtatcaacatgtattttttattaaggcaattgtatgaagctacttgtctctaagaacttctttaatattttgaaagatttttataatttaaagagaattgtaagtaaatgactttatttctaattctactgatagttaatgtttattttttaaaataataaagcaaatgtctttttttgctttttaatatttaaaatacctttcattatataaaaagtattattatatgttttattcctttaaaagaaattatgaaaaacgatatgtatatatttgacacatttaagtattagaatatctattataaaagtttaaaaattcacatgaaatattaaatacaagttattatcattatagtaatcatatcctaattcttcttctttctcttcaagagacctccttattggttgtcctcttttttcttgcttttttgtacccttgttcttaagtatatcctcttcatttcttttttctgtaaaaaaaataaaaaaatgagatgaagaaataaatttagtttattgaagaaaaatatcttagacctaaacatatttagaaaatgttagatataagaaacaaatttatacctattttttaacagccacattttcttgtgattgttgttttttagaaattgatggttgttgtcctttagaatttaatatttgttcataaaaaaagaatcagtgagtttgttaaatatttgtatataactttatatttcattaattaataatgaaagtaacataaaatatatataaacggtagcatacaaaattcatgtaccacaaatctaaacatatataccatagtgaaaaattaatatatgatcaattttctatggtaacaaaagaatataccttagcatagaataaatataccacggatttaaaatgatataccgccattgattattttttctcatttcttaatattccttattagacaataaatatataccatagtgcaacataaatataccaaacttaaatcatnnnnnactttttgatctaaatattcatttttatacctgcattttaacattttcatgtactttttgttgatccacaattattgtttgttcctaacaaacaaaacaattgtagtaatttttaatatttaataaaattaaattgttggtatatacgacatcccataaaaacgatataccttagaacaatatgaatatactccaaacttaatctaatattatattaagagtttatttttaatttcttgttagttaatatatcttaacacataataaatatatactatagtgcaaaacaaatataccaagaaggaatcataatatacaaaaattatctaaatgttcttttttatacctgcattttaatattttcctgtgatttttgttcctccacaaaatttttgtttgttcctaacaaacaatgccattatagtaattttgatatgtaataaaaataaattgtttgtatataacatacctcattgaaaaaatatacatctgagctatatatatactaaaatcttaatctacttttatagtaagtagcatgagtttatactttattccttatttcttaatatatcctatcagagaataaatatataccatattgcaaaataaaaataccaaaatcttaatctattattatagtagcaagagtttattttttattacaaattccttaatatatcctaacacagaataaatatatactatagtgtaaaataaatatacaaaaaacttaaattataatatacacaaataatttaaatgttcctttttataccattcagaaaataaaataaaaaaatttggattgtatattaattttgttgtatagcatacatgtatttttaatcaaagaataccaat

SEQ ID NO: 114165 - DNA, 6588 bp, Cannabis sativa
taaaaaatagctgacttaatatttgaatattctgatatcccccctcaagagggacggtatatgtcatggacgaacatcttggaaatgtgagaagatagtgtggtagaaggcagcggtttggtgaaggcatcagcaagttgaagagtgttgttgactggtatgagccgaatagcagaacacttgattttgtcacgaataaagtggcaatcaagttctatatgtttggcgcgttcatggaatgttgggttgttggcgatgtgaatagcagagcgattatcacaatatataaaggctggaccatgttgtggaatttggagatcttgaaggaggtattggagccaagtaagctcgctgcccgtggcagcaagggcgcggtattctgcttcagcagaactttttgagattgtaggtttctttttggtgcgccatgatatgagacaatctcctaaaaagacacaaaaatcggtggttgatcttcttgtagtggggcaagaggcccaatcaaaatctgaaaaagcccgcagattcaatgtggaggtaggtgtgtataggaggccttgtcccggactgcctttaaggtatcggatgaggtggtggacagcttgaaggtgaggagtgcgaggcttagccatgaattgacttagattattgacggcataggtgatgtcgggtcttgataaagttaagtagagtaatcttccaattaattgacgatatggagaaggatcatctagaggttcaccttgttcatcatcaagtcgtaatcttggatccataggagtttttgtgggtttgctgttgatgtatccagtatcttcaagaagttgaatagtatatttcctttgagataaaaagagtccttcggttgatcgagctatctcaaaaccaaggaaatatttcagggggccgagagctttgaggctgaatttattattgagagacccttgtagttggtgtaggagagagagactaggtccagtgataataatgtcatcgacgtaaacaagtagagcagtgaagtcatcatgagagcctttagtaaagagagtataatctgcttttgattgctgaaagccatcttcgattagagcatatgaaagtttgcgatatcattgtcttgacgattgtttaagaccatatattgatttgtgcaacttgcaaacaagagtggtgttggatggatgggcagtagtaggcagaataagtccttgggggagtgtcatgtatacttcttcttggaggtctccattaagaaaagcattgttgatgtccagttgaagaataggccattgtttgattgttgaaatagccaaaagcaatttaaaggtgaccatttttgcaactggagaaaaagtgtcaaaaaaatcaagtccttcttgttgagtatatccttgtgcaacgagacgtgccttacatctttctactgaaccatcgctattgaatttaatcttgtatacccaacgacaaccaatagcgcgtttgtttggaggtaagggaaccacagtccatgtcttgtttttgatgagggcaaagagctcagtttgcatagcttgattccatattttgatgtgaacagcttgtttgtatgaagtaggctcaaatagatctgtaatggcaagtataaaagctttgtgagaagcagaaagtttgtgataggataaaaatttatcaagagagtgaggagtagaagatctgtcatgaatgacagaatgacactcgtaatcatggagatattcaggcggtttggaaactctgctagagcgtctcacggtgttggttggacttgtgtgactgtgaacaacatcagctacatcaagagcagtgtctgctgcaccagaagccgtggttgttggactgcaatcaacagcagcaggtgtgaaagggagagagtctggtacaccagaagggatattgttgctgatgtgagttgtagaagacaattctggtgcatttttgttgatatcagcaggtgcattttcctgtctgaattcgtttgtagcagaggtgtttgaacctgttatgggaaaatcttgaacaggagttagagaaatattagatgaaggtaataccatattagaaaagggatcaatcacgatcatgtcattatttaatttttgaaaaggatatacatttatatggaaaacaacatttctagagacaaaaatttggttagaatttatgtcatataatttatatcctttaattccttgaggataacctatgaaaacacaagttttagctcttggttcaaacttggttctatgagcactaagggtagaagcaaacacaagacaaccaaaatttctcaaagcattataatcaggttttttgttgaaaattaattcatatggagtcttgtttccaagattaggtgttggagttcggttgatgaggaacacagaggtcatcaagcaatctgtccaaaaacgaataggcactttagattgaaaatagagggcacgagcaacatttaaaagatgttgatgctttctttccaccacaacattttattcaggtgtttctacacaagtaaaatcatgcattataccatattttaggaaaagatctttaaacaccaattccggagcattatcggatctaaattttttgacaacacaattgaattgagtttgaacataagatagaaattgtggaataatattagtaacatcagatttttgttcgagtaaatatatcaaagtaaaacgggtatggtcatcaacaagagtaagaaaatatttataattggaataagaaggaatatggtaaggaccccaaatgtcacaatgtatcaaatcaaatttattagcagagaaattgttattattgggaaagggcaatttcttttgcttagctaaaggacaaatataacaaggtttgttcttatgcaagaaatcgaaattacaattcaaaacattgctaagtaaagacaagcaatttttagagggatctcctagccttgagtgccatatgtcagcagggatagtgcaaacataggcatctttaggtgtaggctccaacatgtatagaccattcttgatcctacccttgccaatcattttcttgttgagcttttcctgaacataaaagtcattagtatcaaaagtaatggaaacaaaattgtcataagcaaggcaactgacagagattatattgaacttaaatgtaggaacataaagaacattattaagagttatagaatcatcaatcttgacagtaccactatgactaacaacaagaacatcattgttgggcaatattaaattggtagctatcacaggacatatgcattggaataattttgcattgttgcaaatatgccttgtagcacccgaatcgagtatccaggattgttcacaaaccgaggcattattataagttaaaatcatacctgaattacctgttgaggtactcggatcaggtgatgtgatgttggtttgttgacttgcaaggaggttgaggagctgctgatactgggcaaaatttcattgagggagaagagcattgttgtcttcgattttgttcttgttttcgctgctggtttgcacttgattagcagcagcctccttttgtttatttttgttaaaacctggtggatatccatgtattttgtaacatctttcaatggtgtgaccaaggatgttacaatgggtgcaaaaaggcctgttccttttgggaggatggttcttagttccctgattttctggtttgttggcattagttttattgttctgaaaagcgaaagccatgctcgggttggggtctgcagcaccgttaccaccatttctttgattttcttcttgtgtaacaaggtgaaaactcggttaactttaggaagagggtccatgagaagaatgctaccacggacttgcgaaaagtggtcagataatcccatgagaaatgagatgacatactccatatgatggtgttcttgcaatctttttacaccactacaggtacaacaattgcaggtacaagcaggactgtaattagatagttcttccttaatggtcttaagcttagtaaagtacatactaatgctttgattttcttgtctcagattcatgagacttttcctcaagttgtatatatgaggtctatttctttgatgaaatcagacctttaaatctgcccaaatggctgtcgcggactcatcgtaaagaatgctggaagaaatatccttagaaaccgaatttagaatccatgatatcacaatattattattcctaatccaagcattataaagaatgtaatcggaaggaaggggtttaggaatactaccatcaagaaagcccaatttgttcttgactgagatagagagatgcatagctctactccaagagatgtaattatcttggccagttagtaattgagatacaagaacattacctgggttatctccatggtgaaggtaataaggatttgtaggatcttcaagagggttctttacgcttccaatttgcagactggggttggtttgaacggtgggatttgtgttgcagagggagttgaatccccaatttcagttcgagaaggagactgatcttcgcttgacatcgtgaagaatcaacagagaaggatagcaaaccgttagattgtgttgcgccgagagaggagaactcagggaagaagaacagcaacaatggtgtcgctggagatgtgagcacggtgagtgacagcagaaagattggatcgatcaagggaaagcattcttcacctgctctgataccataatgcgaatagagaaaatgaaattgaaagttgtatattgattgaatgaataatcgagtacagagcaaacaacccttatataggcaacactctaaacagaacaaacagaacaactacaaactagtaaataaaactaaccgactctgtcacaagagatacaaacacaaagatcctgactaacataggatcctaactgaaagagcctaaaaaatagctgacttaatatttaaatattctgatagaggcaaacaaaatagataacactagaaacaataaatacaaaaaataagaaagattctttgttcaattttctcaaagtgatttaactctcacactcttatccaagaatcttcttcatctacaaaagattcttcatacaaaacccaaacacaatctctctcttttctcaatacctctttctctgcctctcaatctctatctctctctaaatctcaatctcaatctgaatcatgtgtttttctttttctcaaatgcttaagtgggtggtatttatagccataggatcaagatcttaaagttggtggctgcaataaacgaagttattaagttagttagacaataactaatttaaaaaactctcttatgagtgagatctccacgtcagcataagtcttagtgcatctgggaacatacacgagcttcctagatcacagaccaaaggtacttgttaaagaagcttccaaacagggcaaaactagctaaagtcgactatccgaactgccttccagggagaataaccttccaggaagaataactatctatctgaaactcctttctagaagggggctagctatcctaaagactgaacccggagtggacatgatagtcattcgggaactcccttccggactcaactatcatttcacaagacttctattgggatggacaagttagctattcggaacaacattcgggagacacctaactttccaaaaacaactttttgagacctttttatttggaggaactataccacaaattccacctagttacttcaaattaaaagaattatgatgataaataaaaatgcagtcatcatggttggtgttctaggaatcttagtgtactaacttctgagattgatgaagttcaagcaatgcttgaatttgtttactataaagaccttagttccaaccatcagtaggattatcttatgttctgaccttttctaaatcaacgaacccttgctctatcttctctcaaatctagtagtcttagatctatatgcttgcttttttcatgataatttggttcttacaaagatagatggacgattggctatccaaaaacacagtcactccccctttgatttgttttaactcataaagaacccctcaaagccataaggcttccttgaatgcttacgtagtcaccataaattttacttacgtggtggaaagagcaacctcaaactgtaactgggcattctagtttatacagtttttgttcgtcaagaaaacgtaggaagtggttgattttttggtatctctattcgaagcttaactttcgtccacaaatcctttcaattctaattctcctttagatttttcataggtcataccataatcccaactgcccttcaaatatctcaataaccatttaagaatcttctaatgttcaatggtcgaattggacatgaactaacttatgatgtttagagcgtgagctatatccagtcaggggtggagccacatacacccctataggggctgtggcccccctgaatttttaaaattttgcactacttaatatatatataatcatatataatcatatataaaaagatattaatacataatttttcatgtatgaaagaactaaaaaattagtatttac

SEQ ID NO: 114166 - DNA, 2119 bp, Cannabis sativa
  modified_base (29)..(30): a, c, t, g, unknown or other
tcatagtgctatttccatgtgtaggtaanngcaaggctaaagctgaggagccgtgagagtgaggaggtgaagattgtacatgtcggggcgattaagcctggatcgtacgatctttgcgacaccagagctttcgttgttttgtcgttaggcgacaaacttttgcttatgtatagttaaacctttgtaaatggttttgtaaataggatccggggatttaatatgtaagttattttaagtttttaattaaataagcaaattttaattaatcacgattttcgataacctcgttgattagcatcgagttgcacagtaagttaaaaatcacactaacatgcctaagttagttagggtgttacatggtgagaatgataagactgatttttcaatattcaatttctatctggaagcacggcagtagcaatccaaagagtttttgatggttgtggctgatcgtgaattggcacggcatggaaccaagctatcatccgcaaaaaataaatgagaaatcgatggagcgcctcttaaaacctttaaaccatgaagattaccccttgtttcatccgcttgaaatagtctagaaagaccttcggcacatatgatgaatagatatggcaaaaggggatccccttgtcgaatcccacagcttggaataacctttcctttgacaatgccattgatcaagaaggaataggaaacactagtaatgcagcgtagaatgagatccaccacagaagcatcaaaccccattgctaacatcatactttgtaaaaagtaccattcgactctatcgaatgccttactcatgtcgagcttcatggtagcataaccttccttacctttctttaagtgctttagagaatgtaacagttcgaaaacaattaacacattatctgttatgagccgagaagatagaaatgcactttgggagtcagagatggctataccaagatatggtttcaaccaaagaacaattgatttagaaaccaatttgtacagcacgttactcaagctaattggcctcaattgagtcattgagtttggctttttaaccttaggaatcaaggtaatcactgtttggttgaagcttgaaggatctcccccatcatttagtactttgagaaccgttttggtaactagatcaccaacaatatgccaataatttgagtaaaacataacctacataccgtcaagacctggactaccatacgatttcatggatgaaagtgcatcaaagacatctgcagctgtgtatggtcgagtgagagcatggttattttgaggagatattgtacacagaactgaggagacgacttggtgaattgcttgtatgtccatgccatatgatgtgaaaatattgttaaaatagctttgtaccacattagcaataccatctggtgtggactgctctattctgaggagatacttttaatgctctatgatccgaaccaaagaagtccaaatgagtgatagtaggtgtgttgaaagggttgtcccacgatctattaacaaatccataatccaaacgctcttttacattagcaccatttttgtttttgttatgccaagtgaatctttctctaatataattcagttcatgtaagccacaacgatcaatggtatttctaaaggcatcaacttgagcttcgaggcgcaaaggtccaccaagtttatctttatgagacataatctcattgaaatcacccaaaacaatccaagggagtaaaggagcagtgtcgcttaattttttcaagagctgccaagtgacatgtctttgagaaacattaggagcaccatagaatccaataaaatgtgttgtagggccatcaacaagagacaagtagcaatcaataaagtttataccataattaaggatagttacatttacattagctttccaaagaaataaaagacccccactaagacctactctaggaacttcaagaccattagggaaattaaaagcatttttcaatttagtaatagatcctgtaatgaccgttatttttagacatgggatgagtgggacacttaacactaattaatatgactatgtgattatttatatgttttattctttatagaccctattttcataaaaatatgtgttatgattattatt

SEQ ID NO: 114167 - DNA, 2245 bp, Cannabis sativa
  modified_base (39)..(39): a, c, t, g, unknown or other
tcgccttgcgattggctagcgatactccctaaaagctantatattaaactatatgggacccgatactaaattagaccaatagcgatattgacacgtaggaggagggtgcttgacgctactagcgccttttaatatttctcttttaaaatagagcattgttattgaccattagtgtctaacacctatcgcgctttgcgattggctaataatattttgtaaaaattattatattaaactatataaaattcaatatttaattaaactaataataatattaacatattagaagatactaaagaataatatgtccttttaaatttctctttaaaataatactaatcaatgtactatttacactaattaaaatataaaacatataattatatatgtatataagttttattgggagatacaagttcccatcgaaatggatgttatgtgtaattatataatttataaaaaagaactcattaaacttatcgaaaatgtctcccaccacagctgtcatcacatagttagcttcttaagataaaaatacattttatatataagaaaaatgattaaagttgtcaaacactaccaaatagatagtgtaattaaatatattctaaaaaaaaaaaagagtaaatggtagtgtaattaaatagtatatctcatttatattttaatttagtaattgttaaattattttagtaatttatatatattaaaacactttttaatttatcgtaaatattttataagaataaaatattatttttttttgtatttaattgtgttttgatgactgctatttcataaaagagaagtatttcttttaagaaaaatttaattaaacgagttattttcgaaattttttttttttttattttgctaattattttttttggtttcactcagattgtataatctttatatggcaagtattaaagttcgaatcgtgatcttagacttatttagaaaaaaatttgatttgtcattatagagcgtaattctgtcgctaaaaataaaggtttgttttaggattttcgtacagttgtgactatctctagaattttaatatgatataaataggacctagagagcaacaaaacgttctcatctcttctagtcatataattttatattttttatctttgtaagaaaggagtttgttttgtaaaaacttagtgtgttctactaagttttagttttagttttattgttcttaaagtatagggtgaagagcgctttgctgaagagaagagtctataggacaagaattgtccaagacttacttcgggaggaagtaaacactcacacatcaaaagttgaaagagttcgctgtttggtggtagtggtgttcaaaaatcagattaattggcaaagtaaattacaaaggattgcaaaaaatcgttagagtgagtctaaatttgtttaagtcaattatgttttgaatattttactaattgatttaattatctgatcgtgatcttgtaaactaatagtatttaataataccgataccacgtattattttcttgtgtcaagatttaaattctgcacaatttatttatgtttccattttgttacaacaagtctgtgttatgcactaataacaagttttcaatctgttattgcacgtcattacaatcacattttaattataatttttaaacaaataaattagtataagcaaaataagatttttcaataattattattaactatttataagaccttattacctaatagtataataatacttgttatgtaataaatatttctaatagacataattagtgcttaattaacatcactataagagcattgtgataatctatggccaaaatataatttattttggcgtgttaaaagttgatctaaatttatcgtacataaaaagaaattgatccaaatttaaatcataaaaatgacatataatacaatacaatttacatcataataaatgtaaatgtattgcttttatatattttgttttctatttaatattttattattaaattattaattactgtattaaattacaaattttatatttatttatttttattattttatataataaaattaatgataaaattattattatttatgtatttaataaaaaatattaattaaacattaaattgttcatcaagtttagcaattatctattagagcatacaatcatgaacgaacacacttatagacttgtgggggctatatccagtaaaaaaaaaaggatttttttatttttacactt

SEQ ID NO: 114168 - DNA, 4377 bp, Cannabis sativa
agcttgaaggaaatcatcgttttacttctaaatacttatagaagttatagattctatatttatgtttagttgtaataccctaagattaaggaatcggattagaaaaactctaactagttaaataagtgataatgtagaattatattattatataatttaatatatggaattatattgatagatgtcattttaagaccctgttgatgagtcaggagtatttttgtaattttgacccgagaaggataaaatcgtaattttaatgatatatcgtgcttgaggactatattattatataatatttttgttctgtctatctataggttttttttaataagtcagcgcggtatagttacaatcgggtattttgggccgaaccgggttcggggtccaaaatatattttcaggatttaattcttgcattatttgataagtataaaaatatgaaaatattgtgatatatttgtgtgtttggaatgtctaaattgcccttgagtttattgaaatgcttattttgattatgggagtattttggtcattttgaccacttaggcattattcaataaaaaaaaaaatttgagaaattgataatcaattttctgattctttcacagccctagctgacccctctttcttcccctttctttctttcttgaattttgattaattcttggaattaaagcttgaattggtgtggaattggtgtaagtttgagcttgaagcttttggatttgtggtaaatgtctaatctttcctttgttgtgtttaatttctgatatctaaagcttgaagaacttgttcttggtgttcatatgagttttggatgcatgttgatgattgtgaggtgttatatggtgattttggtgcttttgagcttttgagattgtaaggattgcatctagactatttttgtaagactttagagtttaaattgtgatttgatttctgggttttaagcttgaaatgtttgggtcctccttggaaggtttgaagctttgaagttcaagcttgattttggtgttattgtgtaatttgtgttttgtgttatgatgtatttgaattggtaaaattgaaattatattttgtggttctaatgcctgaaaaatatcttgctttggcatggtttttgcttatgtatgtcttaggtgaaattatagttgtgtttgggtatttttaggctttaaaatgggatttttgggtattctgaacccagtcgccgcggtgggattattggacgccacgactaggtttggcagtgggaatgcatgtctttctcgattttgttttggccataacttttgactcgggactccattttggatgttctttatatcgttggaaagctcgttttgagctctatatgttaatctgtaaatggaattttaattatgtgattattgaaagtgaattttgagattaaccttatttgtgaaattccaggaatgtgtgactaggactaccgacgcttgctcaggaactccatttatgaccttgtttgttgtattgcaacttcatgttttatctttcagatttatgaccttgtttgttgtacaacttcaaacatattgtcgtttataggtttcacctgcacatttgagtacgataaaaattattttctattactaaaactagaaagtaacagtaagacaactatagggaaacccagtgtcccatgaaaacatatattttatgtcaatgaatccacaaagttatttattaacttcttctcagcaataggtgtcaaagttgtggttattttttgtgcttttcttctgtttgtgtatgtctattgttgtatcgatgctcacgagatctctattagtgtagtgattggtagttctctagctgctaagtttgctgagttgggagattcaacaatgttagaagtcatagttatatacatgtatttgtagtggtaccttgaccatttttggtatccaaattcttgtcaatagagtctaacactcttgtctaagttgtcaagctcgctcatatggtattcaaacttcctctttgtgtatgttcaagttgctgcaaagaatggttactcgagtttgctagcattcttcttgaaggttattttaaggttacttaataggtgatacacgcagtagcagtgagttatatctggaaatacatgagcagctgtttttattatgctctcgtgtctggctgatatcaagtactgttgttctctgatcccatatgtttcccttaattttgaaaagaaccaagtccttgcgttgtaattttctgaatccacaacaaagaattctagggaaaatatgtggccatttgcatcttgtgtacaggctgagagcaatgttcctccaaatgtagctttgaggaaagttccatcaataatgattagtggtctggacttgttccatcattttattgaagcatctagtgctacaaaaaaattacacgaagttgttatcttctgcaattttcatgtgtactatggttcctggacttgttttttgtaggatgtaaaaaaaacttggcagtaggttgtataattcatttgcttttccatgtaattctttttgtgtgtgctccttacttctccatgctttcatgtagttcatttcaaatacatacttagcattcaagtctcctctaatgtcatgtggcgtttgagttatttttatgttggtgaactttggcttgatgtagtttctaatcaactttgttgtagcttgtcgcttgtctacaaatcttatattgagatcacaagtgtgtatgaactttatgttatatttacagattatgaaaaatttgattgatccgttctttgatgccattagtgcccacttgcattttggatccaaacaataattttgtacatttttgcttaagactttttcaccttgtattagaagttgtttctaatggcatagaagcttaacacgctttgtagagtttctttgtccttgtatattttttttcttctattttaggatgttgcggatctgtgattagtagttcgacataatcagtaatttaggctctctggtcttattattttctagctgcacaaccatttcctcagccaccagttttgcatagtcaataaagtcaaacattatttcaccatcttccagcattatcccttgcatggttggttgttgagtagttgattcttcttttggtggtgcattgtctactattgtttttgttatatgtctttatgtaactaatgagttgcatgctcattgcaatgaaggatgtgttgttggttgttgttgtgttgctgatcatgttcacacataatagataccttgtgaagtcaggtcctttcaattttagttgtatgtagaagaatagatctggattgtcatttatcctcaacggctgataaccttgtttcacttggtattttaggttgcagttgagtatttcttggttgcattccaacacttgtttcaacttttgtactagttgttcatatttgcaatcccttaaaagataaattcgccactagcttcgtaattatataatttattcctggatcaaactgtccattgtaaaatatgagaaatagaattaggtccctttcttgacataaagaaactaaaatacaacaattaattggatgtaatgcatgtgttgttaggcatctactttacaattttaacacaactacaaacacccactatgtaatatagacaaacttaccacaatggtatatgctctatatgagtcgtgtatcgccaattctgaaccctaatttttattatatgatatgttcgtagcacaactattaggaaactgataaacaacgtatgcacaacgatacatgaactttgtgattggacatcgttaagaaaaaatttaaaaaattgttacactgatgaacaatgacttgcacgttaagaatattttatgaataaataactataaaaaacactgtaaaccaacgtaaattcaaccaatgttaaaatatgaaaataatgaccatattagaatttttttgtatgcgagccttgtgttggattatcgatatgaaatacctgaaaataagactaaaactattgaagaattatcggctcttaattattgactcatcaattatgggagtgtttataaaatggacgaccaacgataatgcaacttcatagaataaaaaaaaaattaaacaatgttggaaaatctatagcgcaagatgaatgcaaatttactttattagttgcgatcggaattgaataaatccaggattgtaattctagaaaacaacgctaatgcaacatgtataatattagctactgtagtgaaataattttttggattatacctgttaggttataattagcctatgtttcgggtctttaaagttagcaatatctcgtctattggtgtcttttggagcagttttac

SEQ ID NO: 114169 - DNA, 1788 bp, Cannabis sativa
atggttattattgctattaaaaataagaggatttgcaatgaagcttagtcaaaaggattaatcaattgaatataaaaggattagtcaaaacgtacgtgcaatgttaaataatctataattggacaagttattgttgctataattaaaagctttggtgacatttggccaaattattaaaccatatgtaaaataacgtgtcaatttcatatatgagtaacgttattaattagattacattatatgcacgttatatgaatagtgaatacatattttcataattgagttttttaataattactatatttgtattatttatttatttattttatgtatgtatgtattcctttagatatgtttaaagtaaaaaaagtttgtttgattatataattttgttgaaacttgtagctggaggttagtgttgagagtagtactcattttgaataaggacaaaaaatcaatagtgaatttaaattaaatattcaaatgggacattgaaagttaccttaattattatatttgatgtcctattcatattcatattcatgtatcatttagctagcttgtaacttcaactagatactttgattggaaaaagcaccatcatcacaagtaatgaatttggttttttctattttgttttcttcttcttttaatttttatttttttttttagtaaagaaatataatatatatatatataaagaaaagagtgtactaatcaatttccttggtaaaacctcctctagtcaaaattataagtatggtaaagtttcaataacaataaattatagcaataatgatagttaatagtgataaatactcaattacccaaacccttttcattaatgttttatttcctttgtttaccaaacctagcaaaagccaaaaacctaaaaaagtagccaacaatattgtgtttagttgtcaattaaattaattatatccaatccaatatatataataatcaatcaaagttcaaataatgggccaatttaagaacaatatgtctcaattgagggacaaaaaataatttggaagtggggtccacttgaaaaaccaaaataaatacaaagaccaaagttttaacatatatttaagaggggagagattattaacaaagacatctcacataaaaataaaataaaatatataaataaataatgggagagagattttgtttttgtttttgtaaagagataggatctttgggcccactaatgggctgggcccccactaaagattaggaccatctgtccctttatgaccggcatgccctcaataacacgtgaatccgattcccaccaagtgtgccttccttcctttcttgcaattcattatcattatctttacttcccaatttggcctacttttttggtcacaatttaatttttatttatttattttgttttgtctatgtgagaataaattattgctatcataggttggacatttttctatttgactagcttgtgtgataatgatttcaatttttttttattatttttaatgatttcatcatttttttatatataataattgaattgcctttttactctttcaattactttattattgatacattttattataagatatttatttatattgggtttggggaggtgtaatatgtaattggacttttgccaatttttttaaaaggtgttcctgcctaggaatctaatcacaacttatattaaaaaatttacctaaaaaagaaatgataccccttttggttccttcacaaattttaattattttttattttatttttctcttataatttatatat

SEQ ID NO: 114170 - DNA, 3593 bp, Cannabis sativa
  modified_base (29)..(59): a, c, t, g, unknown or other
  modified_base (2439)..(2448): a, c, t, g, unknown or other
aaaaacaaaatttttaaaaacaaaaattnnnnnnnnnnnnnnnnnnnnnnnnnnnnnnnaacaaaagtgttaccaaatggcacattgacttctccttataattaataatattatgtatttttgattgtaacactttagtagttaatttacatataatttcgtttaagattgttaaactatctgctaataagattacgcgcataattcaacgtaaaattttcttggtaagactcatcgtgtttatagtatctgcgttatttacatttataatttttcgaatgaccttatctaataaaaatactttgttattatttaaaagtaaataaaatcttcaaaatagtataaaatcgatcaccatattgtatacataaatatatatatatatacagtacattagtcattactatttcatattaatcttactctacttttttaaaaaattaaaaaataaaaaaaaatctccccaacctttacgttacttttttttttctttaaaaataataaaaaaaaagtgacaaaagaaaaagaaaagaagactaaaaaaaggaaaaaaacacagtaaaatcattatagatgatagggacgtgatcgaacggttctggtacacccacgtatgccctactgttatccacagtgataaggccaaagacatggagaagctaacacgtggcagacagtaattgggtcccacaatacaagcaagcgtgacaaaagaaaattttcatgaagactctctttttctttttcttttttttttttgctttttttttttgaaaataaaatatttaatgaaagttcattgtcaaaaaaaaaaataaaaataaaaataataataatatttgatattatagattcttaatatttggtagattttaactaaaagaccccacaaaagatttatatttatagagattagagaccccaccaaagattttttaccttaaaattcaattattgtttttgttaattattagtaggtcccttaaatctcctaagtccttaacaaaacccttattttatatgttttaacacaagttaattaatttggactataaattttaaacaattacaagaaaaatcttctatcatataaataaaaatgatctctaattcctaaactttactagtacatcacaaaaaattagtgtcgaaaattccaatacaatgaaaaaaagacactacccttattattactaggtctaacctcccgagattaacttatttggacatgcattgcgattaatttccacttagagagcactcacagcagtttttataaaatagagagactttaaaaaaactgtactaaaaatacacaaagttgatgctctaaatttatgcttcattttaaaatttttttcaaaatttactattcatagtctattcattactctaaatatattttattatttattttagattttaataattatttttatatgagaatatgtgtatatatttatattatatatttgaaatgaaaaaaaatatattaattttttttttaaaaaaaaaaacagattttggtgatatattttaaaaaaattggtataatataaaagtcagttgtaaattagagaaaataaaatttggtaatgtattttaaaaaataaagtaaaaaaattattgagagtgccgttaaaatttagtcgtcaaaattgaatattttcaacttattataataaaatagttgatggtaacaatttttttttttttaccaatttataaaagaaacaaaatgtttgagaaatacaaactactatttaaaaataaaataaaaaagacccaaagtgtaatgtatgtttatttatgatgtcattcatgtccttttcaagattgatttcatggtctacattttatttatttttgatatatttattttttattattataaattgtatggtgctaactttatctttacagtactccaaaattctaataattatgttggccttctctttgattttgttgcagtaaatttggtcttttctcagtctttcttactatctttttgacattttgcaaaatcaaaaaatgatatgttttttctaactttttttaagaataaaataaaatcactttttttattactattttattttttatattgccaaactaacattgaaactcaaagttaggcactatatagtagtagtatattaataatagaatcaattaagatcttcacacaaaatatatatatatatatatatatttatatgaatgtttatttatatgagaaagtgacaaaaatcaaattaataataaaaataaaaatacatctatacttgtaatatcttgtataatatatatttgagtagtgctatcgttaatattttattttaatttttgtatttaaaaatacatgtttaaatattttttttcaaaaaaaattcatagtggtatttgttatacttacaacatcattcctgtaaattnnnnnnnnnnttcgaatagtttacaatgtcgaaaataggtttaaagttttttgaacaacgtgataaactggtatattaggaactctgtttttagctataaattattcaatttttttaaaaaatctacaaagatgatactgtaactataacgaatatcgctatgtaaaataaattaagaaaaatattttaatatataattttaaatgtaaaacttaactaggagattgtaatatagttgtaattagtattactctatatatttataaattataggtggtgggtacgtgtttgttagtttggaagagaagtttccaactaaggtttaactaatataaatatacatacttagctagaaaaattaattatagatatgattaattaagtataataaaaatataaatatagttgggtcctctctaatgaaatatctatttaaaaatcaattaataaaatagaataaaaaagattgagcagtttaattagttaaccacttttgtgaaactcattaatcaatatatatatttaccaatatttatatttatatatataattaatcaaatcaaatcactccttttgtttcatcattatcatgactaagtggaaggaaaaaaagatatattttccttgaaaatcaaacaaaatccaaacaaagatagaaaagaaaaagaaattaaaagaaaaattataataataataattaaagagagagagagagacaacacaagtggttgtaccaaagcggtggagagaatctagtgtgagatcatatcacaacatcaaacaacattaatataaaatctatcaatttatgggaaaattttacttgggaccaccatttctattaggaagggatttttttaatttttttttttaaatcatgtaattttattaatagtaattaattaaataataatatactatttaattggaatatctcttttattagagacacaatcacgattagaattaaaaaaacgagtcaaataatcaatcgtctaatttccagatcgtttaataaaaaaaactaaaaatcaaattaaaaagattataacatcacaattaggctaattagtattttttttttctcccgaactttgacatttaccaaatcatgtcctctgaacttttttggtcgttaaaaattttcctgaacta

SEQ ID NO: 114171 - DNA, 1762 bp, Cannabis sativa
  modified_base (37)..(70): a, c, t, g, unknown or other
tgcaacataaaatgcagtttctgatctttattaattnnnnnnnnnnnnnnnnnnnnnnnnnnnnnnnnnnagggcacaaaacccaacacttaagacatgaaaaattgtgcaagtgttagaggttatgcggtaacgaataaagtaaaaacaaaaataaataaatataacaatcataataaagtcttaaattggactaatatctaattaagttagaacaaattatgaaaaaaaaaattacgaaggcatatccacacttaaatggtcgcccaggatgaccgactaacacaccaaaactaaatactaaaaaaaattaaagagaaagactaagacaacgtcctcaaaaagctatcaactatctaagtctccaatagcttcaatctgcactacattctctcctggtgcatctttgagaatgataaagtatgggtgctcagggttatagccttcgacccttgtagcgtccctgacatccggagcatcaccatttaagtgaaaactgatatcacgaagtatttcctcattcgcgcgttgctcacatcaactagagagaaagttgacttgatctgttaggaaagttgtccagttgaagccagtcgtggctccattggtcgaccaagatttgtaaacgacatcaaaatagtaaccatcataagttaagatatccatagctgccttttcttagagggttgccacttgaccctcaagacggcgaacttgaccttccaattcaaaaacactcaaggtcttctcatcaagagacttagagagagactccttgatgctgcaagctcctttttcaaactgtcttctaggtctttcatgttatttgtcgcatcttgaaggttaaaaatgttgacctcgaactcaccgactaagttctctaagtcaatcaccttcttctttgcactagaagccctttgctcaacaaatgataacttttttgcaagttcaacgaatttcttatgatcattgtccatagcataagcgaagcacaagcaagcctacaaatgacaaaacaaagttagaggatgtctttaataagaaaagaaaggtgaatccaaaagcatgaatactcaccctgaagatatcgttgaagcccttctgagcaatgacatgtggaggtttggaagacaccaacttccccaatggtttgctttttgccttggaagcaataaggtcttccagttgccagtaacacgatgccctgcgtgtgcaagcttgccgcaagcttcgattcacccaaagtttgggtactcagctcggcaacatctatcttttccagagaagcaacaatgacagaagtaggaggattgtccttgatttcaacaacctttttattccctttgtgcaaaaccctgattggcgaagaagcttcagttatagtggctttgcttctcttcgttgacttcttcgaaggaatagaagaagcagcgggaatggcttgcacaacctctcaagcaagtggttcattagctttggtcacaggtttcttccttttagaactagtagccatgatagcgaggaaactcattttttctacaaaacaaaaagaagaacaaagggatattatgtaagaaaaatacaaaaagcaagacaaagtaagcaatacagtcaacattttcttcattgagtattcgtctctaactaatttaacttggtgcttgagcctgttgggatttatgccctaaaaggaagtatttaatggataatatattataaaatatattgaaattccgtattttaatattcccagtttgattat

SEQ ID NO: 114172 - DNA, 3352 bp, Cannabis sativa
tctaaatattctctgaactatacacatacatacattaatttaattaattaataagaattaaactataaattgtctaaatttttcttgttattatctatatatattctgttataaataaatgactagatatatatatgcatgcacagctatttttaactcccaaataagtgattgatttcttaagttacaccaatttatttatatggtatatatatattatattgtaacaaaaaattaattaatttatttcaatcattataggaaaggattggtaataatatcatttctcaaaaacaattttatagctattatctttataaatggacatatacaatgttggtacaaaacatgtgaactggaaaatttctgtaactgaatatacaaaccaatatgggagcaataaatttttgactataatttttttctttcatatatgttaaaataaaaataaaaaaaaaataaaaaatccatcaaaaagtggaaaggaaaatgaccaaatgggaatctgtcaaaaatccaaacctagtaagtagtaactacacaaaataaatacatatttatcaaaacaatattacaataataataataataataaaaataaataaattgaaacacaaaacccttcctaaataattcctataaataccaccctataccatatcatatctccacacacaaataatcataagagcctctatagtaatatacattgttattattaattaattatatcattccttttttctcatttttcttctttggtttcagccattgctatggagatgaacaacaataacatcaacaacaacaatgaaaacaatgatgcaaataggaggattagtagaggaaggcaaaaggtggctatggtgaagatggacaatgagagcaatctccaagtaaccttctcaaaacgccgttcagggctttttaagaaggcgagtgagctttgcaccctttgtggggtcgagttagccctaatagtcttctctcccggaaggaaggttttctcatttggacatccaagtgtcgaattggtggtggatcgatttctaaaccctcaaaactaccgtacaacatctgaagcaacaaactcagggacactgcagctcattgaggctcacaggaatgcgaatgtccgcgagctcaaccaacaactgactcatgtctcgggccagttagatgttgagaggaagcatggttctgagttgaagaaggaacgcaaggcgcgagttcccacccattggtgggaaattccaactgaggctttgaatgatatgagacatttggaacaactcaaatccgctatggagttgttgagaagggctactacacaacaagctgatcgaatcttgattcaaactactgctaattctaatgcaaactcgctcttaccacctaattttaatagcatgaatgttaacacaccatcattttatggtgctgtgactggaggtggtaatagtaatggtaataaatcttcatctggatctggatcaggagtatccaatatgctcccccagcaacaacatcaacaacctaataataactatcattgttgtaacaataaaaacaaaatgatcatcaacaacaacaacaatgatggtgttgctaatatttcttctcttagtgcaacacatttgatgcaggcagctatgaatggtggtggtgttggtagtgtcaaccatgtcaatatggctcataatcttcatcaagctggaagaaccatcaatatgcctcctcccaatactattcaacttaaatcttctcctaccaatagtgatggtggtaacaacaacattaataatcataacaatcatatcaaccatttcaatttctctcctatgcctccacaaatgaagccaaacactactagtttcaaccatttcaatcaccatatgcagccaaaatcttcaccatcatcaactcctactaataatattcatcatcatgagttgcctatgttgcctcaatctttgccacaatcttcacaattggttttccaaaaccctatcaacaattctcaagcaatgatgaatagtcatatgttcatgatcaacaacaacaatggtactaatgttggatatggtggtcaccatggatttttcaattaattaattaataatgtctttaatttcaagtataccagccactcacacaaaccctacctcatatatttggtgtctttattaattttgtttcatgttgtttagaaggtgtcattattattattattataattaatttcttttggtctttatttttttgttgtacttgattatgtttttttagtgttatttgtaagaagagattgggggttttaatagttatgagaaaagtggttttggtggattattacatgtaaataatattatttcagataatttatattttatataaattaaaaattgcattttctattaagaaaccgacatatatattaatattttacatataattaatcaaaattaatataatatcacagtctaatgtttttaaagtaattagtgatcacagcttgcacatctaattaattgcttgctttctagatttatatgtatattaagaaaacaaattaataatttttaaatagaatattattaatactcatcatatccttaataatattaattctgtattgtataaaattgcagttaaattataaaaaagttagagccaatctttcttaaatagattattatacatacatacaaagatgttgcagctatatattttccagttttaaactttccttttgctaaattaataatttttttattttattttttgtgttggaatacatattacaaataataagttgggtaccaaataataccaataaattaaaattcattttaattaatataatattaatatataatagtatttaattaaatcgatctttgttcgtaatcttattatttagttttttaattagacaattaattaattaataaaacacagtaataactatcactaatccatttcattgttctcgatcaagctagctagtaaagtctatgttatcgtatcaaacctctcttgtaacttgtaagtaataatagcatttatatattatgtggttggcattgagtatatatatatatcaagttatgatcaaaatttatctatctgtatatataaatagatttttgataatgatctatcagttatataataactagtgaacaaagccgcacttcgtgcggcatgtataataatttaaaaaaatttattcacactaaaaagtatatattttttgttaggacagcaaaatataacttttttttattacacataaaaataatagaattacaacttaatactaaaaatattttgaatattaaaagtacat

SEQ ID NO: 114173 - DNA, 2540 bp, Cannabis sativa
  modified_base (2498)..(2498): a, c, t, g, unknown or other
ttttttatatctattcgtgttagagattgtcggttatattatatattaaaaaaaaaaaaattcaaaaattaatcttataaagttttgacaacttattaattgggggactcaacccgtactcaccattacacattgtgcttagaaatttttgaattttacatgactcccttcacttattaatttacaccaattaatattaaaaaagtggtgttctatcacaatgttcaatttctttaaaccaaatataaatgttattattattattggaaagggaatgctaatgttattaaaaggaaccaatagttttcgttatgaagttaagtagagatcaaatacttaactctaccaataataatatatagtagtggtgctcttgtcttttctaaaataaattaattttttctttaaaaataaaataaaataaatttatataaatttttatttattgagattttatgtaacaccctaattcttagggatgctacacacctacgtgtgtgcattaataaattaatttataataaactaatagtttaaataaaatgtgatttaataaaaactttaccaacttatttaaatcataaaatatggcataatctctttttacgattggggatccctatttaaaatattacaagacatatcattacaataatattataaaatacatttaaaagttcagaacacttaaagcacaattcttgacaactcaacaccacttgctggataagctaatatgtacatttgatggagaagattcctaactcatggttatccaaacatctctacctattatctgtaccacatagcacccgtgagtcacaagaactcagcaagaaaagtaataacaataatcatataatatattattcaaatattatcatttatactcaaacattcagaattaaatgatcacacattactcataaaataaaatccaaatcactattgacatctatcacaattaaacgtcagtaaagatattcaataatacaaaatcatcatactaatgatagaagtcatattcatttaataatataaattatatctgttacctcataaagtaaccatctttattatatcacattacctaattaggcaaatcgatactttaatctgataatcatgtattacattgtctaatcaggaaagcccatgccataccctatcacccatatatttcaccactacatcacctaatcaagtgagcttgtgtcaatacctgacacccatatattacattgcctaatcagatgagcccttgtcatatcctaacaccaatatattacatcacctaatcaggtgagcccgtgcccaaacttagcatccatatatcgcatcgcctaatcagactagcatgtgccttatcctggtaaggtaaggtaaatttttgacgaacattagaccaatttattttcttcattcccattaggagttattaggactctgaggggattttagtttttggatttttgctttaaactttgttctggtatagcgttcctctgggttcccgacctgtcgctttgagttgctcatgaaaaataggtttctaaaacaatgggtctggcggggacctctccaagcaattttaggggaggccttgcccaatacctattttgtcatttggattgtgcgtgtttaattgcttggcctttcttttctttttgtctttccagtgatggatttgaaccaggagttccatcttgatgttgtggaaattgaagacaacaccacacctgtcctgccaatgagggaaatcaaatgggagttcctactaggaacttcactcggatgttttccttgaagccatcccagaactgaatttggaaaccatcctagaagccactctgttagggacatccaaagagtccaaagggaaagggaaggccaaagctctgcctccctctcaggaattcaacgactccatctgggagatggaccacaaggagaacttattctgttcacacggaatgctacaaatgtatgccaccgaagctggattgctcaacgtaccaagactgatgtggcataggatggctatcccagaggagtctacattcgcgagcataaatgggttcaacgcttagagttggtcccatatctcaagcgaagcacaccttcctctaagaacttacttcgtggagtttatcgcatgtataggattgctctattctagctaatacctccggcataagctcttagttggatggtatatttttttgcaaaattaacaaacttgaggtgccgagatcttgttcttcttcgcgatgaagcctcaacgaatgagaactaactacaagaagttaagattttagaagctagagaagtattcagatgctcactgccccactagtaagaccaagcgttctcacaacctcagagagtattagttttctccaccaatttcccgatgaagagggtttttgggttttatgccttaaataaaactccatttcaatgtaatctttatctttcaaatatcaataaagaaacanaagtattttcatcacttattgtatgtcatttggttcatgtta

SEQ ID NO: 114174 - DNA, 3701 bp, Cannabis sativa
aaaaaaaaagaaaaaaaaaacgtaaaaataaaaatgtcttagttatttttttaacatttatactgttaagcaccaaaacagaacaattcgtcctcaatctcagcaacaatgatcggtagccacccaatgacaacaaattagtcggaaaacaactacattttttgggcttacaaaccgggtgatttcaaattgaagggaatctaccaaaaacaacttctcagtacttggaaatcaataaaaaaaagtaagaaactaaaacccactaaaataaatataaatgtcgaacgattaacaatgttagccaattgttctttaagttgaatctaaagaacgaattaaattactggagatttgatataaatagctatatgacggtaccaatttgaattttgaattgattttttaatgtcagaattatagctattcttattcttccatttaattatctcatgatcaacaccgctttgatgttgtttgtgaatgattaaattaaattcatgagaaattactattataaaaaaaatgatggggcaactcgtaaaaacaggggctaattttaaaacaacactggtattagttgttttatagttgttctactattgttttgttgaaactatgttgttgaagtgttgctatatggtaaattgttataggacatggaatctataacaattctataaagaccaacaaacactgagatgaaggaaaacactacgttgattataaagctagtggcaagttcatacctaaagaatgcaagtatgaacaacaaatgctaatgttatcattggaatgtgatcccgcaacaacaaacctaaaaattcaatatcaagcaaaagaaaaaatatcaccaataaaaatattcaacaatgcaagtctctttttttacttgcagcttaagatcaaggaaataaaattcaccacatattcattatgtgtcaacacacacaacaacaccacaataactgctacataccattcttcgcatcaagaacaaaaactattgaacgacattgccaatgcttgaaaatgggccactaacaactaaagccaacacaaatagacaacaacgagaagaacaacaaactaaagaagaagaaggtaataacatttgacataattgactatgcaaatctagtagttgaagaaatggtagaacaactataaaacaactagaaaaagatagatccagagattgacattaatcatacaaagctcatcacagataaattccacccaaaggtttaaaaaggacatgcatataaagacataaaaacacttaagagtgtcataagctattatgcaatctgtttatctcacctttagtcaacgacactgagtcaatcaaagtgatgagataatggataataattaatatatttaagcaataagaatgtcataatttatagaggttcgaccccatgattatggtaatagtatagtctactccccttttacttgtattacttcaaaaaattattaagatcacaaggagctagccaagtgagtttctcaataatcttaaggaaaaggttacaattatttaggcaggtaaatggctctctagagaatcagaacttggatccctcaatagtgaaatcactctactatttatagagaaagaaatacatgaaattggtttcctaaaacaaattagaataaaaagggaaacagaactagttccttttatctctttacaatgtgtgttaaccctatcaaaataggaatttaaatgggagatatttatgggaaatatccctaaaaaattgtgtttaagcttcattcaccctgtgcggggtacttggcttcactatcacgttggaagctactccaatggtaacattaaacttgtttggatgttccatgttggtcttcagactttataattcttagacatgaatcaccctgaacggtttattaagggtaataccgtcagtccaagtttgagaatgttctttgcgtctcactcataaaaaatgctacatcatactgttctaaaattgggataaaacttttcccccaagtctgcgtgggaaccatttgctcatacatggacttactcagcttatggggtgcttgaatgggtgacacatgtcaggatcctattgtctaccttgtcttgatgaggttagatcacgaggtatgacgattcgactgtcctttcgtattttaggcatttttttaccttactttaaaaaatcgaccttgatatgcacgatgacggttgtactttccaccaagtactgattgtactttgtttcttttttttttgggggggggggaccgaaatttttaaaactgtgattaccaaattaccccttcaacaaactatgaaaagcggtctaggtctctttcccactcttttacttaatttgaacctcaaaagccagattgaaagtttctttttctctatacaatttcctaatttttcttctttgaagcttcaaagaaccccaaagtgatttctagaaaccaagtcgaatcatcatcttgaaacttccaataatgagtaagttttctaatctctatgcatcttttcaaatttctgtgttttattttttgcttgaatttgttttgtaaaacttgggcttgaattgaacttgttcttcgacattagaaatcgggactcttaattctgagttcgaatgtatccaaccagctataattctaatttttttgttaatttaaaactcttttttctaaaaaaatgtttgaaaatatttgctcgacatttttaggaatttatcgagttcttcttgtgttcttgaacttgtttgttctagaattttcatcatcaggatgaaaattccttcctttgatctttaaatctatctaatcagactatcattgatgttttttcattggagaagaaattctatctgttcgattcttacctctccctccttccttttgtagatgaatctagacgatttctggggggtaagcaccggatagacaaagattttcttcaactacttcccaaagaccagcctaggctctatgcaacttcatcatcatcaaacgagcgctcttcaacatcaagttttgacaagtgggaggtgataagtgattcgttagactcctcaaagtctaccgtgcaacaccatcgttaccccatcaaaattggtagagacgggtatggaaggttcatctaggagttaaacaaagattctagacagtacttgcctgcatcttagacatacagggtccaaggagacattccaaataccctacccaaaggccgtccagagctgtctaggaagacatttatgctagcagaagttacgatgaacattgctaagcacactatccagctgcaacatctgcccagatgtaggaaggtggcacgaaccaaacacacctaccggagggttttaattgagtatctgcactttgcctgactaatggaaatggctaattttgagcgtgccaaaaatcttgaagaggatactaaagtgcttatcggtgatgaagaggaagaagaggtggccccagtggctctaccgtatggaggatataacaaggccgaagagaccatctcagaaattggtgatgtcctaattgagggctaagactatgtcatcaaggagtataaagaagcctttcccaaaaagtatcaggataaacccaaggctcggtaggtgttacgaaaattttgtttattacgcaagtgtacgtatcaagtagtatctcacgcaagt

SEQ ID NO: 114175 - DNA, 1930 bp, Cannabis sativa
acatgtagaataagtaggagtagatttataatacgatgcaatttgagcaaacagttcatctcttctctgatataaatctcttagaaatacgagtacacctcatttctactttcttggcttattataacaagtaggctgtcatattcatagcatcatttctatttagaagatcaacaatggattttctaatattagattaaatgcttctgatagatactatttagaagatgaaagactattagagatcaagatatgagaaagtactagttttgtttactttcaaccaatttgagaaaaaagcagccatacgcccataccttagaaagaagcactgagagcaagctccaaaccagagcaaaactaagttcagtaaccaacaatagaagctaactcctcagaattcagaagtaactgacttgcatggcagaatttagaagcaaatcaaaccaagtagaagtccaggcaactctcaagtttgaatttgaaattataatctagaaattccactttttatttataacttattatattgtttttaagcattttttatagcaaattatcaaacacaactcaagaaacatgctcacaacacaggcaaagtaatataaacaaactcatcaatcataaagaatgtaactttgggaacagtcgtccaacaaatgtgagagaataaagaccatttaaagtacagccccaagttgctagctacattaggagcttaaaccaaagagttaggctcatgtctaaggaccagaaacagctgtccaaaaatgcatcagcaaccccagcaagtgacatcaattataaaccagtcaatagtcacagaacccaagtagagaaccatgtgctgtaagtctttgcatcatcgatgaacaacatatacacatggagttctcaaccctttaacttataagcactctcaacatatgtggtgatgcccgacacacaatatctttcatccatattttcaatcctattattcttggtatcataccaataccaataatcagcttcagaactacaaattacaagatttccattactcaaaaactctttaggaacatagctagaatgttgaccaaaagtatttggaagaagactcaaaaaattgactgaaaaatatttgaaccaagaatcagagtcatcatatttcttcaaaacccaaatgtccactacttggacttcattcaaagtgaaaaaggaaagacacccagaaaagttagctagcttcttgacattaggtccttttacactctgaggtgactttataagcctaaaattttccatacttatatcaaaggaaactattcctaaagatgtttggtgatgaacagttgtattgccaaagcaaatcatccaatgaatgcactcattaacaacaatggagcaacctaaagatgtataaatagttatatcagaagtagaggaagattgaaattctgaaaatatgttaggcattgccattgttttccatgaattgcttctcaaactataaatcccaatttggttaccttctttaaacttattaccagtgccaacaataccattcttatcaagagatgagacctttaccactttgaaattactggtcaagggatcataaccaagcccaagctcagaatgattacttcccaactcaggagaaggaggtagttctttagactcattaatagtcgggttccataaataaacagctttagttcttaagtcataaaggcctaatacaccattatcactgcccataaataataacaacggtggttgatccatttcaaaaaagggaaatttctgtaaagaaatctcaacaaaactttgcccttcacaaatggataaatgatgatcgaaccttctaacctttttatggagaaaaactacacaaggtagttgacgcttgaggtggagatcgttgaaatattgggtccttagcaga

SEQ ID NO: 114176 - DNA, 2762 bp, Cannabis sativa
  modified_base (2464)..(2470): a, c, t, g, unknown or other
tcatatctcaataacaagttacaagtgattggtggttaatgctcacgttttacgtaccattgtacatttagataagagtaaataactgtttatatttaaaatataaagaagtggtctttgacttggtcagactatgttgtttgtgagcatatgcatagctgagtgtgtaatacgaagggatgcatagctgagtatgtaatacgaggagatcactacaataaatttaccttttaatgatactcttcagtgacccgcacattcgtgggggtcattaaagggttaggagtaatttttagtgaaattctcaattagtctctaaaattcaatgttagtgtcctataatttaggtcactaaaaatttgaggggtcactaaaaactaattcccataattttatattttttttttattataaaggttcaactatagagtcacatcaagagagactagaaaaacgtgtaccaaccgccttgcgcgtcactaaagccacttcacactactatagtgatattttatttttaaattaataattattttattcatttttattaaatgtagggccaaaaaaaatgtaaggtcggcggtttcaaaatgtatgtgttttgttattatataaataatataatagcaaaaaaaacataatacaataaataataaataaataagatgataagaaactcttaaattaacatctcattctctctcaccctttattaccgcctccttctcactctctttgaaaatctctcaagctctcaatgtgaaatggaagatggtctgaaacagtgggtacgaccgccatgaacgaccgtttcttgatgccagtgagtcaaacagaggtcacaaaggcctctccgctacttgatatctcatcctccattcctcatgacccaaaaacatcatctgttctatctccctctggcgattctcgctcagacacgaatcgacccattcaactctctgttcctccatcatcagtttgcttcccccctcttcgacttctttgagatcgtctatctcctcttctgttcttatttttttttcttttttataatagatttgtgttttaggtcagcgacgattaggggtttgctttgcacctagatgttcttgcatcgtcgaggttttgagttcgcaagtggttgttcttgcattgtcagggttcacaggtggctagttctgtcatagaggttttgtagatcttttgggcatttggatgggattaggagctcgccaaagtgaaaattttatcacatttatttggtatctcacgaatttggttctgatttagtaatggctctaataatctttacaatttttttctttcattttgggattagtttatctccgattatatagcaataatgtaactttgtttttgttttagtgttaatgtataatgatgatgtatatgtttgtatactaataatttatctctaatttggatataatgtttgtatgttgttatggaagaatttgtctatttatattgtgactgcaaattaatttaggcttttattttaataaaatacattttttatcaaaaagaaaataaaacttctatttcctaaaaatataaatgcattaatgtaataacgggttaccaaaataaaaaatacattttaaaaatcataataaaaataaaaaagtttagcatacaacttcctttttgtacggacgatacaaaaaaaataataaaaaaaatagatatagccacctacaaagtaggtggttgttatctttacagttttgaaaagtgagactctaaaagtttacaatgacgcacattgagtgattctaaaaggttttagtgacccgcactaatgggtcactaaatattactttttcagtcacccacattagtgacccgtagtgaaagattactaaaaatattcattgtcactccaagtgggtcattgaagctcatttttatagtagtgggtgcataactgagtgtttaatacgagaagatacataatgtagtgtgtaatatgagaagatgcacagttgaacgtgtattacaaggaaatgcataactcagcatgtacaatatgagaagatgcattgctgactacgtaatatgagatgtattgctgactgtgtaatacaaggagatgcaagatccttgtatttacgatcagacaaaagatcattgttgtaacaccctaatctataggattgccacgtgtgtgattttataaaactagtttaatactaatataataattaattattagaaactgtgaggataataaaaacttgactaaaataaaacactaaaaacggacattataacggcagtaaaaaggagtttcagggatccctgttataaaagatttatccaaaagactatatacaacaacaatccaaaacacagttcaaaatacagcagacacagttagtctgaaataactcctgacaactcaacacgcaggctggtggggtcaatatgtacattgctagannnnnnngctatctcatggttgttctaactttgccttgcccttacctacaccacagagcactcgtgagtcacatagactcaacaagaaaaatgataaataatgatacataaatagctaattatatatttcattatcacaaaatgattaaagtatagcattcaacggtaagtaatgtcacaagttatatgcatagaaatagttatgctcatattttgcattgcctaatcaggcaagcccgtgtcataatataatatcatatataatatcattgcacaacctaatcaggtgagcccgtgcc

SEQ ID NO: 114177 - DNA, 3537 bp, Cannabis sativa
tgaattcattactagaatgtggttttatagttgtaagtggtattctctttattttacaattggtattacaaatgactaacacagtttcattgatactattttattttcacagaaaactaaagccgtaagaacacataatcagctagatctttacaatttgaaatttggagagatttgaggaaccctgctataatatgatttaagctatatctaggcagctggagaggatgggtattcagttttgggttactctcaagactctcaaagaactcattgttgtggcataaatatttatcaagttattgaataattggtgtgtatcttgaaaccacatttcatgcaagtatattaaaaaatgaatgaatttttcttctttaagaagagcgaccattagagaatttatttacaaacatttggactctatagcttgaatttacaccatgttcttatatatgtttgtattttgtatatgacttattttaagtaaacattgaggaagtaatgaaaatagaataagtttgataaggatggattgttagtacatgcatataataaaataagcttgcatctttattgtctaaaattttatgtagatcaaacaagctagattatgatcttaatgtcttagatacttttggcttgtacttaagaatctttgtatgttcttctaaagcttttgttttgaaattctggttagaaataagtttttcaattctgtctttagatatgaagttttatgtttatccttgaagaatgaagactaaaactttgggatatttatttaattttttttagatgacattccttattattaaactttctatgagattgtctatctatttataaaaaatgaaaaattgtagtactattttttaaggaaaaaaaaactaagcatataattaaatttaaacatacgtgcattattgcacgtaacattcacctagttaataaataaatgtttaaatatgttaacaggtaataaaactataatatgttatacatgttaaaatggtaaatttgaacctatttgtttattttttttcatttatgcgagtaaaataagtattaaatagataaaaaaaaatactaacgcattgtgaaagattaacataactagaatatgacatctttaaatatcgttttaattgtatcgtgtcatgaattgacctatttataatagtgtcgtggacgtgttatgaaacattatttaatcgtattatgttcgtgttaagcataatcgtgccaaactgaaacaagacacgaatacacaaattcgtagtcctacctaaaactattttggatactctttgagaattgaaaatttcatggtaccatacgacaaacttcttagaaagctttattttcggagcaggttatgtagtatcctcttccgaaatatccatactacaactgcgtagtgtatcatagtttcacacagagtcactccacccaaaacaatagacaatctccaggaaaataacttgcacaacactgaagaaagagattgcaaataggaaacaaacaaacttacctaactttctcattcagaatcgaacttgcaaaatgagggaagatatgtgaattgaaaaaggaaaatgaaaaaatatatgcttacatatgtgtgcagattatgtattcaaaacttaaattgctaaggcttgaggttgaatgccaacccaaatttgggttccttctctaaggccttggtgtcaaaagaaccggaaacagtcaagaaggccttaggtgtaaccctatgcagtaaaacagccccaagattaccattgttgtcaagctttgtcttcaccgttgtgttagaatcaaccacgcaagagcatccaactgtcaacgtattctcattcgtagaaaactttctagtgacctccccaacagcagctcccccattcagccaatttagatgacgcaaatacaatacccttagtgagtctcctttgtcagcgctacaaaaggaaaaagaggcaattagcaagaacttcatgccaagtacgaatctggcttcttttacagattctggtgaaggggaacaaatataatattattccataaagaccatagacgatagaccatagcatgtgcacacacacaccagaggactgcaaactataaacttgaatgatctcagggaagaacttacagaattactgaagcagaagaatctgattttgtcaagcttacaccagcattatatttaaggaatttccgagaacctgtcaagtaagtaccttctgcaccaaaagcaatgcttggggtgccaatggttgcagagaaatcaatagcaggagactgattcagagtaatagcggcagtgaaagacgtgtgctcatggagatgttgtagctccaactgcaaaagagaagaaatttgttattatacattttgaaatccaagcaatactgtagagtcatgcccattaacatgctaatagcgttgataccttgcccgatttgtaatcagggagtttaattgaggcaatggtttttgtcgatggcaggatatccacgatggtaaatcttgtggagacctgctcaactaaaagataactattaacaacagaaatatggtgaatcaaactttctaaaagaaaaggaagatgagtaactacctctgattctgtgtaaacatggaaatcaaccatagcattcttgtgcttataatttgaagcaacatttccatagaaaaggccacccttcttcaccactgttgagttgagatcctaaagtcacaatgataacaaaattaactcacattgttgttcacaacaaaaaacaaatgcaaaagagcacacttgccttcaccaaagagtgctagaccacggacaagacagaacgttgtcaaaacatatacttttttatagggaatagcatccccaataatcaactaggtgacattatgtcaaactcatcattctcaataattagcaaacaatgaactatcaacaaattaaagacgcagttacaaacttatcatctaagattttcaacaaagacttcacaaagaatcaccaaaaactcttggtctcgggttcctaaagttactttgtttagtaatcatcatcaaagaatattataccactaaatgccataagtagaaacacatgatcatccaatatgagtagcctatatatttttagcttaaacttgatttcataaagattaccttgactatattcaattatgagtagccttcaaccaccatataattagaagatgcacctacgatttttaagcaccaatttgtattctattttcactacattctggactacagtatagaaaattccaaattgctaaaatgatgaaaattcccagatttattgatgctataatatgttcagcacactgatccttgatgtaataaagctagacttggcaaaaaaacttaactcaactgctaaactttaacttcatgcattagttgcgagcattttcctcactgggttagaagtaataattaaacattacaggcagttgcttatggaaaactagtccataattaaataaatcaaaacttcatattcaa

SEQ ID NO: 114178 - DNA, 2091 bp, Cannabis sativa
ttttttttttttttgaaaatgattaagtttaacatctacattgtttagctgaatatataaatattcgtcattaattttttaattaattattaacgcatcagtgtaattaagagagagtgtaataggttggcttttcactcagctgcgagaaatgctaaagggtaacagtagtacataatacttttatatagttattaatgcaattaagtattgagtctcatataattagatataataactactaagaaatatcgcaaatcaatcataaagcgtcatcttaagtagcgctaagcacctagggtgcccaaatgctcctaccatgattaagtattaattgctaacttgagttacaatgtcacaaaatatttattataattatctgttacattttgtaaaataataaatctatatattgcatatggaattgaaacgtttcttttttcttactatataattttttttttacatttgggagaacaaattcaaaataaaaagtataatatcattaactatgatggaattccaactaataagcttgttattgtaatattattatttttaacataaaattttggttgaatctacattagttttttttttcaaaaacaaataatcaataatttaaatagatttactttcatataaagaaaataaacgaaactaaaaatggatattttttatttttcatcataattttagattcttcttttcctatagttttttttttcttcacattataaaattagtgtcaagataagttggtaacaataactacaaaaatatattaacaattaatgaattgtaagcgactcatgaaattgtaactaacttgatcataataataaggtgattttagaacctttaaaaattgttaccatatttgaaataaaactaataagataattgtagaagaaaaaaatcaagaaacttgatcgtaaattggagacatacaattgagaaaaaaatcatataacaaactgctattagtagtatataatatatttatatacttctccaaaactcaaggtataatagggaggaggagaagaagtatttttcatgaaataatatattccatacacattgacatgagtctaatcatattccaatggattgacccaaaaaaaaatgagaaactaattaaaaaaaagttgatattataaattatgtatttcaataagcaaaacaaaccattaattcttttccaatatcaacttttatatatatgcttacagagtaatggagttaattttgtgccatatttatccccaaaaagcaaaatacaatgataaaaaaaaatagcaaacataacaaaattaagttatatctatgatcatagcataatgattactattagatgttatcaagttaaataaatcttaccactttttgtttgcatggatgatgtagaatttgttctaaatttagttagtcaaataaaactacaaacaaaaggaatgtatattgattaagaaatgcttaaaacagaaaattaaaaattatataaagaacttttaaatgagaaaaaaaatataagaacataaattttaattagagataaattaataaaaatatatataaaaatttttatctataaaaattaacttaaaagtagaattgtcttgttagtcattcatacctcacatacacgtatatatataattagaatggagagaggcataagaatttgaaatggtgatataggaatgaaattctaaagaaaaaaaaataacagttatatttaattcattcataattaaaaaaataaattttaattaatgtttgcattaaactccacaataaaaaaaagaacgtttaagttcatgtataatatataataatgaggataataataaaagaaaaagaactgttacaattaatacaatttgaaaaaaaaaaaattagaaaaaataaaaaataggtattagagattataggaagattaggatgccacatcaactcccttaaacatccctttatatatatatatactagaagaaagttacgtgcaaagcacgtatacttaattttatgttaggtgttctataatttaattgagaaagattcaataaataatcatataatttaaaa

SEQ ID NO: 114179 - DNA, 5739 bp, Cannabis sativa
aagttcatatttgggttgttaaatcaacttgggttgttaaatcaacatacttgtgagtagatctaagttcctggcaagataacttccaacaccaagtgcctagcccttttttcctcccatcctcgatgaggggcagtgttggcacgcttcaatgctacaaccactttcaagaacaccaacccttccccagatcttcttagtttgagggaatcataggttccttactttaggtgcaacatctgactgagctatcattttagttgctccactgcttttgcccccaggagtcagttaggtcttaccagtttctttgattctgagtggtggtgttggaggatccactaaggggatgaccttttttgccgggacttattttatttacccttactgttagctgtagcattgaccttctggatagtgctcatcaaatcgcacagcatcctggattcaagcgtatctggaaaaatcaagaaaacattgcaatcaattcagtcaaagatgcaagaaataacaacttaaaccacacaactttaaataatagagatgtcatgtgatcacaaccatcgaatgagtaattataaatttcccctcttgcaaataaagttacttcttcccagccaataaagttgtcatattccttgaaacccgagaagaacatagtaagaaaaggacccactttagtgacatttagggagaattctcagttcgtggggtgctaactatttgatctactctattaaaataatccttcatgtgatatctacgaggatccaaaattagaatataatgacccccttggtgtatcagaaacatctgagatatcgttggagtaaaaattacgtggaagggcattttccctcttctagaagtacttgttctagaaatgttcacatctggatatgctgccatgaacctagcctggatttcctcttcctcagtgagggattccaagtgatgacggtcccatgctgcatcgagaagttccttgtccttagccgcctttgttatcaagatcaacgattccagtacagttttctctttgaggtcgctgggggtttgaggttgacacctgccactcactccgtgaatactttggaatgtggctatgaggccatattggcacagcagtttggtagtcaccaagtcctccaccttcaattcctcgttcgagaaggcttcatagaaggtgattcgttgccacaactcgttggaaagcacagttctagggacggacaatgtaaaagataaacaagaatcagaccaagaaatggagttatctttttaagctgtcagaaaaattgaagaaagatgagtttatacttctaaaggcgataaagaccaatctttatggggtacccttgcataggttgcgagttaagttcgtagaagtatagtatctcttccggggttggagcagtctaaccccgggacctagaaaagacatacaaccttgagagtagtttgtatgctattggaagaagctggaaaggagcaattccagatttgatgcaaaactaggcaaaatatatcttgaggggaaggtgagctctgcaagagatatgagctcaactccatgctctgaaaccttctgcactctaggagggcaactcttctaggacagacatatagtgccacatgagccctgaaatgttttgaacacctccatcagtggagtatgtctccagcaagccataatttctcaacaaatttgttctttgatctatttcccaaatagaatcattaagtacaagaggagctaggaatgtaacatgggccttgcctttgtctttctgttgtcatttagtctgaacaacttcagaaggcccctcatctgaagttggctcttcaggatctacattcacatgaggtacgtctacgaaagacacttcaagaatctcttcaagattcacaagtgccagctggaagtcactatcttcactagacattgaaaaagtggaaagaaaaatccaagcagttagtatcctacatccaaatgacaaatagggtaccgggggaggcctcccccaatactgcttggagaggtccccactggactcattactagcaaggtcactatcatgaaataacctgctatggtaacaaattaggaacccagacacacaattgtggcaaacaacctgaattccctatgtcacaaataaagaaaaatgcatacacataacaaagcaaagatgaattatttgagaagctagtacgaacccagaaattttcgacctaaactcctaaacaaaaataccccaaataataggcatacatctcaacccaaattgaagggaaagtagctcgacatagccctcgctccagagatattatcccaaggttcatgcagacaaattttagacacagtaaccctaattctcaaatttaaatcctacgcatgcaaggcaaaatatttctacgagattgaaactatatttcataatcaaatccaaaaataatagtttgagtggaagaaatacttacttatagacgaattaaaaggaggagaagatggttgttcatcgttgtttgaaactttgcagactgcttggtgatcaggtcgtgccttgctccaatagtaagcttgttgtttgggtacgtgatgaacagcaggaagcatgatagagaagttaaaaagagagggctaagttttggctcagagaggtgagtaggtgcaaagatttctggtcaaggagtttgtctgagagagttttctgggtgctggattgttgcttaaggtgggaaaggaaaagtgatttcaatttccaaggctttaattatatgggtggtagtgctttgactattttcaaaatatacgatcaagattaaattaatctgaagctaccccatccaataattagggattcaaaaggtttacatttaacgtatctgaagaaagagaataaagtatttattacttattatttcatggctacatctccaatgcaccagaagcctggcgacttttcaattccagtcatcactcgcttcccacaagaaatgtgcttaaactcagagtgtgagccccacggctacagtaaataagcaccatgctatagcaaattgacagcaataccaccgaacgtgctaaccattcaaatgcctgaggcaatgagaaagacttcttccacattccaacacttagtcaacaagtctgaagattaagacaagcatccggaagaaagatgcaagctcccaacactcatgagtcatgagagcttaggggtaaatgttacatgtattcccggatgctgtgtacatggaaatcatggaaggatgccacataagtttattcctggttagtatatatcttctgcccctcggtgtcacacaaggtgttatataccaaaagttacccagaggctcttcctgttagcgaagacagaaaggactctagacttctcattaatagaatgctataagttagcaggagtgtcttgtctgggagagcctcggtcaaatgttcctagaacctatacaagtgtgtgttacccagagctttaggcaatggttgcacaccttctgacaccaaattagatcttgtcccctacgttagaccttggtagtgtgcgtacgtgcttctttagcttctttctttcctacggcttgtctagacaccaacttcccaaggtgaaacctttgggcaacacgtgtccttagtcccataaattggattgcagtagccatacaccgtgcgatgtcgaggatccctaccaaccaacgaatggattgccatgttgtattatgagccattgtaacattttgaatacaaaaccctacctgggtgaagggtatgccctcacccacacatgtgcctataaatacccctattttttcatgtgtaaagggtgaatatttttacttacacaacctctgcaaaaattcctatgagctttcttctttaagagagaaacgaaaggaatacagagttcgtacttatattgtaaacacttgtaatatttaaacactcgttggcaaggctattactacggactcgtggactaaggatcattaatgcctaaaacacataaaaatcacttgtctattattatcatttttaaactttcttaattcctaattaactagtttctaaaaatctcggtaaacacatgcatatctcaattatatttcaaggttttcaactaatagatatatagtgtcctatttaggcgagagtcaaagacatcataagttaaatagagtggtcagttcttctaaaatgaacacattttaacaaccttttattcgatcaaaatatgaaactgacattgtcaggtttaggtgagagtcaagatcattcatattttatgagcttccaccattgtgactaggttgtgcgtttataaattatttctaagcagtcatctttagggatgagtctactagaaagaaatttataaaatacttatctttcgagatttactttgttacattttttaatggagattatccattaggggaatcacaaacgcctcgagattcttattaactaacaaccatgtaaaaccaacaatggaaatcgaatatctcttattaaagctcatatttaaaataatatgtattttctttaaaaaaaatatcttattttaatcattgataaaaaaaaatccaatttaaattgatctaaagttaattaaaattattttgtcactttaattatttttcaaattaaatttcaaaatttttaaaatatataaaaatatttatgttatcttgttttttgcacattaacgtggcaatgagaatggatgacacgtatcctacatttttgctacctagcggagggaagtattcctagcagcccactaatggttaatcttaacatctgtaacactcagatatctgaacaagatagttaagaagatgtccgaccaagatgtagacatatttatgccgaacaaagcatgtaagttgggaattccagagatcagcctcgtcgcttccaggacacgaagacaatcattataatcgtaggattgagtcagagaatagatgcaacatactttagtttcctatgctttatattgtagttatataattaatgtagtttcctattttattcattatagattaaggaaaaccattcttcatgtattaagcccttataaatagtggcatgacctcactatggaaggggacgaagaattgatccagaaacacattcaagagagaatagtgatctaagagagaaaataactcagagatccattgtaagagctttcgagaggaaaaatactttattccttctctcaagtcaatacaaatacaagggaagtaggctattatcattctcacggcgctgaacctctttaaaatcttgtgttctttttattttactgtttttgatttcttttatttatcttctttaatcgctttcttttgactcattgtcgttggctagaagcgaggtcaacattttggtactttcattgagagcaaaaatacaagcttttgtcttagtcttgacaagttaacaggatggttgtacagactcgaaggggaggccttactgatcagagcgaccgaatgatgatagatccaaattgcgaactcctagaaacacaagaggaccactagggacaaaccctgaataagttaatacacaacctgctacggtatagagtgatcttccctctggttgggttcacaccaggtgtataggagactggaacgccagtatggccgccaatcaaaccactcccagcactgaggtcccatccactactaatactcaaaggc

SEQ ID NO: 114180 - DNA, 4233 bp, Cannabis sativa
taaagtctaaacaaaacaaaacttcaaagagagtcccgagtcaccaaaaatagagaaccataatctaagacaaacaaacaaaaaaaagtactaccaccttataaggcttttcatttcaccaagttgcaccaccacctagaaattttcatgattaaaagaaaaaaggtctcgtgagtgttgagctaacatacacatctgaaatatgagcaatcttgtgccaatcctcacctacttccttttcacatcgtttctccaagtttgggcacatttcaatggacagtttcttcaagttggtgagcatttggatgcttgttggtagagatgacaaattttcgcaacctacaatacgtaaatcctgaagagatttaagatttccaagccaatcaggcaacgatgcaatctccttgaaatatgatattctcaaaacttcaagcgaggagaggtgttgcaaggcctcgggcataaccaccggcttatcagaacaatgtttgtgccaacacctaccattttggtctgtttcaatgatattttcccctgatattatcacagttcggagagaagtgaggtgatcaacaccatttgaaaagccatcgagctctggacaatcaacaatctctatagattcaagtgcattgagatattgaaaactttctgataaagattccatctttttacaactataaattatgatatgtttaagcaaggtacaatcttgaaacattccctctggtaagcacttgagttcatgacaaaatttgatgcacaaaaagtttagcgcattgaggccaatgaggaaatcagttggcaactcttgaatctttctgagcctatcaattgtaagcctttgtagacaagttagatcatgtagcatattttggggaaggaaactcatgttatcattatcatagatgtcaagatcagtaagaccatggagattagagatggattctaatagctggtgtgtcccatcatacactcgcaaagatttaactgatcccagattaggtagggtcaatttcgggcatttactcacacacaatgtagacaagcttagaaacttttggttaccaacatcatgccttgataatctttccaaatttggtagatttgtaatttcaagactttttaagcatcgaaagcaatctccatgagagagttcattgtctatgtactcaaccaagttcattctagatatagagagatctcgaagagatgttagtttcccaaaggtggaagttctctacagttattccagttagataaagtgatactaactacatttccaaggatttcattcataaaccaatatggataatacgcacctttgtaaccttgaatgttcaactcagtcaagcctgtcgaaggagcaagagcttccagtacatcttttgcattgtcttcagattcattttcatttgtattccaagacaagtgaagccttttgagatttcttttacctgagagattggcaaatctagcttcttttggccttctcaccttatctaggttgctgatatgtagataacctcctaagtttaagtggttcagttcatccaattgacagcctcttctcctatccacaatgaaattactcaaagtctttaagcaagttagttgcctaatatttggaggtagatgtgataatcttgaacaaccttgaatgtaaagatggcgaagacctttcaagcgaatcatgtgtttcggcagcttataaagataatgacaatagcgtatgtccaaaatcaacaagtggtgcagcaaacaaatcgaatcaggtaagacttcaacagtacaatgtgaaagattcaagtagcgtaaatgtttcaagttactcaccaatgatgatagggatgataatggagtgattaacaatttggcatcaagtgctcttaatgagtgaaacttccaattcttattaggatcagttgaacaatttgttaatagcatgaatgtcctcaaagattgaccacttggtattataatcttcttaaattgactaagagtacaagtcaagtgacaaacactttttgacaagctgataatctcaccattattattattattaacctccacaacacgacatttatcatccattatgaattgagctaaatcatgaaataaatcatgcatcttgaaatttaagatatttccgaaaaaatctttttccatgtcctgaaaaaatgatctccaatataattcactgatcatctcatttccaacatcttccacctcaaattcttgctttgaagaaatcaacccattcgccatccaaagatgaattagttgagttttttctattttatgatccttgggaaatatagcacaataagagaaacatcgcctatgctctattggaagatgaaggtagcttaatttcaaagcaggcaagatggaagttttgtcttctggtaaattccaaagctcactacgcataacagaaagccactcatcttcttcaattttgaagcgcatcaagcctcctaacgcttttgctgctaatggaactcccttacacttcttcactatctcttctccgattttcacaaggttaggccgctcttctgattgattcccaaatgcacgttccttgaataacaaccaacaatcattgtctgacaaacccgtcaagatcagcattggaaccgttcccataatagatgcaacctttttcgaacgagtagtgacaacaactgaagcaccatctaatccacaatccaataagtatctcaacttgtcccattgatcatgatcttcattccaaacatcatccaaaacaagcaagaacctctttcttcgaagcatatcgcgaagtcgtttctgcaaaggatccatatccaatgcttcacaagcttttccagttccagattctataactgctttaatcaatctaagcacatcaaaatcttcagagacacaaacccacatcttaagctcaaaatggttaccaaccctctcatcattgaagaccaattgtgctagagttgttttccccatacctcctaaaccaacaatactgtaaatacaagtatgattacaatggatggcatcattaaccaaaaacccaacaattctctctttctcctcttctcttccatacacacatggttgagtaataacagaactagtaagacgatttcctctaatctggcttcgtctctccccaaccacaaccacacctcgcaagtgaaaattaattcgctcattcccaatttgatctaatctatccccaatctctttcatcttgttagcaatctttttacgaaagtaaagattcataggattgatacaagataaagaagatcgtacctttcgaatccatggctgctgctgctgctgctgatactctaactctaatcgaaaagcctccatttcacaacagtcatccaaaatatcttccaactcagaagaaacatcaataagcttttgcaaccaattcttgatagaacgatctgataattgtctttcttcagcatcttcaatcacagcaacaatggttgaaagcatgctacagattctttgcatctctttgtcgatacctaaaaggattccaatttggttttggaggagagagctcagattctcaagcagaacagtaagaaaagcttcagccatgaaattggtgaatcaaagttggatggaatccagggaagagaaagagattttggtaagctaagccaattcaagcaagcaatgaaaatggtttgagagtttgagttgaggtagtaaagtaaagtggttggaaagttggaaacaccatttacaagagaagagactaccaaagtcaatattgtttgccatagtcaaccttcgttgcttcactcaattctcttctgtataaatatatgagaaatgctaaaaagacatacgtgattataactttttcggtatgatatgttggtagaattaagtattgcatctacgtaataatttttagagaacttctactatacaattgtcacttctaaatagtgataggtaccattagtaaaattactaaattatacgtatggccacttatttagtttagctaaataaataaaaataaatcatgacaaaacaaccgtaaaataacaatttccatgcatagagaaatatttaaaggtattcatgatgtttagcacccttttaagatgtaagattgctgtttgcagggacggacacactaataagattgtggggctatagcccccactaaaaaaaaattagtgtaaaaaaaaattaaatatcttctat

SEQ ID NO: 114181 - DNA, 1321 bp, Cannabis sativa
tagcatatatttaatcaatctcttattttagtccttgtattattttacaatagagttgtaataaatcttgattttcttccattgttataaaatctctaacacattttagttgctctgaggatgttgtcattgtaatatgaaactatgtgcacattttttccagcccaatatttacttagaagctatattgaagaattatcaatacgaaatgcaaggagaaaaatttattactagcttttgtgtcagtgactaaccataatagacgtgcaatacttccaacatttgatgagtccaatgtcataaatacaaacattaagttgttgtcatctacagttttcttatctgcaactgttgtaggatttattttctacatcatataccatgagtagaggtgttcacagtttagtctggtctagtttaattggccttggagaatttgaaatcgtgatcatgccactcaatgttgagcggtacaaatttcacttggttgtagattttggtggtatggtatgatacgatcatacaataaaaattaacaccgctgacattattttgcgcagtactcaattaaagtagatgttactcgatgcggttgtatgtggaactgcagtttgcgaataaaattgtcactaggtggagttgatcattgatctgataaagctgtcaacatatatccttcatgttttgttggcatagttacaaataaggagattagtcgcttcattagtttttttatttgtgcaaaactgttttgaatcctgaattcaacaacataaattatatttgaaaaataaaaaatgtatgttacaacgacaatatataatatcatcatataaaaaaaaaaattctaactaggagaattctatttgcaccccacaaaataataaatccactccaatatttaaaaaaattgagcttaaaataatttttaaaaatcactattaatattttttataatttttttctcacattattttatgataatttcaatactaattttatttttattttcataatttttttaaaacataaataattttcttatatttaataaaaactatcaaaatagatgtatttataaattttttagataaaaaaaaacattccgttctatactatttgtgtccaactcacaattacacctggaatcccgttgattatttatctttcaactttttgctgttgccaaaagttttaaaattgttatatttccttcagcacactctagtttgcacacgtacaaaagttatggtggcgtttggtaatacttttttaattagttttctgtttttaaaagtgaaaaagtgaaaatattttttaa

SEQ ID NO: 114182 - DNA, 7131 bp, Cannabis sativa
agggcataaaacccaacataatgccctctgctccttcccccagccggcgactacatttaatggagtatcaaaaaaatgcttggttctccacctccatgggttcaaatcttgcaattaataactatcactatcctcaagtgctcttacagccagccaggaataatcatactcttaggatactatggattcggcctaggtgaaagtagggctgatttagcttcctcctccactccagctatcgacttctccaggtattacttacccctttttttctatttaaatgcttcctctaagttttatctccatcccacttttacctgtagccttcatctgtttttcgtacctaactccatacaaccaaccaagaacaccaaccctgaacccagccaccaatctctccagctcactgctgaagaggctctcatcaatgattttgataatgttctaatccatcctgagacccaacctgattccttctgccttgtggtcaagattctcacccccaagacccccaaacctaattggataggaaattccatgaaagatgcttgggttgctcgttttcccttcacttttactgaataccactctggactatatttggtccgatttggttgtgaaggggatagaagacgggttatggagggccagccttggcacttcgaccgatcccttatgctatttgctatcccagatggttttgataccattcttccaaaccaacttcgatatatccctctctggctccaagcccatttcatcccttttgggaacagatctcatggcctggctcacttcattgtggataccattggggatctcattgaagtgcacctcgcctccttatacgattccatcattccattcatgcgtattcgggttcttttggatactaccaaaccccttttccgtggcatgaatatccacttttggaaactttctcttaccaaatggagtaaattccaatatgaaggcattcagaattactgctaccattgtggaaaacttgaccacacttttaacaggtgtgaaaactttctccactattgtgacactcacgcccattccccaccgcttagctacaaggatgttcttcgtgccccagccaaacctatctacaagaagagtatctttgaactatccaactcaacccctttcgaagaaatcccctcccttagcaatgttactagccaaagtctcaggatgttgtcgaccaatttttggttcccagcattgctagtaccactttggttagttccattgcttctttggaccaggcttctccactccagttaccatttctgatcaacttactcattctaccccacagccagtttctcatttccctagtatcacttgccccatcaatactgcccctgtcatgactactgctactttcacttctacttccaaaggcaaagcccccatgtaccccgagcctccctgggtctcctctgagcctcctgcaccaatttgtcccaaagctcaagtggccccacttaacatttcaggttccaaaagaacctacacacgacagtgcactaaagttggctcttctttgaggaatacccttaagagggctcgatcctccatgtctgattttgttgttgttccttcaatctctgacactgaagagcaggcgggtgttgcttaacaaccccgcccagaaaaatgagtcttttaagttggaatgctcgcggattagggagttcccgagcattccaaaatatctcccttctagtgcaacaacatagaccttaagttctttttgtgatggagactaagtttcctgttaatagttgtgatctgttaaggctaaattttcttttgataatgtgtttgaggttcctagagtaggtttaggagggggtttatttcttttttggaatgatactgtcaatgtccatatcttatctcaatctttgtatcacattgatatttatgtaactatggataataataatatatttcacttgtcttgctattatggttctccttatattcatcacaaatctgattcttaaacccttctacatcgtctgtttgactcagccctgaatgctcctggcttattatgggcaattttaacgattatccttgtttcaatgataagaatagcccaaatccccctccccatcatgccatgaccaatttccaaaattttatcgctaagtttgatttgcacactttgccttttgtgggaaaccgtttcacttggaaacatggccaaatccgtgagcgtttggactggggagttgttaatcaagcttgggataaccttttccccacgtccaacattgtccatcttcctttttacggctcttatcacaaagccatcaaaattgagtgtgatcccaccccttacctttgtcatcgaaacaaatgtttcttttttgaaaaccactggcttttggatcctgagttccctagcctcatgtcaacttgttggtctcgttcttagagtcaatgtactttggactctttcattcagcttcaaaataattgtatccactctcttaaaaattagagtcagtctaaaaattctgtttgtcacaacattgtcaccttgcaaaaccaaattgaagctattcacagaaatccttccctttctactgaggacattgctaaggtcaaccaactccaatcccatgttaactctctcctcctcagagaggagtttttgtggaagcaacggtctagagttaattggcttaaagtgggtgataataacaccaagttctttcacagccgtgccaattccaggaggaggaataatatggttaagtgtttaactctggatgatggctccactgtcacttccttccccacaattgttaacacttttatggagttctatactaacctttttacctccacgggggctgatatggattccataaacttaatcatgcaggggatttctcaacgcatcaaccctgaccacttcactttcctcaataaagatttcgattcatttgaggtcaagactactcttttccaactttctggtgataaggcccctggccctgacgaccttaaccctcttttttactagaaaaattggcacctttttggtaactctttcactcaggctgcccttgatgtcttaaacaaaggtgctgatttgtggtccatcaatgaaacctaccttgttctcattcctaagaaatccaacgcatctaaagtctgtgacttcaggcctatcagtctgtgctcaaccttttacaaggttattgctaaaacaattgctaactgcctcaaaactgttcttacctctcttatttcccacaatcaaggggcttttcttagcaatcgtatcatctttgataatatcttaattgctaatgaagttattaatgccataaatggtcgtaaggctggcaaggttggctgggctggactcaagcttgatatggaaaaagcctttgacaaagttgagtggggtttccttgagagtatttttcttcattttagcttccctaccaattttgtgtctcttgttattaggtgtgtctccactatctctttcaggttgtgtatcaatcagggcatatctaatctcatcatcccttctaggggtatcaggcagggggatcccttatccccctatctttttcttctggttgtcgagggcttatccgtaatcatcccctcgaaagaacatttggctttgtttaaagatatctccatttgtcgctcttccccatctatttctcacatgctctttgcggacgatagcctcttatttacccaagtgagccatcataatagttcttatattcaggacattctctccacttacaataaggccatgggtcagtttgttaacttagccaaatcctctgtcttgttctctcgcaacacctcccaccatgataaacactatttcctctcatcccttggtatggctgacaaacctttcatcgacacttatcttggtgttcctcaatgttttgcaaggtctaagaaatcctctttccattttattctccaaagagctagtagtaagctgagtgtttggaaatctaagctcttttctaaggctggcaaagaagttcttttaaaagccgttatccaagctatactctcttatgttatgtcgtgctacagggtccctcagtctatctgtaagcagttggaaaagctcatggctaatttctggtggggtgcgaaaggccaaaataaatctaaaatccactggaagtcatggcacaatctttgcaaatccaaattctttgggggtcttggtttccgatccatcattaatcacaatcaggctatgcttgctaaacaagcctgcgtatttttcaaaatccctcttccattcttgctactcttctcaaagctaagtatttcaaacataatgactttctccaagcctcaattggtcactgtccttctttttcctggagaagtttactttggggtcaaaatcttcttcttaaagggctggtttggaacattggggatagtaaatctgttcctactctttctcctaactggctggatggagtcacccaccccttttttaaaaataacttaaccccccctgaaaatattgtttcctactttattaatgatcagggtcattgggacatccacaagctgaacacctattttgatgtggacctggttgcttctattctttccacccctattacttcttcatctcaagactgtctcatttggggttacgacccttctggcaatcttactgttaattcggcctaccatcttgccaactctactagctccttgccttcttcttccactcccaatacttttcaaaaatggtggaaatctgtttggtcctcccaaattctgcctaaaatcaaacatttcatttggaaagcgtttcaccacctccttccttcgactcttaatctccattctcatcaagttcttgactctccctattgttctttatgtttgaacaaagtggagtcaaattctcattctctgctagagtgttcccgcgcaggcaagtgttggaagaacactagattctacgacttttacaagaaaaatgtccactgtgatataaaagaatatcttttaaggggttttgacattttttcaaaaaataatttatgcactttctttggaattttgtgggctatttggaacaaccgtaaccagatcatttttgcagataagaagcctcacttcaaagacacataatcttttgttctatcttatattcaggaatatactgaagctcaagttaaagtctcatcctcttttcagctttctcatagccacttttcttctattacctaggaggtttctttcaagccagcggttgggttttacaagcttagtgttgatgctgcctctcaaagacagactaataagcaaagttttggagccgtggtgcaagatcacactgggcgtatcatggcagcactccattcctccaccttttcttgcactcagcctatctttgctgaagctgaagccctttacagagctataacttggtgtgctgctgttaggtttccaattggtttaatagtctcggactgtcagcttctcatcggcaaaatcatcaatcagcagcgcaacaactcagcgctttctgataaagtttggcagattatctcctctttgtccctctttcctgatgcttccatacgctacatgcctagaagtctcaacacttaggcgcatgatcttggtcaacaagcactaggaactgatgaagaggctctttggaacaattgcgttccttctccttagcttctgcttgcttctgcagtagctatgttctctcaaaaaaaaaaaaaaagattagagaaggttggttacattggacattctaaatcaaaattattaaatgacacttgatggagtatttagatttttttttttttaaaaaaaaagagtacacttaagatactttataaattactccttaaactataaaataataaataatattaatttgtggttcattcaaataagtaagtgtttaaaagaataattgagataaaaaaaataaatcattatgactcttcatagtgtaaaataaaaggacttgctgccaacaaaaataattgcatacacaaattataaattataaagtgggtgattgcttgaaaattagtgacacacattgattgctgcaaatatatataaaaaaaaaactttggtttgagaaagttatggttggatgtaagacttgaaatgtcgaaaatgtccctgaaacaagttggagtaagtgatttcttttttctttttttggttctcattgtaacaacgtgaatattggtgatttctgtcttttgttagaaagttgttgagagttgatacggctgtttggctgatatttttttggcttttattgcccttatggttagtaatattcaacttattctatttttttaacattacatgttacaaatggggagtacaattttcagcacataacaaactaataatctctaattttatttacaatctttaacctaatacaacctactaggtgtaccaattaaaaacaaaatgttaggccactcccattagtgtctattttatttttcaaaataccttaccataatttttttttgttttaccctcaaatttttataaagcttatttattttgttcctcatctacatcatttaaatataataaataaacttttttgttaattattataataaaaaaattcacattaaaaaaaaaaagaaaaaaataataactattaaattaattttgaagaaggtttatcctattcctatctctatgtgtaagtaagaaatttaaaggatcttcaaaatgaagaacctttcaaagtagctgatgagtgtcattttaagctcgttagctatcttttcatatcaccacacaatcacttccgctacataactaaggccggttttgaaattagttgaactttaagaaaaaaaaaaaataatttggcaattttttaaaaaaatatgtgatattttcaaaaattattaaaaaatatgtataaaaaatatttttttggcacttggactagttggaccttagacatgagcttagcccatcttaacccaagcccgatcatgtaaaggaccaacaattccacctggctaaaaattgtacaaattgctagatgttataaatattaataattatgtggat

SEQ ID NO: 114183 - DNA, 4625 bp, Cannabis sativa
aaaacttaacgcagtatactacagtatgaaacttataaaaaaacacagtaaaaaagtaaaaaatagcaaaagttagtatagcatgtaaatttccctattaaatatctataataattttttttgaaagggacatctgtaataatttaaggatgacttttttggaccaaaatttatgagaaaaattacttatttattcatttttcaatatttttttaagtttcagaattaatttattaatttaaaaaaattcaaaccacacaattttttgtaatagttagagaataaaataaaaatttattcaatattgagaacatgacgtgatgtgccatagtctacttaatgtgttaaattctcattttatgaaccataggacaaaatataaaagggtaacaaataatttgatagaatgtttaaaaccaataataatttataggtacattttatcttttgtaatacatagtttagagaaaaaaatacctatttctttttataataatttaaatattaatataatctaactataaaataaactggtaatagtaatcatttagtaataagagattggagtctcaagtattaaaaaatgtgaaaattaaaaaaaaaaaataggaaaaaaaatttgcggcttacaaaaatacgaattttttttattaaatcttataaagtatatttttaaaattttaattttaatgaaattattttcctatataattagtttttattttggttgttttacaaaattaggttctgtgagcagaatttcaactagcttataaacgtaactgattttttttttatgtcagattttaatgtccaactctgatgacgactctgacatctaactccgtcacgacgacaactctgacaacttttctaatggcaagaactacttcgacaaatttttcgacagcgatgacaactccattgactttttcagcgacgacaactctgtaatttttctggggatgatggcaactctggtgacttcttaagtgacaatgactgctctgttgattttttcggtgaaatttgttcttagaaattttattaaattattatggtattttgttgggttttctatttttttattttttttctataaaattaccatattttgtggcataagttttatacccataaaaatataaactaattttgttcctcatatttttgtaaattcctttcaaaaatgtagaaaaatctaaaaaagtacataaattttactataaaaatataaaaattatctaaattataattctccaatttatatatttatataattgtgttgttaaggtaggtgatatggcatcttgtatgagctttccttccatttttctattctctcaattttttacattatttagatttttgttaattttgagtattattcacttaaaaaaatttaatgacttttcattctcataacttccattaaaaaataaattatttggcttctttcatttcacatttaattattcaaaaaatttagtaacttttcatttttttttacattatatgcttgaataaatatatatgtttctctgcttattaatgttttcttggttatttgtagatttggtaactctgtttttcagattaacactcaagcttgatgagagagatgtgtacatgctaatttcatagtttcaatgtcctgcattcaatgttcattttctaatataatagaaggtttctcattctttttatagtgctcaaggttgggagtgtaattttcatcaatcaagcaaaatggtgtttgaatatttttgttagtgtttcttagtaatatttatttaattactttggtttgatttatgtagatagtgtaaataatcctcatgggattcatgttgtacatcaatataggacctatataaatatatatttatatactataaatatgaaacacttacaagctttaattgggaatcgatatggagttttcacagagatggaatggctggggttgattaaatttcaaacactattttatgttgttgttataatttacaaggagacaatgtgagttgattcgaggagctgccctctggtagttgattggaggagttgcatgaaatttattctattctattctgtttttttcttccattttctgttgtttagcttctattgtttatgagattttttaccctgttgtcaaacaaacatctactagagtcatgcttgccaaagcagccaaagacaactttaaggtagaccaaatagatgtgaagacaacatttcttcatagagaattagattaagaaacctatatggaacagccacaaggatatgaacatggagatccagaccaagtatgcttgcttgaaaggtccctgtatggctcaaaacaggcaccaaggcaatgaaatatcaggtttgacagctttatcactaacattggtttcactaaaagtcagtatgatccctgtgtgtatatgaatcaacatgtatatttgcttctatatgttgatgacatactgattcttggaaaagaaaagagtgagatcaagaagatcaagggcaagctcagtgaggaatttgatatgaaagatcttggcaaggctaagaaaatcttggggatagaaattgatcaaagccagaatagaatgatcaagttatcacaaactgactacttgaagaaaatacttgaaaagtttgggatggacaactcaaaggtagtatctacacccctggctcctcacttcaagctctctcaatctcagaatccccaaactaatgctgaaaagaagctcatggagaaagtattatacatcagcattgttgggagcttgatgtatgccatagtttgtaccagaccaaacctggctcatgctctaagtgtagtgagcagatttatggctaacccaggaaatgctcactggacagcggttaaatagatacttaggtatattaaaggcacactaaacatgggaatattctacaacaaccaaatagaaactgctgaagaagttgtaggatatggtgacagtgactatgctgccagcatacacacaagaagatctctaactagactggtgttcactgtttttggtggagcagtcatctggaaatcaaacctacaaaaggtagttgctctttcaacaacagaagcagagtacatggcagctgctgaagccttcaaagaagcattctggttgaaaggtttgacagcagaacttggcttaaactccaacaacataaccatatactgtgctaatcaaagtgcactccacttgatttaaaatcctatgctacatgaaagttctaaacatatagacataaatttttactttattagaaaaattgtagctaaaggagaggttcaagccaagaaaatcagcagtgatgacaaccctactaatatgttgacaaaaaagtgtcaacttgaccaagcttaaacattatttaagtctacttaacatctgcaagagttgattcctatctatatgttcaaatgtgctacacacatcatattccttctaaaatctaaaatgactaaactaaggtggatttgtggtgttttagttcagccattttatgttttatcttagctgatgtgtcactaactgttttgacagttggtacccgagtttgttgtctaaacaaacaaccaattatacctactataaatagaccttgtaacacacctttttagttatgttgaataattcagaattttagtaagaaagagagtgaaaatgagggatgtataagggaatcaagtgtatttgatcttggttccccattggtgaggttcttgtgtaatttatactcatccattctctattgtatccaagacactcttgtactgatttcaacatcaataaaaggtctatgtttatctactcttagtattaatttttctctttgttttgttcattaagttgttggtttcatcatcacagtttgtgatcaaactgttttggttatttttatttttcttttgattgctgcattgtgttcttgattgtgttcttgagagtggtttattccactacacaatcttaagggaattgtctatgtctagaatccattttgagttctccaagtctaactaatgagtgtgccacatataagatgaactaaataaaggctatttacacatgcgttgagaagtgtgatgaagaagtgcagcagattggaacagaagtatatgcttggaagaccaatttcctttatgaaaagccaagtgaggaatagaacaactaacggaagctactgaagggatggagaaggaatctgcatcaagtaattccctttttagttatatatatataaactctttttgagttttcttctgattttgtaacttttggtttagttatttctttcattttagcttattgcttcaatgtagacagcttaaccacagacaacttatatgtaatataatggtcacataatgaaattcaatcaatgtactggtttgatcagattcagatcaaaggtagctgctggttggtaatatgtttagcttcgtacccttaatgtagttatattcaactttctttcgagggtgccatatgatgggtaatggttgtttttcaaccatgtgaaaatatggttgtatttttcaaccatgtgaaaaaattacaatggtaatttttgacttgaggcatatg

SEQ ID NO: 114184 - DNA, 3480 bp, Cannabis sativa
gggaggggtcagtcttagaaaaaaaaaaaaaaattcctacactttcagtctatctcacatcatcaagttataacaaaataaaataaaaaaataactaaggtggacatgtaatttccaaagaatatcagtctaatttagactgtaatctcctagcaaattaaaagctgacttgcaagagaaaattcctgtattattttccctgccaaattctacaatcttcaagctatttacacacttggatgctgcccattctttctagacagcaagttcactcagtaatctctctatctcctaaattcatgaagaaatgcaagtaccatgttagtgaagacctactataatcaactatgaactctcaaataccatgctgcttttagaactttatcttgctaatgcaggaaatcaatgcttcaaagcctccaagccagaccaaatatcctcccaaaaaagaattcagtttcaaacatcccatcatccaatgcctcattttccaagaacttccattctaccaaatcatatgctttttcaatgtcaactttcaagactacacctttcttcttcaaatgtttaaactcatctacaacttcattagataccaaagccatatccataatttgcctccctgagtttctaaaattgtctcgaccaaacacctctcttaacctcatagagacaacttttcaaataatcttatagacttgttaccaaactaattggtttaagatcctttatattaaagatttatccttcttaggaatgatacagatgtttcattagtaactcaattaatcactatgttttcttcaagctcagcaataacttataatgaatcatctttaaaccaatccacattctccttataaaccgcattaggccttggagctttgtttccatcacacttacaaacgacctcttcttataatttctcctcttttcatcattccaaccacactgttgtactatggggaaaaccactgttcattccaatccctcaaaacccacaaagtaatcatgagtcaatctgcatacaaagatttatataagtccaccacatcatcttctatttcaagtttccaattctaaaatggttccaccaactttttcatttggaaacgaaattttttgcccttctagcatgaaagagcctcgaagtgccatcaccatcctgggcccattagaacttagatttgaactttatagtccgctcctcgtctatcaattgagcccattctccttttaccttttctctttaatctttcaagagttgaatccatctacctccatattcttcacagtcaagtaaaactcttggattcttttcaagtgttcttgctcttttactctccatttctgcaaaactccacagcttcaccttctgcttaatgagctcaaacattttcatggacttataactttcccaaccagtaaaattgctctctcaccaccatttttgaaactccttaaagaatttatggtgtagccaactattatcaaacctaatagggatagaccccaattttgtggtattgtgtccaactccctagcaattatccgaaataactctaacctacaaagatctcaatgaattacttctaagaaaacgtctaaacttctacctttgagtctccttgttcagttgcaactcctccaataatcgcattgccatgtctgtagtcactataaccacataatcagaaagtcttgttctctcttatatctttactgagcctccatcaattgttgaagtcaacatgaataccttgtgttatgttgtaaaattccagcaacagtttttgccactattactacagttgagaaaatcagaacctagattccgtccacaaccaatggggttatggaatatttccttcccatgagcaatgttcatgtgacacaaatacaccctgccttctgaatctcatgagttgcatggatttgctactctcataaacaaaggggagagaatagagcattattaaggcaacttctaattagataaattcaaattaatttgttttttggattaaattagtttcccgaactagaatcttttttagtactttgataagataataatttccttctaagatggttctctctctctctctctctctaatttcctcttttgggtccatctattcttctaaagtatttctactgaacaccgcctgttctaagggtagagaagaaaaagagaaggtggaccaccaaacgtacaaaacttaaaaactcaagttgttgacccaatgatacaagtttttctcatatctgaaacatggcatgaagaccttctaagatataaagcagaacgtgaatttcaatataataaccgtgcaaaaactaaaaaatataaaatacaatatacatacatattagccttcaaaactaactcaacaattcaaaacccaaggaagataagtcatcgataatataggtactctttctctaattattatgaaacaagaatgcaatccctggacagctcagtctgaagaatggaaatgtataggcagaaagaaaacaagagtaatagaaattattatgaagatggcgaccgcggacaacagggacattcaaacgaaaatgtggagggagacgggatttataaacaaaatttaatactaaaaatagcagcataattgataacaagaattttcctttctcctttttaataatcttaaagaaaaccttgtccaacaataagagaaacaacttactctccgatttttaattttttgttcgatccgaaactagacagcatctcaaagatacgattacttcaactaaataatagaaaagtaaataaataaactcacacacacgtacactaaaaattcatactttatcactttcggaatcgtgctaaccaaaacagaggcttaactaacattttgcaaataggtgctcaggataaaatattccgctaaaggaaaaatctgaaacacgtacattaaaataataggattcaagtgaattagagagtgtaaataaatttgataagaagttaaataaaattagtgtacctaagaacgcgaagctccaaaaccctaaaatggcagaaaggggtagaagcaggagagagatgcggagactgtcgtgaacagagaagagagagactgaaggtccttttttcgttttatttatttttcttatgaaactaaaattgaaaaatcggaagatgaggatgatgcatagtataattaggcgtgttccccaccgcaccacaccacaccacataaaaattgcagtttgaaatttttacagcagggttatagtttgtatttttatcaaatcgcgccttgcaatgtgaatgattttaaatttaataatcataatttacattatatcgcactaatatataataaaattactaatttttctaataagatttgagaaatttgaaatttcatgcttaataaaacaaaaaattagtatcctaaactaatactatgtaatatttgtaaaatgggataagttttt

SEQ ID NO: 114185 - DNA, 3245 bp, Cannabis sativa
ttcaaaggggaggagtggcagtcgcagtcggagccgtagttacagtaggagcagaagcaggaggttctactgttttttcttacaaaatttggtattttgctgaaagtgtttatgtattctgatattagacttgtaatgcagcaaatctccaaaagccaaagcttcacgtcgctcaccggctaaatctggatcaagatctaggtctcgttcacgctctcgctccttgtctgggtatgtgtttattgtcatagatattattctttttttgtcgtgtgttgcttttcagcatcttatttcagtctaggataacacctatgtgttaaactgtcatttttcccgtcaacgtcaaatttgctgtgtcatgatcttttagctgcagtgggtttttccacaggagactttctatttgttctctgtggaggcacatgtttgaattctagaatcattgggttggcttgtttattttgtatttgcttgttcagcaatgggtctactctgaaattatatttgtcaccacaaaatatttattttttttcctccttttgtcgtgtggaattaccttttctgttgtcatagatttggatttatgcagcgaactggggattggatattaggatcttgattggatatgattcagttgcactcttttggttgtggaggtatgctgtttcttagataggaagtttggaagccttcatggttcctatgttctaatgcttttagcattgcaaatgtccatgggtgctagattgggaacaaaggtggtcatggattgctatagttgagctggataactgtgtactaagtgcaatgggatttggaagtcaccatcaatttgcagtagagacattacacttttgattacctgcttcaacacttgccaagctaataggacgacactttctggattccctggattttggtggtacagtagggaagaatactcctctcctgtccactagtgtcttgaaaacaattaatactgttttctttaagatatttgtttttataatcttaggtcgtttgtaggtgggaataatatgcattgacctgttttttcttctgttgaactgctaaaccttttatatctttcctcttatccatattggttctggtatctctgacgtggaagaggcatcaaggatcttggatcaaatttggtaaaaggaacatgtggaatttaaattggttgtttctggaacttttgcagatctcggtcaagatctagatctccattaccgttggtaagtgaaatgtttttcttgtagtaatagtgaagagtagggcgaatcttattatttggttttcatttttttatgcggttatttgatatacaagaaaaggagaacatgccgatgtctctatctgctatgttttttctgataatgctactatagtaagtaggcctaatcgttgtttagtggggcagtcaacattgtagtccccccttctctggatggtacatttggtatcggtgatccgcttgttggaattatttttatggctttctgcccactcatcgtttgtttgtgttgcactatcagaaacgtacaagtgaaagcccaaaaaagcgcagcgtcagcagaagtcccagcagaagcagaagtaggagccgtagcaggagcaggagccctagcaagagcttatcccggtttcactctttagccttatagctttttctagttcatttgtgcttgttccccctaaatcaacatgttcctttttgttttcgtatcaacacaatccttgaattaaagacttatgttttcatcgcattaagagaaaccaaccgatcttttagtaagctggctatattctgacataataaaaaataaatataataattacagtttcactagtttgctaatttgttaacacttttaggtagagcagttgttcactttccgttaacctgattgccttaatgttttgacaggtgatttctgaccggggttaccctcaaaatctgaagctatcaagagaggaagaagctctccttacagcttgtcttttggctaagcagttaaacggaatatttattttgaaaaaaaaaaaagaccggacttgttaggtttaagtgtttgtgcatggatggatttaagcactaaatatttcctattaaacttgaaaacatggaatatattatcttctcattttgtattgcctttctcgactgggtctcaatttcattccatggatctcattatggagaagtttcgaatagataattaagaatgaggtcttgaatttttgaggccaatgttattaaaatggtactaaatagcgcggtatgatacctaagtgtttgggcatcacgaattttctatagtaagttttttaagccagaaaagtaggctacttgtgtggtgcatatttcaggagctgcttagctgtgaaacaccttcaagtagcagtagcagtaggagtagttgttgtcatggtcgtcttatcgtccacccaaagaagaggcaaaggtgataagagttgtgtgcttcaagtgtcagattggtgtggccctactttcatttgtggccattcgtatgtgcatcgattgggaaaacatacctgtcttctatttctttgtggccttaaaataatatacgttgaaaagatcttgtctggtctgacggacccctctaattttggaattcttctatcacttactttcttacctacgatataccctaatttagttttcatttaaatagcaatatttgcaatttgcatcatgactttcagtatttccaaggccaaatgcaggggaggctttaggctataaattatacttaatctgtataaaatcaattaaatataatatcaacctagaaataccatcaacaatatcacaatagtcaacacaaaaactggccttttattcttattagtatcacttattagtacttgttactttatagatttttaatatattttagaacttattaattaacgagtgttgaaagtaaatacataaacacactcaattcattaattaatttatttttaaaacttattcttgatattttctttttcttacattcttaatttattatcttttcaaactgttaataacctaacccccggtatccacatcaggtgtagagctttcaatattctcaacaaatcatttatgctattactattaaagaaacaagatttgaaaaataaaatattatacggtgattctacaatgcccctccttaaaatagatgtattgatgcaccttctacttgtttcggcatccagaa

SEQ ID NO: 114186 - DNA, 2008 bp, Cannabis sativa
  modified_base (95)..(105): a, c, t, g, unknown or other
atcaattcagggtcctatttatactattttagaaaatacatggtccattttgtcatttaacaaaacgcaaggtccaattggtaacttttgtaaannnnnnnnnnnaaaatggtatttacccttctttttctgatacttttgaaagctgcaacattgtttttgttaaaagaaaaaaataccttgctggtaaatcacttggccattgaggctagaaaaggtcaaactcctctaatcaatgtaattggggagggattagcccctgtgaatcccagctctttcctttgttaatgaactcgaggttctttccaaaaaaaaaaaaaaaaattcacaacaaaaaatcacatgtaataacccaacatgtgaacaggaaggactccatacaccatagtaaattcaataaattaaagtttatatttaaaagttaaattacattccaatttacactaataatttttatatgcttatttagtgctatgacttatgttaaatttgataacaataaaaagaccataaatgctatcatgttcccatgtggtggaaagaatatttgcttgcataattatccagctaacgaattattttgagagtgtaatctaaaactttatataaatatatttataaaacttaagaaaagtaatttatataatttgtttttttaaatgtaaaataaaattttgctgaaacaaagcaactttattgaaaataccatagacaaactatatttgaaaaatagacaatctaattatctgaggactcatgctctctgctgaagcaaaagaagattagaaatcatcaattattataatttttatttttttttcctacaatttttatgcaaagattttcttcaatcatcaacattttaggaattacttttgtttttcctttttcaaatttttacaattttacatagtgtctactttatgattttaacattcttttattgcttttagaataacttacaaacaatttgcaattgaattatcacgaaatcttcaagtgtcagactttttatttaaatcaatatcagtcacatataacaattaatatttacttttatttcttctttatatatagataatatataatatcagaatccaacaaggctttggacacccaaaaatacacttaacctattacccgacttagccataagatcatggaaacgtactattttgataactgtgtttgttttcaaatcataaacaactaatttgtggaaatcaagcatcaagaaaatctgatcattagtagtgttgtagtatttcaaaggcacaacactgaggttactgccaaaaacaccagacacaaccgagaataacatactccaattacaactactattctctttatcatgatctttcatcacccatatctcataatccagtagtggaccaatatctctgtaaataggtttgatgacacaaactgagccttcaaattccacagctctaaacgcgttacccttactttgaaatggcaaagacaaagtattgtgtttttcagtcttaagatcaaaggcaaaaattaagttcataccacttgattcactcttcactactatccaatacaaacaattgtcaacaaaggcacaattactcaactcataaccatagttttccaaaaaagcatcctgacaatcaagccttttcaaagtctgagccttgacataatacaagtggtacttactcacataattttgtcttatgctatcaaatcttgtgtgagctacaaccttatagtcatcgataagaggatcgtaacccaatccaataactttcgcatagggtgataatctataactataatgggataagggtgtgtgattttttgtaaatggattgtaaattgaaggacgatcttgggttattatgaggccattgtaacaaccagagggtgtgccgaatgggggtattgatgatctgattttttcaattgagcagccttggttagtaaggtcgagccaatacatgtctttttattggtttttttcattgttgatgaagat

SEQ ID NO: 114187 - DNA, 2585 bp, Cannabis sativa
  modified_base (1859)..(1861): a, c, t, g, unknown or other
ctatgcctagggccgaccctgattggtacttgttattggcacttaaagtgatcaatgtcataccgatgtggtacctaataatcagttagtaattttttttttgtcgtttgtgttttatattttataaatgatctttgtactaattttttttaaatatatatttttttaaaatcaaacccttagataatctctccaaaccccatgaagttattaaggttagatcgatcccacatacccagattccgtacaactctttctaccatgaatatagtttttaaggcatgtatttgaacccaagaatgcagccgattaaggactacactacgagaattatctccatctttaagtctttcaaagattagaggcaccctatcgaaagtccaagggctactctccattacccttttattgtctacttcatggtaaaactgaaacaaaacacgattgggctctagttctttcacagacaaccctctactgagtctccataactatgccatcttgtgtttcattgcttaaaaatcaatagactgatctgtgagaaattgacccacaagatatcaacgagtatcaatctctgataaatcttcaacaccttcatcatagaatgtaacattcttcagtattatcttccaatgcaatattcatatgctgttcgtcaaggctagtatcaacacgtcccatattagccatagcctcacaaaaacaaaactgttgaaataaattcccacatacattgtctagatcagcacttaacaagaattacgaagcagaaaatatcctatgtggccttcggcctcttacaacctacaaacaaaacaaaaagttagttgcaaagtttgttaaaactgttgcaactaactctcagttctctctgctaatctacaagctataaatacatgaaaataaactcagaacaacaaaaaacatatcagattttcgaagaggaagagacttacagtggttaagtcttggagccctagggttagggctcggagatccaaaccaagggggaaacatacacagaagaagaagaagaaattagtgcatattcagagagaaaagagagaaaataaacactgtaaactcaaaagattaccaatcgtacatgtgatttggaatctagctttgtaactctttgatcttgaagattcaatagtggaaacgagcttttctgaggcgagctcgaaaaggatgtacccagcaacatttggggaacctctataaaatttatggtacactctttctaatttcacttgctttatttttagatatttctctgtgttgtgtatggatttgggagttgattttgatccgtgaagggattaattggtttttctgggttgtgagcagacttcgagtttctagagaagaaactcgaagctctgctagggtttcatatttgggtttcgtgtgtgtgtgcaaatgaattgattctagatatttcttggggaggttaattagggttattgcaaaacgacttgtagtctagggaataaaagactgtcgttttttgttaacttcagggagtcaactgagttttgactctgtgtaaggtcgattttgaccttgataacttgtttaattttctgtttggtgtaggataaaagggtaaatttcttacaaaaacaatcaccaaaataagtacaaatttttaatattatattattatttttaatttttggtaataagtacaaaattttttatcatttccacgatgagaatattattgtatgattcttgttttttttttttttggtaatatatcattatttttattttaagcttagagtgtacgaatataataaaataaaggtataattatataaaacatcatttttttgtaaaaaaattacatnnntacgtttaaagaatttttttttatatatttttatggttttctataaaaacaacacgaaaataacaagaaaactagataaaagtaacataaaaataacatttagataacatcaaaataataaaaaataacatctaaataacaacaaattaacaagagtacaacataaaagaacgtattttctgtaaataaaataaaaaaaccgtaaaaatatttaaaattcagtaaaactgtttttttataaattttttgttgtttttgtgtatttgtgaaataatccctataataaaatcatttgggctagaagagcagtttgggaccaattggaggtgggtcaaaagtgttttaaattaaaatgggccacactatcatatgtacaaatgaattctttaagtttcgataaccttaaaagaagaaaaaacagaaataattaaaaaaaaagtgttgtatttgataatgacaacctcaattgggtaatatatcatgtatatgcaacaatttactttatctagttcattcttggtacctataattggctagtgaaacttttcccgcaccaagaacattactatacaaatctatatatatatacaaatatatataaatatattatgttgtaccacaaatttatctttacttaatcttatttattcgaattgctttaatactgtaacgtccccgcttcaaacttctattgggcccttacatccacggaatgaatgtctct

SEQ ID NO: 114188 - DNA, 3449 bp, Cannabis sativa
tagttagtctttaactaacttaactgtcaaaaatgacaacttgcatattgggtcctttggtttggcctatataaagaggactactcatttcatttcactagaaaatagaaagaaggggaatagaaagagaataggaagaggaataacaagagagacacaaaacagtagagagagaagttagagtgagaaattgagagagatatctgagagagagagagagagctgggattgggaatttgtattgagcaacattgtcgattatgttggcttgggttagtgagttaatgagtgttgaaagattacaccaaggatgacctactgtgattatttccttatagctcctgagattgatatcactaattctcattatcaataaagattggtgacaatgcttttaaattgaagtatgaccaagttcacattgaacttaggatcggaaccaatataaatcttgtgtgttgttgtgtctgaaagctatctagattcatctgtgttatttttctagtttaatttaacatttatttgtttaagtgtgatcttgaaattagaattatagaggttaattcctatgtatcagagctaaatttcctacatcctccttactagtttcagcatcaacattcaccttgagacaattttccatagaaggacaccatctgggagagtgaacaggttgttgtttagcctacttatcaacttggagatccttagaattaacttagcactccactccaccagcatctcaacactaggaacaatttttccatgattccatttgtttctctcattccaaatattccaagaagtaaagagcacaaaatctaccacataaagataatgtaacgtatgatcaagaaaggcaagagaagagagtcattgagacaatgagattataacttttaatttttttccacaagccccttcatttcaaagtttcaattattgaagagcatcaccaaagagtatggatattgtcctcaacctctataaattgttccaaaataattcaattttcatctcatattttttttttttgaacaatgaacaattttcattgaaaagaatcagcgttgatcataaaaagaagaggtgaaaaaacatccatccaaactagctcatcatccaccctaaatgcatgcccatctaattcatgcttagccatataagctgaatgatttgcatgaataagagacgccttaagaaaattagacagtgaattaaaaaaatatctaaaagagaatctaaatcattacaggaagaaaatctcttaaaaaagattgagatcaaagctaaacaattagactcaaaagaattgacaagaagaccaattccagcaaccaatctagagctacaacttttgcttaaataactaagattccttgtgcccatcctaatataaccaaaaaagaaagaatggtagctagaaaagtcaatacctagaccaaaaaataccaaacaaataaatttaataatttgactcgaacataagtatgatagttgggtctaagccctagagttttattttttggcaccttcccaaaatgcctcatactaatggagtaggtggaataattatattaaaggaaaatcttgtctattcttctgatgtagtaggacttgggttgataccccaacaaaaaaaaccacatactcgtggcctcccctccagcaaaactaccttatgttgccgttatcaccaacgtaactcgtcgtgtgaccatcgcctttatcaggaagactttcgacacgggtccaaacatcgatctccgtcttataccgcacaccatctgactacctcaatatcaagtagaatttcaatatgacaccatacacatcttcaatcgcaaggtcatcacattgagagattctcccatacatcgcaaatgcatccccccactatcccaacactcctgaaccattagctctggaaccacttattgggccccattcttccacattgttgggccgccacctcaacttaattccaatattagtatgatattgtccgctttaggcctaagccctcacggttttgtttttagacaccttctcaaaagacatcatactaatggagtacgtgaaatacttatatttaaagaaacttttgtctattcttgtgaaacttgagttgatacccccaccaactaaatataagaaccaacaacaaaaataaacaaaaaatattacttacccattaattgttctcaaaattggttcagtgcctaaaaaaagcttctcacactaatttttcttacttgtagtagcttggagaggtgaaatgtatactaaatgtaaaattttagtgtgaattagttagggagaatgagagaatataaggtaagagagaagagagtgaagagagaaaaagaaagaaatatgtggggagggggggagtagtatatggagggatattttgggtactccacaaaatgtatacttattctcctataagtattaactttggcctaatttttaattttttccgtaagatatgcataaatatagtgaattttccaaaacaattgaaaaagcctgaatgaagctagaaccaggaaagcaatttactagaaacaaagggcgagaattgtgtggcttaaggatggtaataaatgctccaagttcttctttctctctgctgctattagagggaggagaaatgccattgagtgcattttgaataaacataatgtctggattagtgagcgggatttgattggtcaggaattcttggatttttttaaaggtatcttctctggaactaattcttatcggcagttggattgtggccatttatttagggaaatgatttctcttgagaaccaagtagaggttgttgggtgtccttctcgtgaagaaataagaagtactctgtttgccatgagtaatcataaagcccctgggctggatggaatgtcagttttatttttcaaacattactgggagtcagttagagacgatttctgtgacgctgtggatgatttctttgtcaaaggaaaaatgcataaggggtgaattcaacaaatgtagtgctaattccaaaagtgaaaaactcgaagagaccgaatcagtttaggccaatctctctttgcaatgtaatgtagaaggtcatttataaaatcattgccaatagaattaagcctatcctcccgtctcttatctgccctactcaagcggagtttgtctctggtcggaatattcaggataataatgttttggtccaagagattatccactccttcaataggaagaaaggaaaagagggtttctttgcgatcaagatagatctagttaaagcttatgataggctgagttggagttttatagatcatgttcttggttgttttgggttccctcaaaagttttgtagttgggtctctcagtgcatttccaccgcctctctcaacatttgtcttaatggtggtccggttggcaagatcatgccttcttgc

SEQ ID NO: 114189 - DNA, 2280 bp, Cannabis sativa
acgacgctcttccgatctgagcgtcatgttctttctctgatttagttctcaataaaagagatgtccctattgaattacagatttagtgaattgataaaattccaatttgattcaaaaaaaaaatacaggctttcactgtttaaaaccatatccatcgtaattttcttttcatccaagctcattccacctcggacttggcagcgtctactctataaacatcagacagaagttggtgaaatttggttgtgtaatcaccaaattgagcaacagaagggggcttcagcctgaaaacgtatgagatggcctttggtttcaccattggcttcttagtagtgactttatcaggcagctttccaaagcttctttcatcaaaccgaaatgactctgaaaggaagaagaaacattctctgcccaacttttccacctgagacaaaaatcataacccccatcatgatttcataaacataatctcaacatttcattggataagagcaccttttgagagcataatctaactattttatggcattagtttacctgtagttgtgaaaatcttagattattcatggtgatgataactttcacttcgcttaaggcatcagctagtatacgaatggccatatattcgaaaaagctccgtaagattactctgtcttgttccatcatttcactagaactgccaaggtttggaaaccatagaacacactgaactttactccaagggatcgggttctctccttctttgcaaatgatggtttggaacgggtgaatcaaaccccagaaaatctttacttcttccaggtttggctcaaatatggaagcctgtgacaaagatgtggtggcaaatattttggatgggttgaagtggctagcaattttcgaagagaaaaacaaatcggtgtcatccaatagtagaatatatctatcagaagatgctgcaggaagcaatctaagaaggaatgttgctttggcgttaccatcttctggtaagcagagagttggactgtgtgacgatacttgctcacccctatcatggaaaaatgaacatgacgatccatttcgacatccctgtcaattaaatatgaatataaataaaagactaatgcttcagacacagtccagcattgataaatttaaggtttaaacttcacataatggagaagaaagttcaggaatcatatacaaatattgttgagcataatacaacctacatagggaaatgcatgaagacactcataagaacaattaaatgaagaaacatgacccaccacataagagctctaatacacgttgcaaactgagatacaatttgaatgtacacttacatgtgggtttaacgtaatgcagagactgactactattctgcataaagttctaggatgctgagaaagcagtccacatcacatggctgatgatattgcttgtagtcgatgaaaaataaaatattttataagagattagttttgagagttatacagaattagtggtcgtggacagagttggagggaggaagtagtttggaatttaagaaacacaaaacataactgctagcttatagatagggacgaatgtagcaattgtggagattggattgataaagaccaattcgactaagttatggtgatttgtggttgtagttgcagctatggcatgattacaaacatgagaaatggaaaggaagcaaaatttaaaaaatttagtagtattaagaagagattttcacacttagaagaaatatattggttttatttcatagtaaatatcttagaatttatgtttatagatatctacatatatagttaattgatttgcaaaataatattggatccgtgtgagtaaaatgacatgtacttttttaatgagcagaaatgaagacaacttaatattttatatgaagacaaaaatatcataaagttcattaagaatattgctaagggaccactctatcatgtcacctggagggaaaagaaaaatttgcatggaggtcttggtacttgctgtgaatgagaatatggccattgattgccccaatagccggctccactgacataggataaacccataggcagctcaccattgtaaagggagtcatgatttgtattctgataaccaacaatatcttctgtccactgaacttttatctattaaatacaaggcaataaaaaacaatcagttttcacattgaggataaccaacccagatagtgaatgcttgaatattaatacctctttgataatagctgcgaactccttagccacgtcaattcttttgaagttatta

SEQ ID NO: 114190 - DNA, 1448 bp, Cannabis sativa
aaaaaaaaaaatattctttatagggtgtcgagtgtcgttttgcaaacaattataagaaagaaagaaagaaaaaaaagaggttattatgcgagagggtttttcgctcctcaaagtgacgttttaaacacactcgacaccttttctagaagactattgtgctaaaatgatattctaaacacattcttagaatgagctttatccaatgtacttggagaagatataaaaagagcagccttgacaaaattacttttgataaaaaggtaagctactatacacaatacacataattttttatgtacctaactcaactttctttcactaaccattatcaagaacaagaaccccttttgaactctctctcattattatcattctcttctactacatctataaatatagcttcacataactactcaattccaacatatctttcaatatacataaatacaatcatatttacatatacccctttagtttatatggctcctttctccaagtttcttcttgttgtcttctttgctttaataataataataagctacattccctcaaatgaagggagaaagggtcttgtttcaaaggacagttcaactcaaatattgcctcctaataataaagagttaattagtactttagtttctcagatggcaaaaaatcatgtagtagtgaccactaatgattatgagactgatcatagggttttgcaatctgttccaagtccaggagttggaaactagctatatatagtaatcttgttgttaagtttgattaatttacattaattactttgtttaatagtgttatatggtattgtagtgtgtttgactatctcttgttgtaatgaataaagaaagagaattgctaaaaggtattattggtgcctaccacttttctcagtgtcatactgctatcggtaatatcactaaccaattatgtgccgccacccaataacaattctcataaagaaagtagggagtgagtgagtatgtaatatgttgcttaattaagcataggtgaaaaagtcattaattgcatttatttatatgtaattttgtatgatggacctttctagttcattattaattgaaactttaatgtcatgtcatatagaatttgttgggtttatcttttcatttaatttcttatacagaataataataattgtgatacacttaaattacacatattttttacattaatttttgaattatataattaaaagtgaggtagccctcacttaatattatttaatggttaaaaccgaatacatattattgtgtatacaaattatgtgcagtttaagtttgtctcaagtattactcttcttatacatttaggctatgtttggtaggagagatggagaatagagatgatggaaagttgatggaggaggtagaataggagggagttagggagagttgagtaacaatctttttaagagggcataa

SEQ ID NO: 114191 - DNA, 2077 bp, Cannabis sativa
  modified_base (26)..(32): a, c, t, g, unknown or other
gtatttttgtaattttttttcctttnnnnnnnttttctgtttttttccctataattttatatactttcaataaaaaactaataattttgttagtttttttaaactgctctattaaaataaaacttattttacttcttatgcattagatcacaattgtaaaatttaggcaaaatatacaattgatttatttttgagccaaatttagcaaaataatttacattatccattggaaatggtcttttatttggcaccataagagctcaacaccatactaagactatctccaatagattgtgtaaattttgggctaaattaggctaaaaaaataagtcaatagtatagttagcctaaattttacacttatgctccaatgcattatgggtctggggacgggctcggggtttgggtctagggccaaaactggggctaggatccggagtcttagttcggggtctagggttcgggttcggggccaagaccgggcttggggtccgaagtttaggtccggggtctaggtccagatttgagaccagagtccgcgttcgtgtctgggtcggggtccaacttcagtatctcggtctagggttcggatcatggttaaggttggggtcggagtatgggtttagggttagggttagggtccgagcctgggtttgggcttcggatccaatgacagggcctaggtttgggtccgggattggggtctggatcggggtcagagtctgggtcctaatgccaaggtctaggtttgggtcagaaaatattaattaagaagaaaaatcatttaaaaaatttttgaaaataacattttttttgttctaaaagttttgattctcaattaaaaaatgaaaaaatgaaaaatagtttgtacaacataattttagaaaatattttcacttttttaatttaaacaactaaaatcttattaaaaaagtgttaccaaacgcatgcactcttgattttttagaattaataattttatttaaaattatatttactcaaaaataatttgattatgataatatattaagaattgttaattattattgtttttattaatatttttggtgttttaattttttttaaaagtgtaaccgctccagaaacttagaaccgtgatgtcgcttcttttatgattcttctactactatgtttttttttttaatcaaattttcaatttttttattattcaataataatatagtatttaacataaaaacatattctctaataaaacatataataatgtaagaatttaaacatatgtctcttgatattctttgtatataacatattttgtgtgatatagttattgatatttactatataatatattcatgattaatagttattaatatttgttgtataatatattcatgtcttgatataattagctatcattataaagtatttgaattttataatatatgttatggaatttaaaaagtcacatgcaagtaacatatagtttactatttaaagagcatattattatttttgtgagaaagacaggtaaggaaaacataaagattttagatggtgtgtacatggatctcatggtgattgtgttactctcaccattattattttgtgtaatattatgtatgatgtacgtattatatattttaatttaactatacataattatatgattatgcttctcaatctattatgctaatcgatgccgtatcatgaactcatccctacaagcttgataggtaacattacttcatatcatataatttatatgtgtagttcttaaacatacaaattcattcaattttttttttcttccaaattttatattcaagtgatgtttttgtggtatatatatttatttatatactagtcgaatctcacatgcgaagtgtggctcttaaaaatatttaagcacaactattttaaaagaaaataattaatattttatttacgaaatttataatgctatcgaattgtattctccaaaatatatattatagtgacaaaattttgtgaactcttctatttacagaagggaaatttgattttttatgcttacatttggttaaaattgtttttctaaacaaataataactaa

SEQ ID NO: 114192 - DNA, 1550 bp, Cannabis sativa
agagaagaagactgagggtagagctaagaaggtggctagcattagttttttgggtttgttgtttttcatcttgctatttggtggattagttcctgtggtggatgttagcttcggtggtttaagggacaaagctcctgttgggcccgattaccagtttttatcaattgattcacatatgaatggatctggagaaaataaaggagtaggaatatcaggtgcaaaatctgatggttttagagaaacggtagagtttgtgcaccaagaaagaggctctcagtctaaaccaggttatggtgaatttgttcgtctgcgaaatgaaagtgaacctcttgctgcttccttgtacgttccaagaaatgataagctagtcaagattgatgggaacttgataatacactctgtcttagctagcgaaaaaactaaggcatcacttgctcattcggaaaagagtaatagggagactagtttggccatctctaaagatctggctccatacactgctcctgaagctggtaaccgagggggacatgctcctatatacagaaatcctacagaacgccacaaggctcttggttctggtgctagtactaatactagaaaggaccgtttgcagtcaaatgcagctgatggaagactacaacagtggttccgtgagggtcttgcagggccattgttgagttcagggatgtgtacagaagtctttcagtttgatgtgtcacctgcttctgcatcaggagctatagttcctgcatcctcagtttccaatgtatcaacgaaacatcatcagaattctaggcagaatacaacacgcctcaagggcggcaacagaaggatcctacacagggttgcaattccccttgctgggtccaattataacataacagaagagcatgtgactaaaaattctgggaaagatgagtttcaaggtaacagatctgtttcttctatggttgtgtctgtacttgttgatccgcgagagggtggcagtggtgatgttgatggtatgatgaagccaaagtctctttctaggatctttgtagttgtgcttatagacagcgtgaagtatgttacttactcatgtgttcttccacgagtaggtcctcatcttgtaactgcctgggcataaaaagttgaattgagtgtgtgtttcattcacttccaaactcccagttttatacataggagaatagtatagttaagctgcttctgttatagtatttatactattaagtattaaccttattaaccttacccatggcctccaattcgaaaatggctgagctggtcaacaactttttgtttggatattttatttatatatttttaatgaatatatttataaggttaattaggagttttactttctgaattttgacatgtatcaaatcatgctccttgaactattaagatcgttaaagactctcttaattattaagattgttgtatttaaggatttttattcaattttagtaaaaaaaatttgatatgaatgaaagtttagggggtatgatttagtacatgtcaaagtttgaggggcatgatttggtaga
